United States Patent Application Publication US 2005/0228172 A9 - sequence listing, part 154

SEQ ID NO: 702911 - DNA, 1814 bp, Homo sapiens
tggggataccattctggaagacttgcccatccaatctggtaaggaatcagggctggggccagggaaagtcccgggaggatggagaggggcgtgagagagaacaaaacaccagtcaaggcaaggtggctgtgagtcggcgggggggctttgaggccaggggcgaggatagatcaaagaacagagaatgctgacgggggccagggcaagtgtctagcaactccttgtcttgacacagggttgaaagggaacccaaagccttgaagacccccttccccattccgctttctggtcggctttgaaactatcccattttgttttccctcggcgtccacaaaaatataaagtagggcctattttctctgtccttatgtctctttttccctatatcaccgatgagatctcaagggtgcaggattttttttttcttgattcatttttgcagtccccttcgtagatacttcgtttgacaggcatactcattttcgagttagcttttaaaacacccactgaaagctctttcaatttctaaccagcagcagttatttctgtgccatatcaaaacttgaacatcagtgtttataattaaaagctttcagttgctgtatcaaggatgttgtaaacactctagagtagataagtttccggagaaggagaaccccctagcggcctactctgtagtgagcaccttctgtaaaatactgtataaggaaaggaaattttgtttttgaaatgtatctttttaggtaagcttgaagttgtttactccagaccccttcactaaattgggatgcaacctcaagtgttttttgttcttttttcatctttatgaaaattcagtgaacaaagattcttactggtaacttacttgcaaaactgtattctccttagtaaccccagtttatgctttaactccttcagtttgtaatttacagacttggctagagaacactcggtttcttctgtaatttctttgcagatcgggatttgttttatttttaacaggtgacatgctgatcattgaagaagaccaaaccaggcccagaagttcacctgcatttactaaacgtggtgcttctagttacgtcagggaaactttgcctgtgcttaccagaaccgtggtcccagcagacaactcttgcctctttactagtgtgtactatgtcgtcgaaggaggagtcttgaatccagcttgtgcccctgagatgagacgcctcatagcacaaattgtagcaagcgatccagacttctatagtgaggcaatactgggaaaaacaaatcaagagtactgtgactggatcaaaagggatgacacttggggaggagcaatagagatatcgattttgtccaagttttaccaatgtgaaatatgtgtagtggatacacasacagtaagaattgatcgttttggggaagatgcaggatataccaaaagggttctgcttatttatgatggcatccactatgatccacttcagcgtaacttccctgatccagatacacctcctctgaccattttctcctctaatgatgatattgttcttgtacaagcactggaattagcagatgaagctagaagaaggagacagtttactgatgtcaaccgcttcaccctgagatgcatggtatgtcagaaaggattaactggacaagcagaagcaagggaacatgccaaggagacaggccataccaactttggagaagtgtgacctatgcatgaatgagggttgaagcctactacctcacacatccagaaggctctgggttttccaataagctatggtaaccctaaagaacaaaggatacaatgcttgaac

SEQ ID NO: 702912 - DNA, 654 bp, Homo sapiens
gtgagtccactggacatttaccacagtgtctccagtaactgagtctttttaaaaactctgaatgagttaagtttctaaattatgaattgattcatcaaatgaagatactcagaattgtccaaactgattttatattgcaatttggtagacattataaatgtgtgcttaaccactgataagtacatcacaagcaatttttacagggatgagtctcatccttgagaatgttatcacaaaacaggaactgattgtgccctgtttaagatctctagcatataaaacrtagaatgtatgagggaataggtgcctgagcagcttcctgaagctttaaaagaccgttggcctcgtgttttaatgcaattcatgtattggtctttgtcacattggataacattttaaagttaagcagggtacttttttaattgaaattccttgaaattcgagtcctcagttttttcttcatttgcgtaaagtttatcggggggaatttaattttctcagctttttgttaagagcacttcctccaaaaaatttttttcaagtaataatgctctgctttgggttggtttttgtaagattttttgcacacctaaagagtgtttgcttttgtgctagccttatccctccactaaagttattttaaataatttcaca

SEQ ID NO: 702913 - DNA, 2958 bp, Homo sapiens
tcacacaccggggcctgttgtgggatgggggagggggaagggataacattaggagatatacctaatgtaaatgaggagataataggagcagcacagcaacatggcacatgtatacatatgtaacaaacctgcacgttatgcacatgtaccctaaaacttaaagtacaataaaaaaagttgaaaaactgactctcatatgtgagagtcacagatatgttgatgactctcatatcatgagtcggcacacctgtgaagccgtgatttcaattaggggagaaagtctgcaagagaaaatggggctgccatgcacaaatttagtccactattgagatagtgacttgtgtacttagatcgaacwtacagaaggtgttcactctcatgcctaaaaccagaatatgtgcgggattcatcccatgtctagaacttcctgcaggtgtcattgtgacaaacatacacatttgtccagcacctgagtgagtagactctcctgtttaagcccatctcacaaataaaattgggacatatcattggacctagaacgtaggtgatgtggctctattctctcgacttgtgctgcccacagggagcattgtaacatatcactgaacttaacacctaggagattgggggctcctgcctgaactctgcccacagggaggcagagcatatttctgccttgtagcatatttctgcctccatcaccagatgatgtgactctcctttctgcctgcaccttgcccacaggaaagattctgacatatcactgggcctagtaatcagtaatcaggtgatgtgtctctcctgccatggctttacccacagggagtgtggtgacatatcactgagctcaatattcaggtgatttgactctgctgcttgtactctgatttcaggaggggattgtaacatatcccgggtgagcacacaagtgatgggactcccttcctagcctccgacctcataaaagattgttacatatccctggcccagccttaggtatgtgactctcctacctggtccctgccatcaggggagatattgacagatctctggccaagcatccaggtgatgcgactctcctgctcactccctacccacaggagagattgaaacatatatcttggccagctcacaggtgtaataatgactctcatacctcaaacctgccactaagagaaatgctgtttttcctagtgaggctttggaaaatcggtaggtcctaaatcttctctttgtatgagggtcttagaggaataccactctctcttatattatataaagcccttaaatggtacaaagagtgttatcacagggatatgttgcataacctaggggaggggcccagttatatgttacaattagcccagggggcagggcacaggcatgagaagaatctcaccacatatgtgctggcctaagtgatacatcatcatccccactgtggacaggtcgcagtaagaacaggagagtcacatcattcttataatggtctcagatatacatcacaatgactcccctgggcagaaagaagggataagagtcacatcacctgtgggctaggcccagagatgtcactcttacttctgtgggcatgtctcaggctggagaggagaatcacattacctaagcactggaccaagaaatacgtcacagtctttctcatgggcaaagtccaggtaagagaatagagccacatcaaatagttcatgggctcagagatatgtcactatgctccctgtgggcagggttcaagtaggacccttacattaccttggtgctggttcagcaatatgtcccaatgccttctaaggacagaacaaagacaaaagagtaaaatcattttgatgttttacccatcgatatgtcacaatcatccccgtgggcagaacctgaaaaaagggaagagtcatattagctaaatgctgtgcctagcgataagtcacaattcaccctgtaagcagggactagacagaagatagagttacatcatctggtggctggtgcagggatacgccaccatgccctctctaggcaggatccagacaggagagctatgtcgcctgtgttttcgacccagaaatatgtcacaaacgcccatggacagagcacaggaaagacaggcacataacctgaatatcaggttcagtggtatgtcccaatgcctcctgtgagcattccaagtcaggagaggagactcacattacctgtgtgcaagacccagtgatacgtcacacggaggagtaccactgtcttgcatattgtgtaaactatggtagagaaattgtcaccacagggctcgccacactggtgagattatacttctcagatgcacaccacaccaatattcaggatggtctctatcacacgtggagagagcccactcttgaggtcctgaattacacatgcagacatagtccacaactgggattctgactttcatatgtgaacatccagccacaggtgggatggtgactcatttttaaacgcagctcataggcagttaagaactcttatttggacccatccaagtagaaagatgttgactgtcataccacggcttaaagctaaaggtacaaggaggagtccgtgcctgcttaaggtttcagagagaattgttacactcatgcatactctataaaggcttcatatggtgaagagagtgtcctgctagggcccagaacaaatgtgagattgtgatactcatatgtacactgagccaagagcaaaaattgtcatcttttcacatgaacacagcccaatgttaaggttccgaatctcacacctgttgatctacctgctgatggaatagtctgtcaagagaaagcagagatgcatgagcatcaatctggaaaacagcaataatggtagtgtgcaccaggattcagatatcttcctagtattgttttctccaaacctctttattcgtaattcaccatttgtttcattgccattcgggca

SEQ ID NO: 702914 - DNA, 635 bp, Homo sapiens
aaatttttaatcattattataccttacacatttttgataataatgttattgagacataattcacatactatgtattttaccaacttatarcgtaaaattcaatgaatggctttagtatgttcacagaatggtgcaaccatcaccacaattttagatcatgttcaagactctgaaaagaaaccccagaccctttagtaacccccaattaccccgtcctcccaggcctaggcaaccactgacctaccttctgcctgtatagatttgcctgttctgggcatttcattagtataaatgaatcacacaatatttgccctttgtgtctggcttctttcactcagcataatgttttcaaggttcatctaggttgcagcatgcatcagagcttcattactttggatggaaagatatgattccattgcatggatgtaccacagttttttaaatccactcatgggttgatggattgggttgtttccaccctttagctcttgtgaataatgctgccaggaacattcatgtaaaacttttttgtgtgcttttaattgatgcattaaataataagacctaggagtgcatcttacagcctctataatttaagttgtgctgagtgtaaacaccatttggtctggtctgca

SEQ ID NO: 702915 - DNA, 983 bp, Homo sapiens
aggccactgggttggtcatgcggtaaccaagaaggggagcaagtagttgggtgacaaaccctgtacatctgctcctaactttcgaaacctggctgatgggaggccaatgtcaccctctaacgccctcccatagcagcctcggcttgtcttctgacagtggcactgtccacccacaggcatcacgcatcctgcccgcacattgcttccgccagtggagccccagctgaaacactagacaggagagaagtccagagatcctgctcactatagggaaggagaaagacctcttcagcttgtcctgcctcggcaaaggcaaagcctcatgcatttgctcactcctccctcccagggctcagccggcacctgaagctagtgtagcagaaagagcccaattctgcatcaggcgggcctgggttcaaatcccagatcctccactttctaattgtgccatctctgagccttccatcccttacctagaaacagagttctttccacccatgcccttgtgagacagcgtaagtgaaaatgacatccacacggtactggaagcagagctgctagaaacccagccaggcagggtttgaacttgttatctccaaaaagtctcaggaatcgtatttctgcctgatggtgacctacttcagcaaggacccaatgtagaaattactctgccaccaaaaaagcaggcctcagaccccctccatcacctcccyaatttatgaattaaacaacgaggccagtgcctgaggggtctgcagatgagagtcagaaaccagcagccccccaccccacagagacaggtccctgctaactagacacaagaattggccttctggggtgtctctgcgtgttctgtgtatggtgacctagccccggccctccaggagggacactacgtgcaggacattttggaaaacagtcttggtgtttcctcaaaaagtgaaacactgtgttatcatgtgagccagcaattctcctaggca

SEQ ID NO: 702916 - DNA, 604 bp, Homo sapiens
taataaagagctgtctgttcttcattaattagaaaagtacagagcctgcttactttgagattccaaaacctcttcaggcacaactcgttattaatttgatcactttcctcaaaagaatgatattttgacaaatacagtttctggcttcagtcacatatagaaacattggaataagtacaatgttgtgttttgcttttttttttwaaataggaactatgtttgataatgcatatactccaaacacctctaaaaataattttcaattggcaagctattttttggtgtattttcctagtctgggagaggaagttttatcatttaatttgataaacttagtacctttgagagaaaggaggagaaaattttaccatcttatgtggttgaaatatgctttagtatttacataattgaaaatgattcaaactgatttcctctgacgaacatccgaaatgaaaataaaaattgtgtctactccaaagggtagtggcttgagtcacccactggtatgtgtgacctatgagtcactcactggtatgcgtcttcccgatcccctggcctatgggttagaagtcaaagatgctccactggggcttcctttgtagct

SEQ ID NO: 702917 - DNA, 550 bp, Homo sapiens
ttcgagaaggtcacagacccttgagaaaatacagaaattctctgctcggcccaagtcaaaataaaatgactaaataggccagggcagcacagacgagagaggagtttttctggggcagtggttctccaagtgtagtcactgagcaagcagcagcagagtcagctgggaacttgtgggacatacagatcctggagccccacccagactactgaagcagaacctcctggggtggcgctggcaatctgtrttttaataagccctcctcattctgatgtcctctaaagtgtgagaaccacagctccagaatactgcagggcagtgacgggtggaggagaaggagtagggctgacttctcagaagagtcccgaagaccttgtccttgagtctgcagagaagttcaccaggcagacaaagaaagaaagagcaagcccaggcatacccacaagtaccatctgagctctgcataccttctgatatatgtttaataatcttggaataacaattgtattgatattatgttgtttagagtaagtggcaatgtattctttga

SEQ ID NO: 702918 - DNA, 847 bp, Homo sapiens
ttggaagtaggggaggactcactctgctttttccagatccatcatagcttcttaggatctggcaccagcaagaagtcccgggaccactcattgggtgagaacacaccctgcttctcagacccctgctggccacattttctccaggaaactgtactgtgatcctccccaccagggctctctgctagtgactatgttcttattagccccagaaatgaagaaagccttaagtcagctccctccatggtctccagcaaagcccaaaacctgctgaaatctttcagagcatcctatctgcacaaaaattggatttgagttgggcacaggtcagctggttttatgagagcggaccrccaacttcccagtgtctccagcactggttcacacaggcatagcttcaaatgtgtaatatataactatattttttagtaaccaaacttaactcagctcttttgccattctttctgcttggaattgagaaactttactttttcaatcaatgcaaatcaaaaactgatttaaacaagccgattcaggatttaaatttgttcagttgaagatactctctatcttcctcctttccctcttaatctctcagttgacctgagtttccagagattctcatattctcctgggatgaaggagcagcatctgggccttctctgaaacgtggggtcctgtctgttctgcctgatcacactgtgaaggttttaaagaatgacttcaaattctctgcacacctcctaacaagatgtggagtctatgccacctctcttgaacctgagcagtcgtttgtgattgcatcaatgaggggaatgcagcacaagggtagccttgtgagtttcaaggc

SEQ ID NO: 702919 - DNA, 598 bp, Homo sapiens
ggccacaggctgcctggtggaggtaggtaggatgggacgtgtaaccacctaatgtcactgggtatggcagtgttagccaaagagagagcctctctggagaagggagtagytgctggcaaccaacacccacagtagctgggggtgagcacaccagcctagtaaagagatggtggggggagtgttccataagcatctgttacactaggttacctcaaaaccttgatgtcccggaggaaatcccactgcaagatggcttgctctgctggcttacacatgcctccatgttcagtagtttttcagtaattttctaaagaagaaaacctaatcctcaaaccactccttctatatttacccaatgctggtgcctgactaaaagaaaattatttgtttctcatttgcaacttaatgttttggcctttattaaaagatgtgcatctcatcctctccaaactttccatccttcctgcagaaaactcacccaggctactgcatactctagggttttggtctcagtggatggaatcttgttttgaagaagccaaatatgatggattactgaaatctgttgttcccccagctcagctgagggactaagtcc

SEQ ID NO: 702920 - DNA, 598 bp, Homo sapiens
ggccacaggctgcctggtggaggtaggtaggatgggacgtgtaaccacctaatgtcactgggtatggcagtgttagccaaagagagagcctctctggagaagggagtagctgctggcaaccaacacccacagtagctgggggtgagcacamcagcctagtaaagagatggtggggggagtgttccataagcatctgttacactaggttacctcaaaaccttgatgtcccggaggaaatcccactgcaagatggcttgctctgctggcttacacatgcctccatgttcagtagtttttcagtaattttctaaagaagaaaacctaatcctcaaaccactccttctatatttacccaatgctggtgcctgactaaaagaaaattatttgtttctcatttgcaacttaatgttttggcctttattaaaagatgtgcatctcatcctctccaaactttccatccttcctgcagaaaactcacccaggctactgcatactctagggttttggtctcagtggatggaatcttgttttgaagaagccaaatatgatggattactgaaatctgttgttcccccagctcagctgagggactaagtcc

SEQ ID NO: 702921 - DNA, 598 bp, Homo sapiens
ggccacaggctgcctggtggaggtaggtaggatgggacgtgtaaccacctaatgtcactgggtatggcagtgttagccaaagagagagcctctctggagaagggagtagctgctggcaaccaacacccacagtagctgggggtgagcacaccagcctmgtaaagagatggtggggggagtgttccataagcatctgttacactaggttacctcaaaaccttgatgtcccggaggaaatcccactgcaagatggcttgctctgctggcttacacatgcctccatgttcagtagtttttcagtaattttctaaagaagaaaacctaatcctcaaaccactccttctatatttacccaatgctggtgcctgactaaaagaaaattatttgtttctcatttgcaacttaatgttttggcctttattaaaagatgtgcatctcatcctctccaaactttccatccttcctgcagaaaactcacccaggctactgcatactctagggttttggtctcagtggatggaatcttgttttgaagaagccaaatatgatggattactgaaatctgttgttcccccagctcagctgagggactaagtcc

SEQ ID NO: 702922 - DNA, 621 bp, Homo sapiens
tgaataatttttctgcactaagtctgataatggttgaagattttggtrtgtgtgtgtgtgtgtgtgtgcatatatatacatatgtatgtatggggtcttcaaaagttcattgaaaatgtatattataaacaaactatgcatggatttcaaagatttttgcatgcagataaactcatactaacttgtcatactgaacaagatctagtttgaggcactaagaggaataagacatgaatttgaaaagagctcttatcaaagcaacatgaatgctgctaaaattgaagcaaaaaaacgtcaaatttatggtgaaactggaagaatggtgaaattatttatgccttacaaaaagtttatggggacagcatctcccccaatcatcagtttactaatggataatttgtttcaagaaagaaagagatgttgttgagggtgaagcccgcagcaacagatcatccacatcagtttgctaggaaaaatttcatcttgttcatgtctcaaagaggaccaacaattaactgtgagaaacaatagacaacaccatagacatctcaactggttcagcttatacaattctgactgaaaaactaaagttgagcaaactttctacttgatggatgccaa

SEQ ID NO: 702923 - DNA, 621 bp, Homo sapiens
tgaataatttttctgcactaagtctgataatggttgaagattttggtgtgtgtgtgtgtgtgtgtgtgyatatatatacatatgtatgtatggggtcttcaaaagttcattgaaaatgtatattataaacaaactatgcatggatttcaaagatttttgcatgcagataaactcatactaacttgtcatactgaacaagatctagtttgaggcactaagaggaataagacatgaatttgaaaagagctcttatcaaagcaacatgaatgctgctaaaattgaagcaaaaaaacgtcaaatttatggtgaaactggaagaatggtgaaattatttatgccttacaaaaagtttatggggacagcatctcccccaatcatcagtttactaatggataatttgtttcaagaaagaaagagatgttgttgagggtgaagcccgcagcaacagatcatccacatcagtttgctaggaaaaatttcatcttgttcatgtctcaaagaggaccaacaattaactgtgagaaacaatagacaacaccatagacatctcaactggttcagcttatacaattctgactgaaaaactaaagttgagcaaactttctacttgatggatgccaa

SEQ ID NO: 702924 - DNA, 621 bp, Homo sapiens
tgaataatttttctgcactaagtctgataatggttgaagattttggtgtgtgtgtgtgtgtgtgtgtgcrtatatatacatatgtatgtatggggtcttcaaaagttcattgaaaatgtatattataaacaaactatgcatggatttcaaagatttttgcatgcagataaactcatactaacttgtcatactgaacaagatctagtttgaggcactaagaggaataagacatgaatttgaaaagagctcttatcaaagcaacatgaatgctgctaaaattgaagcaaaaaaacgtcaaatttatggtgaaactggaagaatggtgaaattatttatgccttacaaaaagtttatggggacagcatctcccccaatcatcagtttactaatggataatttgtttcaagaaagaaagagatgttgttgagggtgaagcccgcagcaacagatcatccacatcagtttgctaggaaaaatttcatcttgttcatgtctcaaagaggaccaacaattaactgtgagaaacaatagacaacaccatagacatctcaactggttcagcttatacaattctgactgaaaaactaaagttgagcaaactttctacttgatggatgccaa

SEQ ID NO: 702925 - DNA, 621 bp, Homo sapiens
tgaataatttttctgcactaagtctgataatggttgaagattttggtgtgtgtgtgtgtgtgtgtgtgcayatatatacatatgtatgtatggggtcttcaaaagttcattgaaaatgtatattataaacaaactatgcatggatttcaaagatttttgcatgcagataaactcatactaacttgtcatactgaacaagatctagtttgaggcactaagaggaataagacatgaatttgaaaagagctcttatcaaagcaacatgaatgctgctaaaattgaagcaaaaaaacgtcaaatttatggtgaaactggaagaatggtgaaattatttatgccttacaaaaagtttatggggacagcatctcccccaatcatcagtttactaatggataatttgtttcaagaaagaaagagatgttgttgagggtgaagcccgcagcaacagatcatccacatcagtttgctaggaaaaatttcatcttgttcatgtctcaaagaggaccaacaattaactgtgagaaacaatagacaacaccatagacatctcaactggttcagcttatacaattctgactgaaaaactaaagttgagcaaactttctacttgatggatgccaa

SEQ ID NO: 702926 - DNA, 989 bp, Homo sapiens
cctgtcactgaatcccacctcaaataccagctggccatttaggtggcttccctttaaagcaggctgaagggcaggcatggtagctcacgcctgttatcccagcactctgggaagccgaggcagaaggattgcttgagaaaggaggatagtttgagttcaggagttcgagaccagcctgggtaacagagtgaggccctgtctctgtgaaaaataaaagttttaaaatgtaagaaattttttaaattaaaaaaaaaaaaaacaagtaagctgagttctagcttcctacagaatgatgcccagacccttcacatgttgggatttctgtatgaatttaatgtagtcactttttaaggagagtgatacatttcctgatgtactttaaattgtttttataaaggcttaatatcctcttctcttcctgtctcacactgttttttttgtttgtttgttttgtttttccaacagaccctactttcccttcttctttaaaaagggcctctaatttggtttctatatgggaacacagggtatgatcaaagtggtgtgtatgggggcttcctagacagggaaagggtatggtcctcyatgtggaaaggttgtgatcaaggtggtatatatgggattcctgcacaggcaaagggtataatcaaggcggtacatatgagggttcctgtataaggaaaggatttgatcaaggccatctgacccaccttggccagggcttggcatagggtgaacatgtgacttgatctggttaataagatggaaagataaatgttggggtttctgccaaatcacttgctccctgataaaaggagtgagcactgtgatggcaacgtctcctttttgtcccactgccttccttctcacggtgctgccatgaagacaggtgcttgagctgggatcttgaaaatacaaggagtcttgcaggggtgcttccaggccatgggaccaccgagctcaggtcctccttggaagtgggagaagca

SEQ ID NO: 702927 - DNA, 989 bp, Homo sapiens
cctgtcactgaatcccacctcaaataccagctggccatttaggtggcttccctttaaagcaggctgaagggcaggcatggtagctcacgcctgttatcccagcactctgggaagccgaggcagaaggattgcttgagaaaggaggatagtttgagttcaggagttcgagaccagcctgggtaacagagtgaggccctgtctctgtgaaaaataaaagttttaaaatgtaagaaattttttaaattaaaaaaaaaaaaaacaagtaagctgagttctagcttcctacagaatgatgcccagacccttcacatgttgggatttctgtatgaatttaatgtagtcactttttaaggagagtgatacatttcctgatgtactttaaattgtttttataaaggcttaatatcctcttctcttcctgtctcacactgttttttttgtttgtttgttttgtttttccaacagaccctactttcccttcttctttaaaaagggcctctaatttggtttctatatgggaacacagggtatgatcaaagtggtgtgtatgggggcttcctagacagggaaagggtatggtcctctatgtggaaaggttgtgatcaaggtggtatatatgggattcctgcacaggcaaagggtataatcaaggcggtacatatgagggttcctgtataaggaaaggatttgatcaaggccatctgacccaccttggccagggcttggcatagggtgaacrtgtgacttgatctggttaataagatggaaagataaatgttggggtttctgccaaatcacttgctccctgataaaaggagtgagcactgtgatggcaacgtctcctttttgtcccactgccttccttctcacggtgctgccatgaagacaggtgcttgagctgggatcttgaaaatacaaggagtcttgcaggggtgcttccaggccatgggaccaccgagctcaggtcctccttggaagtgggagaagca

SEQ ID NO: 702928 - DNA, 1167 bp, Homo sapiens
ggagacactctcccccaggacttaagcaacacttcttgcctattttcctgttcaaaattataaacaaggtagacagggaggcaacactgcttgcattctatcagaaactgagccttggattgcccgatgacctgcccaagaccactgagctagtaaataggagaaccagatttacagccgggtctatgtgacttagcctgacaatgtacagttgtgcaggttattctctatctagtagcaggaagtgacatgtacataggtatctccatatatatatatatatatatattcgctattttccagcaaatggcaatcaactgacttgagggaggaatacccattgtctaatttgcaaaagataccatttgagctctcagtagccctggtatggctgctgtcactcctctatccacaaggaagcgaagctatgacaggctgttccaaaagcccaggaactcagccttgagggctgctcctgctcagtcagcgtcctcatgcacatttgtgcagactaatttcaaggtctactgagaaccttctgactccaagccaggcctttgggtacggaaagaggctagaggtcagagaaagatgccattggtgaagaagaatttgaaaaaaaaaaatctaccaaacaagaacaaaaaatccactccctcttgaccaggaaggagcagaagcacagtagggtgacaaaaatacatggactctagagccagccagacagtgggycaaatccaggctccgttactcactagctggttgacaggcagtgagtcaccttatttctctgagcctgtttcctcatctgtaaatgatgggtggttggctgcatgcctctttcaaaggttgttgtgatgattaaatgaaataatacatgtagaggatctgacatggtaccaggcatggtcagggttttttaaaattcagccactgtattgctatttgatgtcaggtcagcagtcagagatgtcagcctggagggctgggctggggatagagaagtcgcagacgtagagccaagaaaccctctgcattcctggttgtagcccaaagagactaggcagctgggggaaaactggccatccacgcatcccaccctcaattattaacaggagggtttgggaagaaatgatctgatatgggtgctaagcatccctgcaagtt

SEQ ID NO: 702929 - DNA, 1167 bp, Homo sapiens
ggagacactctcccccaggacttaagcaacacttcttgcctattttcctgttcaaaattataaacaaggtagacagggaggcaacactgcttgcattctatcagaaactgagccttggattgcccgatgacctgcccaagaccactgagctagtaaataggagaaccagatttacagccgggtctatgtgacttagcctgacaatgtacagttgtgcaggttattctctatctagtagcaggaagtgacatgtacataggtatctccatatatatatatatatatatattcgctattttccagcaaatggcaatcaactgacttgagggaggaatacccattgtctaatttgcaaaagataccatttgagctctcagtagccctggtatggctgctgtcactcctctatccacaaggaagcgaagctatgacaggctgttccaaaagcccaggaactcagccttgagggctgctcctgctcagtcagcgtcctcatgcacatttgtgcagactaatttcaaggtctactgagaaccttctgactccaagccaggcctttgggtacggaaagaggctagaggtcagagaaagatgccattggtgaagaagaatttgaaaaaaaaaaatctaccaaacaagaacaaaaaatccactccctcttgaccaggaaggagcagaagcacagtagggtgacaaaaatacatggactctagagccagccagacagtgggtcaaatccaggctccgttactcactagctggttgacaggcagtgagtcaccttatttctctgagcctgtttcctcatctgtaaatgatgggtggttggctgcatgcctctttcaaaggttgttgtgatgattaaatgaaataatacatgtagaggatstgacatggtaccaggcatggtcagggttttttaaaattcagccactgtattgctatttgatgtcaggtcagcagtcagagatgtcagcctggagggctgggctggggatagagaagtcgcagacgtagagccaagaaaccctctgcattcctggttgtagcccaaagagactaggcagctgggggaaaactggccatccacgcatcccaccctcaattattaacaggagggtttgggaagaaatgatctgatatgggtgctaagcatccctgcaagtt

SEQ ID NO: 702930 - DNA, 1629 bp, Homo sapiens
  misc_feature 1610: n = A,T,C or G
cactgccacatggctgtgtgggcctgggtcctgtcctgtgcagagggaatgagccctggaatgatttcatttctgccactgagcacctctgcaagatacaaactttctgagctttggttttttcatctgtaaatggtggctggtgacacaggccccagctactttgtggagctatgtgagaatcacatgagattaggtcagtgaagccatttttaaaagcacggcatcaagacaattgtccaggagcgttattattagtagtgacgcagtgttcagaggaaagtcaaatttctttgcttttaaaggttttaagatgacctttaaacaaggagccagctgggttcttagttcacagtagtttagcacactttaattcagaggctttgaaagcagggagaaatatttggtggcatggttcccagaaatagccggggtggagaaactggagctcccatggggagtggggttagggggtcaggaagctggtccaaatctcctctgtcaccagcttctcatctccagactcaggaaatcctttccaccctggggccgttcccacactgacgtcccacttcctcctgcaagggcagtgccctcctctggcctctggatcttgagttgggggtggggaagaagatgaaggagagtctgtgtgtagcagtggccctgcctatggggaaagcaggaggaggggtgtgtatgtgtgttggggagaacactctcattttctgatcttctgttgttttaggccctgggctgagtacttcatatattttatattatatagtatatgcakgagccctacaaggaagataactttatttccatttcagaaatgagaaaactgaggctcagggctgggacagatgcaatgtgagaactcacacacagccatgaagtgctggggctggatttagaacacagttctaggtgactacacagtcatggcatcctgcttcccctgagggtctctctgtgtgttcatttgagggatctgcaagcccagctctgcatgtggtgcctgacaccccctttgctgctaaacactgaacaagaaagcaggctctccaccaacctcagcagggctttagctatttgtaaggactcaaacccacccctgcacacacccaccttcttcagccttgtgtagggctcacctcctccaggaatcattttagtattgactctacctcatctggtctcctcctcaaattgtattagccgcctgtcatgctgacatcctgtatacttgtgtcattcaactgtcctatataatcattcactaagtgctggggcacagcagtcttcaatttaacttaaccagagccctgaaaacagcaatggttaagaaattccctcctaccttccccacacttagctaagacttgctgtccactctttctcatgactcccttaagactctcagtgagatgaaatctactgaaaggccagacacagaccctccaactccctgttttttgtctcatgaatgattaactgagactaggagtttgtctccctgaaactaattaggcacagagataagcatttcctgttcagctcacagagcctccctcgatggcaaaatcatctcatctgtaaaccacccncacctgtaacccacctact

SEQ ID NO: 702931 - DNA, 1629 bp, Homo sapiens
  misc_feature 1610: n = A,T,C or G
cactgccacatggctgtgtgggcctgggtcctgtcctgtgcagagggaatgagccctggaatgatttcatttctgccactgagcacctctgcaagatacaaactttctgagctttggttttttcatctgtaaatggtggctggtgacacaggccccagctactttgtggagctatgtgagaatcacatgagattaggtcagtgaagccatttttaaaagcacggcatcaagacaattgtccaggagcgttattattagtagtgacgcagtgttcagaggaaagtcaaatttctttgcttttaaaggttttaagatgacctttaaacaaggagccagctgggttcttagttcacagtagtttagcacactttaattcagaggctttgaaagcagggagaaatatttggtggcatggttcccagaaatagccggggtggagaaactggagctcccatggggagtggggttagggggtcaggaagctggtccaaatctcctctgtcaccagcttctcatctccagactcaggaaatcctttccaccctggggccgttcccacactgacgtcccacttcctcctgcaagggcagtgccctcctctggcctctggatcttgagttgggggtggggaagaagatgaaggagagtctgtgtgtagcagtggccctgcctatggggaaagcaggaggaggggtgtgtatgtgtgttggggagaacactctcattttctgatcttctgttgttttaggccctgggctgagtacttcatatattttatattatatagtatatgcatgagccctacaaggaagataactttatttccatttcagaaatgagaaaactgaggctcagggctgggacagatgcaaygtgagaactcacacacagccatgaagtgctggggctggatttagaacacagttctaggtgactacacagtcatggcatcctgcttcccctgagggtctctctgtgtgttcatttgagggatctgcaagcccagctctgcatgtggtgcctgacaccccctttgctgctaaacactgaacaagaaagcaggctctccaccaacctcagcagggctttagctatttgtaaggactcaaacccacccctgcacacacccaccttcttcagccttgtgtagggctcacctcctccaggaatcattttagtattgactctacctcatctggtctcctcctcaaattgtattagccgcctgtcatgctgacatcctgtatacttgtgtcattcaactgtcctatataatcattcactaagtgctggggcacagcagtcttcaatttaacttaaccagagccctgaaaacagcaatggttaagaaattccctcctaccttccccacacttagctaagacttgctgtccactctttctcatgactcccttaagactctcagtgagatgaaatctactgaaaggccagacacagaccctccaactccctgttttttgtctcatgaatgattaactgagactaggagtttgtctccctgaaactaattaggcacagagataagcatttcctgttcagctcacagagcctccctcgatggcaaaatcatctcatctgtaaaccacccncacctgtaacccacctact

SEQ ID NO: 702932 - DNA, 625 bp, Homo sapiens
ttttttctccagtacagtttttttccttcaaattttttagaccacatgcaacttatcctagagaacttgtgaggtagcagtaggagaacagccctgtgctggcacccatgacttcatagccatctctacaggcggcataggcaagatgtgacctacagctggtctgaatcttggcagaacactttgtatctctcctggaccctaagaacataggatgcttaggaggagctgcygcaaggggcattccttacttgtttctcatctcctggttctggcgaggtaggaggtgttcttcctcaccacccttagggtacacctggaagctataaaacgttagctgcagtgtcacactagggtgtccaatcattaagtcactgtcacttggtctcttttgtttctgtgttgccctacaccagggtcacagggactagcacctttggctactttcttctgagtctgacagtacccaacgatctaaatctaaaaggattttgttgtttccttattcactgaatctatcagccttgcttggccttgtgcttgacagtagcaacctattttctagcaaattgttggtaaattttcctgacactatttactaaatagttcattctcttttccattg

SEQ ID NO: 702933 - DNA, 1126 bp, Homo sapiens
tagagcaagccccacaccgtttgagacttgtttttctcatttgcagaaaagaacaatcacacttaacctcataggatgaatgtaaggattaaatgagttaatgtctgagcatacagtctggacaacagagtttcttaaagtttgagttgatttccaatatttaaaagtgaaaagatctcacactttttgaaaaatccacattttttggcttctcttagaaaggcagaaaccagcaatcctgtgctcaccttgtcaggagctagcaatgggctgggctgggaaaactgctgtttccagacgcaggcttgatttgcagatccccactgttctcagctctcctcatgttgcctggcaatagtgttgaccactgtttattcttttccaagtrgaggggcttttactttatctgccaggccaggaaggtctttgggctgggactcctgtgcatgacactggtcaagtcagtcacacgaaggtgataaggctagaaaaggattgagatggtgctatctttctctgggagatttgcattctgtcatttaaggaagaaccttcccataatcctgtcaccctgatcatgaaaaatcctagtaattatttgagaactctttttgcaatctagtcaaaggactaaaggtgaaattgcagttgcttttacctctaaactgtttggcaattcagtcgatttctctctatctccactgtcacaaccctagttcaagccaccatcacctgcccagattctcatgagaccaagaaaaagcattcaaataactttttgtgtcttcatttcctttagatcatacttgtttttaataaactctcaaattttatacgtaataaagtcataattgctgattatttttctgttgcctctttttcatttcaggaatgcaaggggcatgaagacaaatcattgtacagaaggggtgaggggtgagggtttggctgagctacagtgatatttgtcaacaaattagtaacctgaagtcaaacattgtgggtactaacttctcagagaaaaggtttgtatgagcagcaaggagaatacgaagaggagcttggatagggatttcccaaagtttggagctgatattctctaaacaccagtcttgggaattatgaa

SEQ ID NO: 702934 - DNA, 640 bp, Homo sapiens
gtcttgtttagtgtcactggatgcttagcaacactttgataaataggaatgtsccagtacttcttcaagtggggttcatacatatgacagcatgcccctggggtgctggctgaaaattcaaataacctaagtctcaggccagacctcataaatcagagtcttcaagggtaggtttggggaccctgtattttaaaccaatcagatcctgtatcctccacacttaaaatcctcctattgcttcccattgtttttagaaaacaacaacaacccaaactgtgcatgtttccatgtcctatgaggtcctacatggtctagaccctgcctgtttatctcccatgaggctgcccctccacctctgggctcataacccaaatggcctcttgtctgtctgtcatggcaagctctcttcttccgcaggacctttgcacatgctcttacccctgccagaaatgatttcttctttccatttcacctggctaacaacaaatcatcatttagttaagtctcaactcagaagcctcctgctgggtcatatctctcattactgcttctcataatatttgtcccctattcactggcatgaataaattccagtagcaagatctcaaaactgcaattaaaaaaaaatgtatcatagcgg

SEQ ID NO: 702935 - DNA, 640 bp, Homo sapiens
gtcttgtttagtgtcactggatgcttagcaacactttgataaataggaatgtgccagtacttcttcaagtggggttcatacatatgacagcatgcccctggggtgctggctgaaaattcaaataacctaagtctcaggccagacctcataaatcagagtcttcaagggtaggtttggggaccctgtattttaaaccaatcagatcctgtatcctccacacttaaaatcctcctattgcttcccattgtttttagaaaacaacaacaacccaaactgtgcatgtttccatgtcctatgaggtcctacatggtctagaccctgcctgtttatctcccatgaggctgcccctccacctctgggctcataacccaaatggcctcttgtctgtctgtcatggcaagctctcttcttcygcaggacctttgcacatgctcttacccctgccagaaatgatttcttctttccatttcacctggctaacaacaaatcatcatttagttaagtctcaactcagaagcctcctgctgggtcatatctctcattactgcttctcataatatttgtcccctattcactggcatgaataaattccagtagcaagatctcaaaactgcaattaaaaaaaaatgtatcatagcgg

SEQ ID NO: 702936 - DNA, 581 bp, Homo sapiens
aagagttatagaactgtaccactaaaaagagaaagtgcaagttatcttcgttccaataaggaattgaaatcttagagaggcaaaatggcattacagtttcagggtctaaggcagtgtctgaaggatgacatcagaaataacaggaagctctaggtcagtgcctgactgccctagaaaagcctaggctgggtcccttgacaactgrgcctagtagctgtcagcagcatattacagtgactaaatcaagtatgacaccactcagccctggctggcaatcaggagacacattttttacgacagcagacaaaccatgttttactttgattcagttcagcggtggtgcctgctgtcaaggtcctccttatggactaggagatatttggtactatgggaaaaggttagaccaaatggctacctcttcaatcctcactgaccactgcgtgtgattacttaccgattttcctctttagccttaaagaaattccaaggcaagagtagtgacatatttgtcatagagagccaaagaaacaaaatgtctaaaagcataagctctatctatggtcacagtctttggctctacc

SEQ ID NO: 702937 - DNA, 581 bp, Homo sapiens
aagagttatagaactgtaccactaaaaagagaaagtgcaagttatcttcgttccaataaggaattgaaatcttagagaggcaaaatggcattacagtttcagggtctaaggcagtgtctgaaggatgacatcagaaataacaggaagctctaggtcagtgcctgactgccctagaaaagcctaggctgggtcccttgacaactgggcctagtarctgtcagcagcatattacagtgactaaatcaagtatgacaccactcagccctggctggcaatcaggagacacattttttacgacagcagacaaaccatgttttactttgattcagttcagcggtggtgcctgctgtcaaggtcctccttatggactaggagatatttggtactatgggaaaaggttagaccaaatggctacctcttcaatcctcactgaccactgcgtgtgattacttaccgattttcctctttagccttaaagaaattccaaggcaagagtagtgacatatttgtcatagagagccaaagaaacaaaatgtctaaaagcataagctctatctatggtcacagtctttggctctacc

SEQ ID NO: 702938 - DNA, 3093 bp, Homo sapiens
aattaaaaaataataaaataaataaaaatagagtgatttaacaacctacttaaggtattcatcaagtactaactccctccatcttaatatttctggcaactttatctggacttaatttttttttttttttttgtcggaggctggctctgtcgcccaggctggagtgcagtggcgcaatctyggctcactgcaagccccgcctcccaggttcacgccattctcctgcctcagcctcctgagtagctgggactacaggcgccttgccactatgcccggctaattttttttgtatttttagtagagatggggtttcagcgtgttagccacgatggtctcgatctcctgacctcctgatccgcccgcctcggtctcccaaatgctgggattacaagcatgagccacagcaccgggccttggacttaatttttttaatattaattagtgtaactttttcagagtctgtggtaaatgtgcattgacattttatcagtattgagtttttcagggtttcttttctctcatagctttcctatggattaccttctttcttgcttgggtatactactgaattatttagtgcttgagggtggtgaaatatctctgccattgtttgtttataactatcgctattttccccttagtcttgtgctgtggtttgtttgtgataaatgtccagatttattgtttctctgggcacccttggaagatagataatcctttgtcttctggcatctgcataactggtgagtaacctgctttcagccttttatactctaaatgttccctctgctagcttttaatttttctcttcattttctatattctgcattttcactacagtgttgctaaatttgaattattacttacctatatttcttggaaatcagaagtcgttcggttagttgttctttgttgaaagacatctttatttccaggaaaatctcagctatgtctctctcattttttttaacatggaactctaaatagatacaaactgaagtgtctcaacttaccttctatgtcttgaactgccctgtaatgtgtttacgtttgcatttctttgttgcattctgggaatgtctcatgtatctgttgcagtatttcaatttattaccttaactatgacaagtacagatatttggcttatgtagtaattttttttagttctcagaactatgtttttttagttcaaagatttctaattatttcttatgaagacatttttggttgttttatttctgccttttttagggtcacaatctcttgaggttttcttgatattattcttgaattaatctttttgatgtcttagatatgcttattttataagtctttctcaaactattccattaaattgtttcatctggaatgttgtcatgtacctgatgctgattttgtcaactacttgttttggtagtaatttttatttgcctgtgttctgaggccagtgttttcagactgctggcaattgggtggacattttttcttttgctcaattaccctctgtgtttatgcatacctctttagcagcttcctgtttcactgttcctagtctagaatcaattcttagaatgatatgctgggtttccatggaaataaaaacaataactaacagtaattgagtgcttcagagggccaggttaccttgtaagtgatttatctgtattaacacattccagtcttacatgtaactctctgagataggcaggaattttatttccattttacagataagaaacgaaaagtgcactttaatcccagcactttggaaggccaaggcagaaggattgcttaaggccaggagtttgaaaccagcctaggcaacatagtgagaccccacctgtacaaaaaaaatttaaaaatgaaatgggcatgatggcatgcatctgtagtcccagctacttggaaggctgaggcaggaggaggatcactgggccccagagttacagtgacctatgattataccactgtactccagtctgggtcacagagtgagaccctgtctgaaaagaaaagaaaagaagagaaaaaaagaagagaaaagcaaaaaagaaagagaagagaaggaaaagagaaaagaaaagaaaaaagaaaagaaaagaaggaaaagaaaagaaaagaaaagagaaaagtataagtaatctcccaaatgtcaaaagatggtaagttctggagtcaggattttaacacagactttcttttccaaaagctcatcttaatcacttcagtgtggcttgaagcttcaagaaagtagccatccaatcactgcacttggttcagcccctgtaggcagggatgagtcttgggcatccagccttctgagctcatagtaggtgttagtctctggctgcgctgcggttatgttctcagctcaggagctgggaagctctgcaaataactggcttcaatatacatggatggattccatccagctttttgtatggagtgcctttttctttcctggattccctcactacccacatccagctccctagcccagcatctttcagcttcatctgcattcagtatttggcattttgatttaacttctgctgaatggggctgtttgtaaatcttgttttttgttgtttttttcttcccccttgaagcaagagcttattgtgctatttggattgaaagtcttcacgatctctctctcctaggccttttctacaccaccagataatcaccatttggagaacttccagaatctttcattacagattttctagttatacccttgtcgtactattttatagagcagaacacagcaaaaacaaaatttttcaatgcctcaaacaatttggcatgctggcatttgtgctgcagggttttgtgctggggaaggacagtgccagggattctatgcttactgagcagaatgactttctggagttgaaccatcatgattttttttttctctatttttgaggactcttctgaggattctcctgcagtttttcccttgtccaatgggtaaaaggagacataactgaagttctctctatgcagcttgtccacagggcagggctttcctcatccttcctacacctctctgtggcattatccactaatcaactttcatttcaggtt

SEQ ID NO: 702939 - DNA, 3093 bp, Homo sapiens
aattaaaaaataataaaataaataaaaatagagtgatttaacaacctacttaaggtattcatcaagtactaactccctccatcttaatatttctggcaactttatctggacttaatttttttttttttttttgtcggaggctggctctgtcgcccaggctggagtgcagtggcgcaatcttggctcactgcaagccccgcctcccaggttcacgccattctcctgcctcagcctcctgagtagctgggactacaggcgccttgccactatgcccggctaattttttttgtatttttagtagagatggggtttcagcgtgttagccacgatggtctcgatctcctgacctcstgatccgcccgcctcggtctcccaaatgctgggattacaagcatgagccacagcaccgggccttggacttaatttttttaatattaattagtgtaactttttcagagtctgtggtaaatgtgcattgacattttatcagtattgagtttttcagggtttcttttctctcatagctttcctatggattaccttctttcttgcttgggtatactactgaattatttagtgcttgagggtggtgaaatatctctgccattgtttgtttataactatcgctattttccccttagtcttgtgctgtggtttgtttgtgataaatgtccagatttattgtttctctgggcacccttggaagatagataatcctttgtcttctggcatctgcataactggtgagtaacctgctttcagccttttatactctaaatgttccctctgctagcttttaatttttctcttcattttctatattctgcattttcactacagtgttgctaaatttgaattattacttacctatatttcttggaaatcagaagtcgttcggttagttgttctttgttgaaagacatctttatttccaggaaaatctcagctatgtctctctcattttttttaacatggaactctaaatagatacaaactgaagtgtctcaacttaccttctatgtcttgaactgccctgtaatgtgtttacgtttgcatttctttgttgcattctgggaatgtctcatgtatctgttgcagtatttcaatttattaccttaactatgacaagtacagatatttggcttatgtagtaattttttttagttctcagaactatgtttttttagttcaaagatttctaattatttcttatgaagacatttttggttgttttatttctgccttttttagggtcacaatctcttgaggttttcttgatattattcttgaattaatctttttgatgtcttagatatgcttattttataagtctttctcaaactattccattaaattgtttcatctggaatgttgtcatgtacctgatgctgattttgtcaactacttgttttggtagtaatttttatttgcctgtgttctgaggccagtgttttcagactgctggcaattgggtggacattttttcttttgctcaattaccctctgtgtttatgcatacctctttagcagcttcctgtttcactgttcctagtctagaatcaattcttagaatgatatgctgggtttccatggaaataaaaacaataactaacagtaattgagtgcttcagagggccaggttaccttgtaagtgatttatctgtattaacacattccagtcttacatgtaactctctgagataggcaggaattttatttccattttacagataagaaacgaaaagtgcactttaatcccagcactttggaaggccaaggcagaaggattgcttaaggccaggagtttgaaaccagcctaggcaacatagtgagaccccacctgtacaaaaaaaatttaaaaatgaaatgggcatgatggcatgcatctgtagtcccagctacttggaaggctgaggcaggaggaggatcactgggccccagagttacagtgacctatgattataccactgtactccagtctgggtcacagagtgagaccctgtctgaaaagaaaagaaaagaagagaaaaaaagaagagaaaagcaaaaaagaaagagaagagaaggaaaagagaaaagaaaagaaaaaagaaaagaaaagaaggaaaagaaaagaaaagaaaagagaaaagtataagtaatctcccaaatgtcaaaagatggtaagttctggagtcaggattttaacacagactttcttttccaaaagctcatcttaatcacttcagtgtggcttgaagcttcaagaaagtagccatccaatcactgcacttggttcagcccctgtaggcagggatgagtcttgggcatccagccttctgagctcatagtaggtgttagtctctggctgcgctgcggttatgttctcagctcaggagctgggaagctctgcaaataactggcttcaatatacatggatggattccatccagctttttgtatggagtgcctttttctttcctggattccctcactacccacatccagctccctagcccagcatctttcagcttcatctgcattcagtatttggcattttgatttaacttctgctgaatggggctgtttgtaaatcttgttttttgttgtttttttcttcccccttgaagcaagagcttattgtgctatttggattgaaagtcttcacgatctctctctcctaggccttttctacaccaccagataatcaccatttggagaacttccagaatctttcattacagattttctagttatacccttgtcgtactattttatagagcagaacacagcaaaaacaaaatttttcaatgcctcaaacaatttggcatgctggcatttgtgctgcagggttttgtgctggggaaggacagtgccagggattctatgcttactgagcagaatgactttctggagttgaaccatcatgattttttttttctctatttttgaggactcttctgaggattctcctgcagtttttcccttgtccaatgggtaaaaggagacataactgaagttctctctatgcagcttgtccacagggcagggctttcctcatccttcctacacctctctgtggcattatccactaatcaactttcatttcaggtt

SEQ ID NO: 702940 - DNA, 523 bp, Homo sapiens
tcggggtgtgggagggaaggagaggagagcattagtacaaatacctaatgtgtgtgaggtttaaaacctagatgatgggttgataggtgcagcaaaccaccatggcacatgtatacctacgtaacaaacctgcactttytgcacatgtatcccagaacttagagcaaaatgaaaataaaacaacaacgacgacaaaaaaaaaaacctcagaaaaatttacaacagaggaagaaaaatttttaaataaaagctattactgaaaataaagaaataaatagagtgagtgtcaaagaatcatacttagagaaccttgtaaagtgcccccctcccgctttggccctgaccccactctgggctttgcacctgccagtactcccatgcatgtggtgggaaaaataagcccagagaaaagtcttattcccaccttttgggtgaataaaacccttatgtatcattctccttgaacttcttaaagatatgataattttaagtatacatataagcatgcatgcaatgactagtg

SEQ ID NO: 702941 - DNA, 523 bp, Homo sapiens
tcggggtgtgggagggaaggagaggagagcattagtacaaatacctaatgtgtgtgaggtttaaaacctagatgatgggttgataggtgcagcaaaccaccatggcacatgtatacctacgtaacaaacctgcactttctgcacatgtatcccagaacttagagyaaaatgaaaataaaacaacaacgacgacaaaaaaaaaaacctcagaaaaatttacaacagaggaagaaaaatttttaaataaaagctattactgaaaataaagaaataaatagagtgagtgtcaaagaatcatacttagagaaccttgtaaagtgcccccctcccgctttggccctgaccccactctgggctttgcacctgccagtactcccatgcatgtggtgggaaaaataagcccagagaaaagtcttattcccaccttttgggtgaataaaacccttatgtatcattctccttgaacttcttaaagatatgataattttaagtatacatataagcatgcatgcaatgactagtg

SEQ ID NO: 702942 - DNA, 1027 bp, Homo sapiens
ggctcagttatgttttagaatcccaacttttaatttgctcagacatttatawatctctttttaaattttctatcttaaattgaacctaattttgacaactgtgcttatactcccctgtggacttcacatttattatgcagatacctatctagatgagtttgacatatattctattttttatgagatcctgagtttaaattacctgtattgagtgatatacccctataggacaagaatgtctgggatcactaaaccactgtaagtgattgagtgatggctttgcttaaatgtcagtacacccatactggctactgctattacccttagggtattgttgctttcctcttgcctgtctacatcctaacagaggtcttgtttcctttttttttttcttctttttccctcaacactttttgaaagttaatatgcaatttgttttattatgggaattggtactcagtcaccagcctgcttactcattacattttccatctctctctttgctgattttttatataccttgctatttttgcagcctccagtgaaatgcagaaataaaaagataattaagtgttcatgatcactttcctttggaatcatagaactatgcaaccttatttttcaactacagtggatgaatgacaaactgaaataaaaaccaatgatttatattaagccaggtgggtattttgtgatcctagtcatgtaggaaaacattgacaaacagtgaaaatgtgacttgactcatttttttctattatgtttgtccataacttgatagtatgatcctttccttttattatgttttatgtaagtatagaagaacaccacaaagcataagccggaatttgcatatatgacagagatgtaaagacattgggaaacctggcaactaaagtttaaatagttaaaagtgtaacatatataacattattagagacaaggcaaagctatcatagccaagatgaatcaaatatatacatatataatgtatatatgtatatataatatatataatgtatatata

SEQ ID NO: 702943 - DNA, 825 bp, Homo sapiens
cgagaatcagtgcacagacttttttgcttgtgggttctgatgtggggcaaggcagggaaaggaaagagtgaggactgacagcttgataaaagattcaggctcttttgacgttagtagtagtttagtgaaaacaaggatactctggcgggcccacttaaccacccagaaaatgatatctgctcttccgtgaatatgtgggctttctaaatcctgacagttcattaaggtctggaaccaaagaatataggttggtcactgttgtggcttcycaggaccaagaatggcccagagcctggaactgcccatttatgaggaagccaccagcagtcctggctttgaaattcatttccctaagcacagggagcaggggatagctggattagagaatgatgccctcatcaacagtgtcagatgatgcacatgaaagacccgtgcaggccctccccagttgtggatgaggccactcgttctgggtcctaaatagcactgtagaacagtggatgatggtgcttacccagggcagtttggaatatgcaattgctggctgcaaggcaagagggtcctgagaagcttgggactatctctgtgtcattagggcacaggatgtgaaaagccaaagctacctagtgcccctctcatgcaaaggtccttaggaagcttgtgggttacctgccaagatggagctcagtttagagagtactactaacttctcaagtacaggccagggctgcctactgctgcagagacatggtgggtgaacaggaaccatttaacataagtgggtccctatatattttaccaggactaagacctcttcctctgagg

SEQ ID NO: 702944 - DNA, 633 bp, Homo sapiens
tctcttcattgaagttgttgtaaagcagtcttgaagcactttggaagggtctcttgtggtttttacaagctctattttgtttattttcttctttggagaacctccagcgaacagctgactgcacagccttcgatactggctttggttattctgaagtaaatcaatattgtaaaagttatactacttggccctcatttcagcattattttaaagctaaaataaaaaggggaactgaaattaggtttaggattaaggtctcctcaccaaacactttacaagaaaataaaaactttgctcagtttcactatccaagtacctcattggtaaatgaaacaggcaaaactaaaatatgtggttccacatcacctcctggcctttgcacagctgctaagtagaaaaattcatgttatgaacaatgcaactgattataaaattaaataggatgagttcataaacataaaataaacaatccagaaattktaagtagttaatatgagaggcagaaaagatgatgataacaagagaaagaaaagaagaaattttacagacatgaaaatttttgaacaaaagtcaattaaaatagtcatatccccttttagaagtcacaatttcctgaatttttaaaaattccat

SEQ ID NO: 702945 - DNA, 642 bp, Homo sapiens
tattttcagctgtrgcaaagttctgtgttctatcttcaaagactttttttttagctttgtggaaagagaactacatataatatcttattaaccaaatctggtttaaaaaagcaaaaagcaggaagtgctataaatatgaaaatttcatattttctttatgcagtactcagaaacactcttcaggaagaccttattcacacctacataagaaatacactgaaaatctgaagagaggaagtggataccatatgtttctctaaaaaatcactacactagcaaaaacaaatgaacaaacaaaaaagcaatttatcgtggtgagtaaagagatcgaagttgaagtgccttcaccaacagcatgctcctgttttatttgatttcttgttgtttcacaaaacatagtaagaaaacataagttcaagagaatttctattgtatgtctacaaaagtcagctagccctgcaaattatgtcacatctgtttgttcctgcattctgagattacatcatgaatgagataaggtgatttcaaaacttggttattgaaacaaatcttgaagacattcaaaaaggtttaacaattagattttactaaacatgtttgactcttcctgactcatcaattagtagtcttaaaatgggatga

SEQ ID NO: 702946 - DNA, 451 bp, Homo sapiens
gttagggttcttcagggagagagaactgataggatatatatatatataatctattatatgtgtatgtgtgtatatatatatgatctattatatgtgtatgtatatatatatatatacacatatatatatatakagagagagagatgagatgagatgggatttttttaggggaattagctcccatgacaggctttctgcaacctggaaacactgaaatgctgatagcatcgcttagtccaactctgaaaacctcagaaccaggtaaacaaatggtgtaactcaatctgaggctaaaggcctgagaactcagggagttgctggtgtaagttctggagtccaaagaccagagagcttagagttctgatgtccaaaggcaggagaagaagggtgtcccagctccagaagagagagagaaagagggagagcaaatttgcctttcttctggcttttt

SEQ ID NO: 702947 - DNA, 3524 bp, Homo sapiens
tatgcatgtatacataccatatatatgagatagttttgctatctttcttaaatatacatttaaacatgtggtctctgctctcaattatctttcttagaaaatgaataaagtccaaatatccaacattagtgagaatattaaataaattacagtactttcctactgtgaaatattatacggtcattaacatgaatgaggcacatacagtaatatggaaagatgtccatcacatgtagttgagtgaaaggagccagttacaaaacaatatgatccagcaaataaatattagaaactcatgtatgcagaagcttatgggaaaatatctggaaagatatatgtcaaacagtagagaaaaggattggaaagtggggaaaattttttttaagtttctattttattttatatctgtgaattgtctaaatgtttataatgaactcatgctatttttataataatattaaatgatatgctgactatctaatcatatttgatggtgtccattatttagctagatgccctcccatgccattatttactccatttgatttttctaattttacttcccattctctctcccattacactggattttaccttttctaaacactgcctgttttgtttaatgcttccacctcaacccagagtatctgtgtttcccctaaattccatctccaaagaaaattgtgcatatattagatttccatatacattaaaatactccataaaaggagaaaagtaaatattcaagaaattatatatatatataagatttcttttttgagacaaggtctcactctcttgcccaggctggagagcactggtgggatcaaggctcaatgaaacctcaaacactggggctcaagcaatcctcctgcctcagccttcctagtagctgggactacaggtgtgtaccaccacacctggcttttttatttatttatttactgtagaaacggggtctccttatgtttcgcaggctggtcttaaaatcctgggttcaagtggtcttcctaccttgacctcccaaagtgctgggattacaggcatgagtcacagtgcttggcctgtattttgaatcaacaagctttaatatgttttaatacattacttcctgaattgtaaggtgtcaaaaaataataaagagtagttacaaagttcttgagcagataactattttccttgtaaaaagatggcttacttaaacatcaagaatactatgatagccttgaataccttttagaatgagataggacacaaaaaaagaaaaagatgcatagcaccctacaaatgtgaaaaagcacgagatatgtttcttaccattgtgagggtaaatggatgattttctaatgcagatatactgggacaatgtagagtaatatactaaaaagcaaaaaacggataagttttaaatgaccaattaagaattgcaactatttcaacgatgctatgtttgctaaattccaaaaattacataaggataaaggctatttaaaaagttgctgaccactgactcacctgaccaggtcttgctttaaaattttctttgaccatccggatttccatgacatctgagggatgacttatgaccaaaatgatggtgactggcttattgctccgcatatacctgtaaagtctttcagcacagtacaggcacaaaggtccagaaatccaaagccaagtytaagacaaatttttgaaaatatacttcaagaaatactcgtattgtagaaatctacaccctgcccaattgctcattgcatacattacagtaatagtattttaatttgtattttaaataagaaaatataataaatgagtaaaaaacaatagatgctcactatcattcaaacaaacaaaagtataaaataaaacacaaagtaatatcaagaccctgccctcattctcatgctctgggtgtaactatccatgaacaaacaagtgtatattctttcatacacctttctatgcctacagatatgtaatgtatatacacaacatatttaataaaagaatacagggaagttaacaatctccgataaatatggggataattttagaaataaagtaacagtctaatgtttattaataagaaaaccctagatttttaatgtacataatgtatatgcataatatacatacatatgtgtatatatgttagatatgtatagcacatatggtttagaatgcattatgctaggcatgttgtttaccacttacttttatataatataataagaacataaaataatatttataatttggaaacctgacaattttgaatatgtgttgcatggttagccctgatcccaggacacatgcaaactttgggacgtgcagaagcctatgtggcttactgttctcttaaaattacacactttatctttcacatccctttgaggcctccaactaaaacttgtcttaatggtcactttttaaagcctcactctagttgtttcaaatcttctttctttcatgcagacagatcatgcctcttctgcatataataacatttagccccacactgtgttatgagtagcattgcaagacaaggtctgcaatgtagcagccttgcacctttgagataatcacttactctttgagtgtcaggtcccacatgagcaaaacgggagtcaccatacctgccctgtctaatatttgtgaatattatgtgaaactcagaaaagttctgaaaattatagagactagtagggatctagaggattattattaataataataaacacatcactaatacactattccaaagtcatctacaaattcattctagcttttgacttctctttcttctcttccaatagagacatttgacatcactatttcctacttccactttttatagatgaggaataaacagtgtaatttgcatgggggtagttctcacaggcacagaggaagataagggcccttattgaactaattgctgaatacttatggacgtttaccaggagcaagcatattagtcaaagacctgtgtttacatgcttcctctgccacttactggtttggagactttgattaaggtaagtacaatttctttatcagaaaatcgagggtgatattaattacctcaaatagtcattgcgaatattgcaagaaacattctgtatgtctcataagtgttctgtattaggcatacgggacattttagcacaatgcttggcagataatattaagcattcaatcaactgattttgctatttactatttacaatattatacataatattataatacaataaaataataatttgtgatattggtggtagtttttttactactatttttattattaaatcagcttttctcaaatgatgggaaaaatatttgtcatctcttggctgcaagcaccagtgctgttgtatgcaaagctcatatggtcagttaagtagaaatgttatatatcctctaataccatagatcttttgcattcaactgtcaagtacctgtaatggaataataggtactaacttactgttgaaacatcctgaaatatcctattatgc

SEQ ID NO: 702948 - DNA, 1277 bp, Homo sapiens
tgctgaagggtggctttgcccctgaggggttttgaaaggtgacccagaattacaacctctagctgctgatgctgcccaatgaagtcaaaccagcgggaggaaatgagtggctgcagctctgtctattatcagtacgtttctagaagatgtcagcactgtagtcccccttagaaaggggaagaggaaatgagaaaactggtcttgcccagaagcaatctgcatttctttctcttccttatcctttgtcccctaataatactgacctataagcctatttcttagagcccaaatttctcaagaaggcttgtcctctcccctcatctgtgaactttcaatggcccaaataggcccaggctttgggatgggcactaagagattgctgggggaccagttcctcctaagggcttagaaattagagcccctcacagcctcacagtccagactgagatggaccatctgagcgtgtcctttactttgtccactttgaggacctggtgcgtactagtgccttacgagctgctggccttagaaagatcccccagtgtttcttgatggtcaccttgaggacatggggatggcattgctatcagaggaggctaggaggcatcctggtggaaaagctggacaccccagccgttccctctttagatgaaagagatactgcaagactcattcttgggcagtgtaggcaggagagaacgaatacatagtgagaggatagaggattcatgcaataacatcccaaggaggtggatccaaagccagccggggggtcaagagccacagtgtccattgcagtggcctctaaccacgtgttgctcttgagcccctgaaatagggctgcaagatgcactaccaaagtgaacacactgggtttcagagacttggaatccaacaaaagtaaaatatttcayggataactttaatgttgatgacattttttaatattttggatatattgtgttaaactaaatatagaattaaaattaatttggccaggcatggtggcttaagcctgtaatcccagcactttgggaggccaaggtgggtggatctcttgagctcaggagttcgagaccagcctggccaacatggtgaaaccatggctaatacaaaaattagccgggcgtggtgacacacacctgtaatcccagctacttgggaggctgaggcatgagaatcacttgaacccaggaggcggaggttgcagtgagccaagatcacatcattgcactccattctgggcaacagagtgagactctatttcaaaaataaat

SEQ ID NO: 702949 - DNA, 780 bp, Homo sapiens
ataaaataaacctaagtggcaaatgcatatataaaaagtggctcaaaaggctgggctcacacctgtaatctcagcattttgggaggctgaggtgggagaactgcttgagtctgagagttcaagatcaggttgagcaacatagtgagaccctgtctctatttttttttttttaaaacaagttgctcatctttgttagtaataagggaaatgcacattaaaataatagtgctggccgggtgtggtggctcatgcctgtaatcccagcactttgggaggccaaggtgggtggatcacgaggtcaggaattcgagaccagcctggccaatatggtgaaaccccgtctctactaaaaatacaaaaattagctgggcgtggtggtgcacgcctgtagtcccagatgctcaggagactgaggcaggagaatcacttgaacccgggaggcggaggttgcagtgagccragattgcgccaccgcactccagtctgggtgacagagcaagactccacctcaaaataataataataataataatattattattattattattataatggtgctacaccttttcatgtctgtcagtgagaataacattttaaatctctttatggattgtgtgaatcaagattttaattttgtatttcctgcgtggaaagccaaatttttcaacatcatttattgaagtccacttttccccactgatctgtaatagctccacaactgaatgtttatgtccacctcgctcaccaattcatagttgaagcctgacctacaatgtg

SEQ ID NO: 702950 - DNA, 780 bp, Homo sapiens
ataaaataaacctaagtggcaaatgcatatataaaaagtggctcaaaaggctgggctcacacctgtaatctcagcattttgggaggctgaggtgggagaactgcttgagtctgagagttcaagatcaggttgagcaacatagtgagaccctgtctctatttttttttttttaaaacaagttgctcatctttgttagtaataagggaaatgcacattaaaataatagtgctggccgggtgtggtggctcatgcctgtaatcccagcactttgggaggccaaggtgggtggatcacgaggtcaggaattcgagaccagcctggccaatatggtgaaaccccgtctctactaaaaatacaaaaattagctgggcgtggtggtgcacgcctgtagtcccagatgctcaggagactgaggcaggagaatcacttgaacccgggaggcggaggttgcagtgagccgmgattgcgccaccgcactccagtctgggtgacagagcaagactccacctcaaaataataataataataataatattattattattattattataatggtgctacaccttttcatgtctgtcagtgagaataacattttaaatctctttatggattgtgtgaatcaagattttaattttgtatttcctgcgtggaaagccaaatttttcaacatcatttattgaagtccacttttccccactgatctgtaatagctccacaactgaatgtttatgtccacctcgctcaccaattcatagttgaagcctgacctacaatgtg

SEQ ID NO: 702951 - DNA, 632 bp, Homo sapiens
agcttaattttacatgtccatattgataataaattataagttgccataatttgcaactatttaaactcaataaacaattttaggctgagtgtggtggctcacgcctgtgattccaacgctttggcaggctgaggtgggaggacctctggagtccaggagttcgagactagcatgggcaacatagtgagaccctatccctacaaaacaatttaaaaatttgctggatgtggtgcaaacctgtagtcccagctactttgaaggcagaggcaggagaattgcttgaggccaggagtttgatgttacagtgagttatgatcttgtcccccgcaaaaaacaaaaaaaaagtttagacctctactcaataatattcaattagaaaaaaacataagtttctcaaatcttttaggtcatagaagaaaaaattttgaggacatctgcattagaagatatgagagtgattcagaccagaggtaatgatgtgtagagcgatggtggtagaaawaaaaaaaaaaaaaaaaaagaaatgggtttcacatacagtttggaaatataaccaaattctatttgtggtgtgaatggaagaacagaatagaatattctttaattattgtgatgtcccatgttagaagctt

SEQ ID NO: 702952 - DNA, 632 bp, Homo sapiens
agcttaattttacatgtccatattgataataaattataagttgccataatttgcaactatttaaactcaataaacaattttaggctgagtgtggtggctcacgcctgtgattccaacgctttggcaggctgaggtgggaggacctctggagtccaggagttcgagactagcatgggcaacatagtgagaccctatccctacaaaacaatttaaaaatttgctggatgtggtgcaaacctgtagtcccagctactttgaaggcagaggcaggagaattgcttgaggccaggagtttgatgttacagtgagttatgatcttgtcccccgcaaaaaacaaaaaaaaagtttagacctctactcaataatattcaattagaaaaaaacataagtttctcaaatcttttaggtcatagaagaaaaaattttgaggacatctgcattagaagatatgagagtgattcagaccagaggtaatgatgtgtagagcgatggtggtagaaaaaaaaaaaaaaaaaaaaaagaaatgggtttcacatacagtttggaaatataaccaaattctatttgtggtgtgaatggaagaacagartagaatattctttaattattgtgatgtcccatgttagaagctt

SEQ ID NO: 702953 - DNA, 589 bp, Homo sapiens
ggtacatttcttagcatagagtctagccctgctcaataaatggttatcatggttgtaacatcttttaccatcactgtcactgtgggatgcacatgcagtcttaggcagagacagaagaactgagttcagctctgattattagctgtgcaagactaagccagagtaagcaagctgggttcattcaggatatctgcttcctgtctgtaaaatggggtcatagtagctgcttcctgtctaccccactgttgtgaaagtcctttgcaaatccatagcacaggtcaatcccattcaataaacatttactgagtgccactgtgtgcaggcattgtgttgggcattaggagaataacgagtaagaaaaaaagacctcctctgtgtccagtaggggaagagaattaaacgggatgctctgtcatacagtgtgatgagccctgatgyaagataagtatgtaatgacaatgtaaataatgatacatgataaatggttaaaatcacacctactatttactaagggattccaatgtaccactgcctctgttaaacaagggaatttgtctagtactacagtgaagagcacagactctccctg

SEQ ID NO: 702954 - DNA, 625 bp, Homo sapiens
agtggcacgatcttggctcactgcaagtccgcctcccgggttcacgccattctctcgcctcagcctccagagtagctgggactacaggcacccgccaccacgcccggctaatagtttgtatttttagtagagacagagtttcaccrtgttagccaggattgtctcaatcttctgaccccgtaatccacccaccttggcctcccaaagtgctgggattacaggcgtgagccactgcgcctggctactagtatcttaataataatagttataaccaatgtctctacaggaaccatggtttttaaagcagctttaccttccagatcccattttctataagattatttgggttgaaaatgacagagagtcaattcataaccaattcattaagcaaacatggaatgccttgggtggtgtgtctgttcaggtcctccaggaagcagaagccaaaatacaattagacagtcaagagacttattggaggagttgcctgtgaagaataaaggaagcaggaggaggctgggagagcattttgactatgacccaggtctgacacctgggaaaggagacagggacaaaaggaggattggaaagaagaagcctcagactatagcgcagattaaaaaaa

SEQ ID NO: 702955 - DNA, 1551 bp, Homo sapiens
tcttataggttttaatatccaaaagctgttgcaactatccttctcaactttggaaaggtcactcgtatataatgaatgataagggccactgaaggtcacagtatattaaaagcgagctaaattttaagggtttgctggaaataaaattttctgcagggaatttattgagcccaagcaaggttacagagttatttgtggtgttttaatgctacctttattaataataaccwttccacgatgcatcatttgaaaaggcacgtactttaatccagaaatgggtgtccattattattaccgggaacattaaataatgaagtttcaggggcagaacaggagaaatcacaatttggaaggtttctggtatccagtctttatgagagattcttgaagtaaaaataaacatcccagattatagataatgcagaagcactgataattggaaagaaatctgactagaatactatttgaagggcatgtgtaatagacaaaggtctgaactcaaatcctatcgctcagccaagctgaactgcctgaccctggccaaggatccttcctgagccagcttcaacaaatgtacaatgaggatcataatacctaccccatggagctgttatatagattaaatcaaatcagatatggcaattttaccgtaaaatgctgcgcacatattaaacataacacaaatggctgtatttattttaaattaaaaccattttagatcctggcctttgttcccatgaggcatttccttctctctttttaataactgagtatttccttgataacgtagcaaaatgtgcctccaacatgcagacatgtcactgcctgagttccaatcctagagtccaagctttacggtctgtgaaaccgtaagaaaatcactttatctctctaaacacttatttttttcatgcataaaataggcacagccatggtataccctccatgctgctctgattggtgtggaattagtcaatgagtgaaaaacctttaaaacaagtctgaacgtagtaagtagtcaatacaggaagagtggctatggcactgtcatggtagctaaatcagcatcccctgctccgtatcagggtgatttcattcactctgaaccattccatttggggatgaaataatctggtctgtgagcaagtcatccctcaccccctgcttccttttcttctctgtattgttgtccattccctgctggctctgcccttgctgcagatggaagacagccaggcattgcatgctcatcacccaaaatcctggagttttctaaagctttggtcacatagcatctggcctctttcctcgggaacacaattcaaagggatgagcttttcagagaaatctcatctttcatcctctaccaagaacaaccacagggaaaggatctctctaaaagccaaatcaccttcctcatgcacggcatcctgcccaggaatcagacttggggaatggggagatggtcagcctaattctgagtatttgtgtggggttggctaacctcatgggctggcaggaggaaacacacgcacatacacacacactgac

SEQ ID NO: 702956 - DNA, 2151 bp, Homo sapiens
tgcatattcacatactttggaggggggagtataggtgtgttcctcaagtacgtatatattattttgtgcacgtattaagggtttatccactttgcttctccatgtacagacttctattggattcagtaaggaatcagaatgattaatttcacaaataaaaaagaaactattttttataagctaagatatgctgtaaagttattcttacagagctatatttagttgaaatcagatctagcagagatggagatattttgctacacatattctacttccaaatactttttaattactttctcctataaaccattcttgggatttctcaactctcaatgtagataaggtatttatatcatactaaggatcacacaaattaaaatatgaatattatttcaaacctcttattttcaataataaaaattggattgtctaagcattccagtttaatttactttgcttcagttataattcacatacataagaggataacaataattttttaaattataattttattatcaaaatagatgcagtgcagaaaagagttaacacagtaggcctgagactgctatccttagaaagccctgcttgtaaggttggcccttagctggcatctagaaatttagatttggggagaattcccatcattccctaactggtaagagtggcttattatgtataaattgtttgtgtaaacagtatggtttatgctaaacataaattccattcaaacaggaatttggaattttggtgtgtgctaggtaggatgtgcctgtgtaaccagctccagtagaaaccttgggtactaagtctctaatgagcctcctggtagacaacatggtacatgcatggtaataattcactgctggggtacttcactgggaggggccccttggaatcttgtccctagtttcctccagactttgctccatctgccttttccttttgctgattctgctttgcatacttttgctataataaatcatacctgtgagtacaactatatattaatttctatgagtccctgtagaaaaccaaggaaccctggtgtagtcttgggacccccaacacagatgctataaaatgtctttaatcaaaatatcttctattatttttcattttatattgtcattattttcattaggtgcatcatttaggaatagagagaaataggctaaataattaagataaacaaataattatataaatgctgctatcagtaataatcttattaggcaggagatgaaaaaggccaacaatcacctaattatgaagtccagaacaatttgagttttctcctagattacagcccattttataaatgtaaattttagattatttgtaacagattataatatcctaaccaggttactgataatttttagcaatttcactttcttataatagaaattgatttccctttagatgatgataatcaagcctaatcattttaatttcaaaatgggatatatttgttttaggatatctttttagtcttaaaaagcataaatacattggcatggattcactccacagcatgttttaaaatcaaaatctacttaagtgaaaattctgaactcttcaaatttgtctcaagtatttctcaataatatttccaatggtagggaacttacatttttttgcagtgtgggcattttgccagagtgttgaacctcagttccatccactgtaaaataaayaaagagaggaattgaaaagaaaacaactgaaaactatccaatctgataagacatttcttttactttaaatgtcatcagggatcacaacagaagcaatcaccttctcacggttacatgagtttttccctccaatacttctctccctctcttaaaatacaatatgagatcctcctctgaaatagttcccatgacttttccaatgctctgacgcaatctaggtttgctttacatgaatactgaatgtaataccataattggggtcatcttgttcagtaagtctcagttcacttccaacgaatacaatcatatttcatataccatcaaagttatttttcttttaagtcttgagggctggccttttaaatacttgaatatttagattcattactaaaattaaactatttattctacttatgtgagaaagtcaccaagtacataaactaaaaagtcg

SEQ ID NO: 702957 - DNA, 1943 bp, Homo sapiens
tgtatgtttctcttcatctatcattttgtcagtgtgagcagtttacttacaagcagtattgggtttcaaggaatcctaactttgtaatgttttgaagttggaaattgagatgaaattttatctggttatcatatgggaattatacacaaggtaaattcaaatatggtcttttcatttcattatttcactttatatgatcttatttctcaacggcagcggtagcatcagtactttccaaagaagactagaatttatattggagtttaagtatagtactcagcttctaaaaacagtgcatagtatatttcatatgctgtgatctatggttagtatggcagtataccatgtctgtagcgtgaggaaagcacagtactccctaatttatttagtattctaagaaaaatggtaaattgaagaaatggatattattagcatataccaatttattctgcatggccttataaataaatgttacttttcacattaatttttaaatctatacackcagtgtccacatgtaataaatggacagtcagatatctttcttttatgtaacaaataggcaagttttgatataaaggtgtgaactttgtagtcaaatcctaatatctagcacttagtagctatgtggacttgggcatgtctcttatttttctgagcctcaggtttcttatctgtgaagtgggactaataataattttcttccaccgttcatatatggctcaaaattaaatgaaattatatttagtatgtagtaggaccttaaaaaggcatcttaattaaaaaataagattaataagattttggccaaagtggtcaatgtatctgcttattatcccattgtattttagacaattctaggtttactggtaatatcaggactgataaggcctgaagattcatacttaggtaaattttttaaaaagaaaaggaacctaagatatagttagtattgccaggtgtagaatagcaactgtaaataactaactgatttaccaatattctattcatacaacttggtctttaaagatgatttgttaagtgcgtgtgatcttgaaaaaaactattcagcaaccatttctcagtatgtattaatagaaagtttttttggagacattggatcaaaatatcctttaaaaaacatttataccacaaaactatacatttacatttttaaatttacattttacaaccttatgataggcccactacttgctacccaatgttgtaggcagaattctgtttattttgtaactgtgctttgaatcgttgatatgatacatggctactctaggtagcaccagtagcttcaagggaaactttttgatctctacattccatggatgaagcaggcattagagtttaagactgaatttgttttgtataatgactttgtagtgcagttaagtctttattatttttaactaaactgagaattaggttttggtttatggagttctgccttaattataatctcgtgactcagttttacaataataattactttttataaatacttaacctttttcattaataacatgatggtggaatgtactatgcattgtaatcccaaacttgtcccctataatgtcagtgtttccctgcaggcatcgtttactttaaaaaaaaatattaaacagattactgaatgacaccatcttttctaatttccttaactgatgtggatttatatacagggagccattgctgtatctttcctactgtaaattgaagggtaggtggcaccaaaagagctttgattttttgtttatttacttgtgttgcaaagtcatataatggagttctgtaatccccaactcttgaaaatccctagtttgaatactgtggatttgccttgctcagcgattggaaaagacttaacaacctacaactaaatttcagctgagcaatgaaaaacaacgaagtgtgtgccaaagtactct

SEQ ID NO: 702958 - DNA, 1729 bp, Homo sapiens
tatgagaaactaaaaaaaagtaatgaaaaaacaatttaaactaatcagtctctttatttagttagcattctgtttccaaactcttcccataatactttcagaaaacacattcatcttgttctcagagataattcttggtaatcaacaattacagaaagagaaaaaatcaaatacactacaggaaaatatagaattgtgcaggaccgggctcttatttgaagtgagcctggtacacagtaatttctcatctgatatagaggattgaaagataagtgaaaataaaagttttaaattaatttataccaagaataaaaatctattctttggtagaaactcagcttgtgtaaactctttaataatatacttaagaattcaacaacgcttctgtatgtaattcacagttacaaatgtctacagctctgattctgacctttcaaaaccccattaagctatgtaaatacagtacaaagaaatgtctactgtgaataaacagtattctaatgtcaactaaacaaggacacattgcctcactcttgtctccagtgcttacaagggcaatgctgatgtcataacacatccttactgttgatttatatgacagatctaccatgagactcatgtcatggccttcctgttcaatgtgtggttggagagtaaaccctacttatattattctcatatttgacaaatatcacaaacatggttagtggtccaatgaacataataataatgaaaatttttgaaaagggaaagaaaagtaaaggtccaggacctcacattaaaaaatcataaaatgttggtaggacagcygttgattagcttgttatagatgtattaatatttttaattacacaattaatattcactatggaaaatataaatcaccacaatcccgccaaccactggacatttttctcaacatttcaacacttaccttgcaaagtatcatctgtgtatgtagtgtgtgtatgcatatatgctcacaatcatataaacacatataaaaaagaaaagaaatcaaataccaaatatagttaaaatacatttttcaattaacaatatatttggatcatacttttacgtcaagtaatatacttctaaaataccattttgatgaataattaatattctattttgtccttaacccaaaggacaaaattttttgcccttgctttaaggctgcccgtgttgaataatgaattcaaaataaacaacagtagaatttctaaagacttggcaagaaaagtaatgaagatatcacttattcaactgtattagttttctatctttgtgtatcttagttcatttcagccagcataacaaaaatatcgtagactgagtggcttcaacaacaaacatttatttgtcacagttctagagtctgggaagtttaagatcaagttgctggcacatttgatgtctagtgaggatttacttcctggttcatatatagatatcttctcactgtgtcctcatattgaggaataggtaggcaagatgtctggggtctcttccaaaacggtaatctcactcatgaagactccaccttcaagaattaattacctcacagaggccccacctcctaataccatcgcattgggagttaagatctcaacatacaggtttcaggaggacacgaacactcagaccacagcattccatgcccggcttcccaaaagttatgtccttcacacatgaaaaatgcattcatttcattccaacaacccca

SEQ ID NO: 702959 - DNA, 1729 bp, Homo sapiens
tatgagaaactaaaaaaaagtaatgaaaaaacaatttaaactaatcagtctctttatttagttagcattctgtttccaaactcttcccataatactttcagaaaacacattcatcttgttctcagagataattcttggtaatcaacaattacagaaagagaaaaaatcaaatacactacaggaaaatatagaattgtgcaggaccgggctcttatttgaagtgagcctggtacacagtaatttctcatctgatatagaggattgaaagataagtgaaaataaaagttttaaattaatttataccaagaataaaaatctattctttggtagaaactcagcttgtgtaaactctttaataatatacttaagaattcaacaacgcttctgtatgtaattcacagttacaaatgtctacagctctgattctgacctttcaaaaccccattaagctatgtaaatacagtacaaagaaatgtctactgtgaataaacagtattctaatgtcaactaaacaaggacacattgcctcactcttgtctccagtgcttacaagggcaatgctgatgtcataacacatccttactgttgatttatatgacagatctaccatgagactcatgtcatggccttcctgttcaatgtgtggttggagagtaaaccctacttatattattctcatatttgacaaatatcacaaacatggttagtggtccaatgaacataataataatgaaaatttttgaaaagggaaagaaaagtaaaggtccaggacctcacattaaaaaatcataaaatgttggtaggacagccgttgattagcttgttatagatgtattaatatttttaattacacaattaatattcactatggaaaatataaatcaccacaatcccgccaaccactggacatttttctcaacatttcaacacttaccttgcaaagtatcatctgtgtatgtagtgtgtgtatgcatatatgctcacaatcatataaacacatataaaaaagaaaagaaatcaaataccaaatatagttaaaatacatttttcaattaacaatatatttggatcatacttttacgtcaagtaatatacttctaaaataccattttgatgaataattaatattctattttgtccttaacccaaaggacaaaattttttgcccttgctttaaggctgcccgtgttgaataatgaattcaaaataaacaacagtagaatttctaaagacttggcaagaaaagtaatgaagatatcacttattcaactgtattagttttctatctttgtgtatcttagttcatttcagccagcataacaaaaatatcgtagactgagtggcttcaacaacaaacatttatttgtcacagttctagagtctsggaagtttaagatcaagttgctggcacatttgatgtctagtgaggatttacttcctggttcatatatagatatcttctcactgtgtcctcatattgaggaataggtaggcaagatgtctggggtctcttccaaaacggtaatctcactcatgaagactccaccttcaagaattaattacctcacagaggccccacctcctaataccatcgcattgggagttaagatctcaacatacaggtttcaggaggacacgaacactcagaccacagcattccatgcccggcttcccaaaagttatgtccttcacacatgaaaaatgcattcatttcattccaacaacccca

SEQ ID NO: 702960 - DNA, 2696 bp, Homo sapiens
tggttctgtgggcgtcgtgatctgtatttcagagagcagtgggctttgcctttcttctctcctttacatttctcttttctttgtgatgaaaacaaggaaagaaatccacaaaccttaatcagaaagtttttatttcatttaaaatggccagtataggtagatttgttttcccagttttgctttgaagctggcacttgcggatatggtttgttttctcaatttgtaagcaaatcatcctatgtcatcataaaacgtgaatgagtgaccgagtccacagccctttgattgaggacacactctttatctctaaaggaaatttcctaagctatttagtccttgagattgctagctgtcctttaggatattaaatgtcagggagtttatgacacttttattactttgttagaatggcattatataatctcagccacgtgtattctctctacctctttgacctccttattctcctgagctccaaatctgataataaaaggaacacttagattaaaaataaataaatttaactagtctttatgctctctatttgttattaatctcccacttcctacctccagcggatggctttttattcctgtaatttacctttgagagtcaggttctgcagagaataagtgggaatttaaaatggtttatgtctgattgtacagtattgtcagaacttgctggggtaagttgagagctgaatatactaatctatctcaggccccaattctctccccagatatgggagctgacattcactcaaattgttgatctagagggtaaaaatatttgaatcaaattagggtcagagagaggagacccacccttttactgaaaacacagcagtagctgatcatcaatgaacaatagttacactcacattcttccaggctctaatccatttttctctgctccattgagcatgcagaaataaagagctcttggccaatgcagggacgactttagcatttggtggtgtttatttatgatcatctggagtctatttatgatcatctggagtcattggcttcaggctaagtagatttttcctggtccagtcatgtagttgaaggggatatgcacattagagaggcaaggaaaactattgcaaggagtggagggggaatgcgagagacttatttggttctaaagcagatgcagtttggaatatagtacctactaaaaataggatccactttgcatgacaagggaagagctgaggaataaacatgaggtcaagataagagtgagcaagtctcatttgtttagtcccaaagaatctcctgatttgggcaccagctggactgaataacaggtctcaaaccacaaggcaatctgcattctcccaactaactaataggaaggccggcctaaagagcaatatcctagatgaagctaatttgtatttcatcatccccttcacacttgcttggtgtctttaagaatcaagaatatcttagtgttcttggcaattggcacaactgtatttaacagaggagcaaagactgctgcagtctggacactggagctatctttgaatagccagaaaccaagcaggggaattaagctcggctaaatgccatgtccttactattagtcttgggccaacaggccargcctattcgttacccttagtactgagttggaaatgtatctgcaaatgccagtgagaatctcaatctctctctctctctctgtctctctctctctctctctctctctctcacacacacacacacacacacacacacacactcacatcctggaaaagctgtttgagccagggctgtcatttaaacagtttgctatgtccagctgtataggtaccttttttgtctcagttggcttgtacgcaaccctggcatgtgattaaagggagaataggattaatgtccttcttgacaagaccatcagtggcgtaagaccaggagataatttatttttaagagcactatcaatctgagcatgatttgtggctggctttccaactgggccacaaccctcagaagaagctccccactccagcctggcaacaaatacattcctcaccttgatgagtctaaacctcagacagcagccagaagctgaagaatcccattgcctcctctgaaagtgggagactttatgcacagaaacatacaagagcaggaccaaaggcagggaccacactgtgtccaccacaccatctccagcacctagcatccagcctggcatgtggtgagtactcaccaacagttggtagctaaatgattctaataaatgattggatgaatgcatgtaaattctttaagttttagcctcaactttatttgcaagcttattggtaaagctcaatccaaatatttatatatgacttataatatgcagaatttccttagcaggggtaaggttctttgtgtgttaccagtaagagagataaaaggcttagtataaaatcatttatcagcttacaggctgcatggcacatcttataatactcaggctgtattagccaccgtatgatatgtgcttttaactctcagatttgagaatttgcttatctgaaatgtaagaattaatacttcatacgtaacctaacatctttttttgtttccttgtagacttttgtgaatgatgtaaggattccggaacagacttatatcaccttgaaacttgaagataagctgagatttggatatgatatccttaaatgg

SEQ ID NO: 702961 - DNA, 1487 bp, Homo sapiens
tcagaggaatagaggtgaaatgtttatcagttaactcaatagattcaactgtgttcttgaatgcagtgataggtgcaaacaaatgagatcctatgttcatagataataatcttgagtggtgagaatgtgtgtcttattatcttttgtgtttttccttactgtaaaattttcttttaaaaatttcttgytttctcaagcattctgtagtcaaagatcccttccagctcccctagttttcttccatgtcatgtggtaactttcttctcatttagcctccaacccttctttccttgacactcctttgcaaatcctcttcctccttctactgcctctcatctgtgagcagttccccaatccagccctcagacagtctttctgatgggaaatcccaggaaaagggggccacccataaaagccaggtacttgagtaggtaaacaacgttggaaggtgagagtcctgccagcagcttagttatttgcttacagcaggttccctaacaaatctgtgctcacctgaaaaggtgctcttatcaaagcaggggaaaatacttgacacagatgggaatgtccattatcaaaacttattaaagcctgcagcatttagaaggtaagcattacaatcagtaaaaatcagaaagtatgcaatggtagatttcaataggacaatccttgcttattaacaaagtgatctctttgagtgcaccctgagttttggaagcaaatgactccagaaactccagacacctcagcactaccagggaatgtgagccattccccccacccaactgggcagaagtaaaatctgggaagggtgttctctgacagcaagagatgtacagcctattagcatatccttatttaaggggaatctattactacctcacaaataaattgtacagggcaattaaatatctcaaaattgaaaatgttcaataatgataatttcccaaaagcattttataaacactgctgagggaaattaccgttttcttttctccaaactgtccaagcaaaaatttcactgaactaagttaaacagacaaggaagactaccagaatccattctgaattcaactctgccaaataaaaaggggcactggagagtttttaagagctatggggagaggaaaggcattgtaggatatctgtgtttgctaactggccttacctaaaagagatgtaaactttctcttatcttcaagataaaattcccaaggaagctaggctcctaccctcacatcaatactgggcaatacctgatatcccagccatagccacttgcaccatcttccttaattacactttaaagggatagcttacaggttcttcagaaagacattcctgacttgcaaaactggcaagaggctgggacatttataaacctttcagaggggcagagaaagaatttgcaatgacaagttttctacagtaaacactctaagcaaacgaagatcagaggcctagagttgggaagaagattatccaat

SEQ ID NO: 702962 - DNA, 1464 bp, Homo sapiens
aacatttgcataaagcataatagacttaaaaaaattatgataaagatgttatcacaggacttgtttgtttctttatacttactattcactattcttacttcstgaagatggatggttataccttcagcaatgtacttaaatccttctaacatcttatgtgaagttatagttcttatctagaactaactgaaaaagaaagcaaagcttcttgaaaataaactccttttttgtgtgctaaaatattattttaatgcttcaaaagaaatgaaagcttttatgagaagaatgttgacctctgtccagaccaaacaagatgaagaagtcttattttaacatttgagaaatatcagttgggcatcagataacattcctgaaagggactgaaaacaatgcagtatactacaaaagaagctgcatatccttaggaagaaaagaaactatttgtcatagatggcttgtccacatgcgcaaagcagagagcaacctaagatggtgccgtccagttccaggtgcactgtgattactatctgaatgccattactatttaaattgcattttttttttgagacagggtctccttctgtcacccaggctggagtgcagtgaggtggtcttggctcactgcagcctcaacctcctgggctcaagcaatcctcccacctgagccttccaagtgcctgggactacagccacgcgccgctacacccagctattttttttgtatttttggtagagacagggttttgccattttggccaagctggtctcaaattcctgacctcaagtgatccccccgtcttggcctcccaaagtactgggattataggtaggagccaccatacccagccttaaatttcatcttttaaaagagaaagagagcttagaatcttaatcagttacctgaggccctttatcctgcaatattctgaattgggatgttcctattttacatattaaaaaatgtaaaactgatttatatggtagataaccctacagttcagggctagaactttagattaaatgcattcataccctggcagatgtggtagcttgcctccaagatggcacccaatgaatgatccctgtaccaggattggtctatgtgaccaaaagcatacagcattagtgatgatacttatatcacttgggtaattacattataaaagatgtccatcatgggtgttcttttccctttctcttgctcagagacaagcaagctgtcatgttataagcagccctttgaggggtccatgtgatgtcaaggaatgaagtctctagccaacatttaatgaggaactgaggcccaccaacaaccttgagtgagcttggaagtagctccttcagcatcagttgggtgtcgagatgactactgacagcttgactgcaacttcatgagagtcttctggaccagaaccactcagttaagtggctcccagattcctgatcctcagaaactctgagaaa

SEQ ID NO: 702963 - DNA, 600 bp, Homo sapiens
atgcagaagtggtgaacgctgcttggtctaccatcctcttgctgtaagtttcgataactgcaagaagacaccacttgaaaaaccaattatcaggatatcctgaacttaacatgggaccctagtggctctragcattgcaagggggctctagtcggccctggcagcacctcactcatcctttgcattctcatgcttcctactataaggacatgtgcttctcagcctgtgtgctttcttgggctgtaggagtaggtgtattagtttgctagggctgcacagactgagtggcttgaacaggatttttctcacggttttggaggctgaaagtccaagatcaaggtgttagcagagttggtttcttccaaggcctctctcttcagcttgcaggtggataccttgtctctgtgtcctcccatggccttttctctatgcatgtgcatccctagggtctttttctcttcttctgaggacatgagtcatattggactagggtcccacctatatgacctcatttaatcttacctctttagaggctctgtctccacatacaatcacagtaagggttaaggtttcaacacatgaatttggagagggtaggga

SEQ ID NO: 702964 - DNA, 649 bp, Homo sapiens
tggcttttaaataaatatttgtatgattcagaacaggtcacttttttgactcagaaactaatcatctgagaatggtttttgaaaatcatggatttatatagtcagaaagttctttaaagattaccaaaggcatatcttcaattttagagaggagtaaagtgaagcccaaagcgatgaagtgactttgaatcattgatttgyagcattcctttaaccagaccatgtacctccatattgcacaactcctgcagggtacagcctctgagctcctgcaaagctgccctgtgggacttcaggttcctgcttctgagaccagggcacttctacaataggtggttttcaagagccaccttattaagttaaagcacccaactgagtcatcatcctcacaaaaatccataatgtaatatttgctttacgctttgtgagatcagcacttagatatatacatgctgatgattctcagtatgtatacaaaggcagttttctgaaaactactaaatttctgagccgtaaaataaacaagcagagtaagtgtcagtggccattaattatctgaagtcctgtgaaacttcgacatgttttaaatctctgcttttagaaatttctgagttttaaatttcatgcttcagccatgccggtgatgaga

SEQ ID NO: 702965 - DNA, 649 bp, Homo sapiens
tggcttttaaataaatatttgtatgattcagaacaggtcacttttttgactcagaaactaatcatctgagaatggtttttgaaaatcatggatttatatagtcagaaagttctttaaagattaccaaaggcatatcttcaattttagagaggagtaaagtgaagcccaaagcgatgaagtgactttgaatcattgatttgcagcattcctttaaccagaccatgtacctccatattgcacaactcctgcagggtacagcctctgagctcctgcaaagctgccctgtgggacttcaggttcctgcttctgagaccagggcacttctacaataggtggttttcaagagccaccttattaagttaaagcacccaactgagtcatyatcctcacaaaaatccataatgtaatatttgctttacgctttgtgagatcagcacttagatatatacatgctgatgattctcagtatgtatacaaaggcagttttctgaaaactactaaatttctgagccgtaaaataaacaagcagagtaagtgtcagtggccattaattatctgaagtcctgtgaaacttcgacatgttttaaatctctgcttttagaaatttctgagttttaaatttcatgcttcagccatgccggtgatgaga

SEQ ID NO: 702966 - DNA, 1255 bp, Homo sapiens
tttaaactgctctaaagaaatacctgagactgggtaatttataatgaaaaagaggtttaatggactcacagttccacatggctgggaggtctcacaatcacagcagaaggtgtaggaggagcaaaggcatgtcttacatggtggcaagcaagagagcttgtgcaggggaactgccctttataaaaccatcagatctcatgacayttattcactatcatgagaacagcatgggaaagacccgcccccacgtttcaattacctcccactgggtccctcgcatgacacatggggattatgggagcaacaattcaagataagatttgggtggggacacagccaaaccatatcaactcctaatccagcaataacaaaaatcctaacgttaggaagtcaactttaggaaagaatcaccactatttgctgtccaaatagaatgccgtgattaaaaatcaataataatgccaggtgagtatgcaaagtttatgtggtacagttcatctttatcttcccctaactctccctgccatgaatccacttggatctccacttaatggaggggggaccaagagggccaatccctgtatcccgcaggtggtcactcccactctgtagctacagagtcctttccaatattgaaggattactatcaaaatgaccaccttttgccacatgatggattgaagaaagtgtctattgggaggccagtctaatccattacccctgccgaataaaagagcctcagagatactccttcactaatcaaaagtgcatctcttgtgttagtgcatcaaaggtatcatgctcatacatgggggatgctattgttatgtggccagtctgctccctgagaactcttccctgcaggtgacacagggaaagtcttcaaaggcggcagcagggatcagtgaggcggcgcaatccctgcagcttctccattcctgagctgaatatttgaagccatttggctaaactcttggggtggggacaaaaaagctgatcgggagttataggatctgcaggtggagaaaaaaagaagggactatttaggaaactgcctcctgggggctgtccctgtggctgcgcaggttgtcgggcgcccagctggattgcagaaagagaactgctgggagccggctctccaccactctcctctcctcaggaacaggctgctggaagaggagccaggccattcaggccccaacactgaagcactccaccagggatgctgaaaatagctgcagaagagcttctctga

SEQ ID NO: 702967 - DNA, 1255 bp, Homo sapiens
tttaaactgctctaaagaaatacctgagactgggtaatttataatgaaaaagaggtttaatggactcacagttccacatggctgggaggtctcacaatcacagcagaaggtgtaggaggagcaaaggcatgtcttacatggtggcaagcaagagagcttgtgcaggggaactgccctttataaaaccatcagatctcatgacacttattcactatcatgagaacagcatgggaaagacccgccmccacgtttcaattacctcccactgggtccctcgcatgacacatggggattatgggagcaacaattcaagataagatttgggtggggacacagccaaaccatatcaactcctaatccagcaataacaaaaatcctaacgttaggaagtcaactttaggaaagaatcaccactatttgctgtccaaatagaatgccgtgattaaaaatcaataataatgccaggtgagtatgcaaagtttatgtggtacagttcatctttatcttcccctaactctccctgccatgaatccacttggatctccacttaatggaggggggaccaagagggccaatccctgtatcccgcaggtggtcactcccactctgtagctacagagtcctttccaatattgaaggattactatcaaaatgaccaccttttgccacatgatggattgaagaaagtgtctattgggaggccagtctaatccattacccctgccgaataaaagagcctcagagatactccttcactaatcaaaagtgcatctcttgtgttagtgcatcaaaggtatcatgctcatacatgggggatgctattgttatgtggccagtctgctccctgagaactcttccctgcaggtgacacagggaaagtcttcaaaggcggcagcagggatcagtgaggcggcgcaatccctgcagcttctccattcctgagctgaatatttgaagccatttggctaaactcttggggtggggacaaaaaagctgatcgggagttataggatctgcaggtggagaaaaaaagaagggactatttaggaaactgcctcctgggggctgtccctgtggctgcgcaggttgtcgggcgcccagctggattgcagaaagagaactgctgggagccggctctccaccactctcctctcctcaggaacaggctgctggaagaggagccaggccattcaggccccaacactgaagcactccaccagggatgctgaaaatagctgcagaagagcttctctga

SEQ ID NO: 702968 - DNA, 1255 bp, Homo sapiens
tttaaactgctctaaagaaatacctgagactgggtaatttataatgaaaaagaggtttaatggactcacagttccacatggctgggaggtctcacaatcacagcagaaggtgtaggaggagcaaaggcatgtcttacatggtggcaagcaagagagcttgtgcaggggaactgccctttataaaaccatcagatctcatgacacttattcactatcatgagaacagcatgggaaagacccgcccccacgtttcaattacctcccactgggtccctcgcatgacacatggggattatgggagcaacaattcaagataagatttgggtggggacacagccaaaccatatcaactcctaatccagcaataacaaaaatcctaacgttaggaagtcaactttaggaaagaatcaccactatttgctgtccaaatagaatgccgtgattaaaaatcaataataatgccaggtgagtatgcaaagtttatgtggtacagttcatctttatcttcccctaactctccctgccatgaatccacttggatctccacttaatggaggggggaccaagagggccaatccctgtatcccgcaggtggtcactcccactctgtagctacagagtcctttccaatattgaaggattactatcaaaatgaccaccttttgccacatgatggattgaagaaagtgtctattgggaggccagtctaatccattacccctgccgaataaaagagcctcagagatactccttcactaatcaaaagtgcatctcttgtgttagtgcatcaaaggtatcatgctcatacatgggggatgctattgttatgtggccagtctgctccctgagaactcttccctgcaggtgacacagggaaagtcttcaaaggcggcagcagggatcagtgaggcggcgcaatccctgcagcttctccattcctgagctgaatatttgaagccatttggctaaactcttggggtggggacaaaaaagctgatcgggagttataggatctgcaggtggagaaaaaaagaagggactatttaggaaactgcctcctgggggctgtccctgtggctgcgcaggttgtcgggcgcccagctggattgcrgaaagagaactgctgggagccggctctccaccactctcctctcctcaggaacaggctgctggaagaggagccaggccattcaggccccaacactgaagcactccaccagggatgctgaaaatagctgcagaagagcttctctga

SEQ ID NO: 702969 - DNA, 637 bp, Homo sapiens
tcaacttagaaatttagatttctagcatcgcttgagaattcagacactggcaaaatggggcctccaatctgacttggccctgatggggcagagtggcactgaggtttccagtccttcccaccccacagtgtctttttgrccccagagttgaccagctttatttatggtctacctcatcactcttctaatagagaaatgtttctctcgggtcatgtctccacccaaaagtggagaaaacagaaggggagggagccgtgtgtttccaagacaattcggaaagggtacattgctttatgaaagggaagaaaattcctgtgcgtctcctaggcaaatatagaatgtcattgtctaatgaacacaactgaagatgccattatgatattccgtcaggctggtctctgaagaccttacttatgctcacctgggctctgggaatcttacctcagtttacctgggctctggggaccttacttccgttcacttgggctctggagaccctacctaagttcccctgggctctggggacccttcctaaactcacatggtctctggggaccttatataggctcacaagggctctgaggaccttacctatcctcacctgggctctggggacccttcctaagctcacatggtc

SEQ ID NO: 702970 - DNA, 1573 bp, Homo sapiens
aaataccctacctttgttgacttaaacaacataaatttattttctaacaattctggaggttagaagcctcagatcagggtgccagcaggattggtttctaatgagggctctctccttgttttgcagatggctaccttcttactgtgtcctcacatggtcttctctgtttatgcacattcctaatgtctctttctcttcttatgaggatatcagtcctattacattagggccccacccttatgacctcatttaaccttaattacttccttagaggccccatttccaagtrtcatcacattgaggtttagagcttcagcatatgaatttgggggacataattaagtccataatacccccaaatgtgtttccctaccctttaggtgatgaacagccctgcactcatccttctcacacagcttaacaactgatgaagactttcaatatatctcatttcaggaatgaaggaaaaattacatttctttgaagttttctggagatttttgcaatgatgctgttgattctgctcaaaggataactatgtagaataaatgtagcaaattcaagtttctgagtatagatttgaggaggattgtctccaacactgaaaagtacatgcatttctcaaatgagatgtaatgccatttggggaaaaagactatgaagatgtgtatgtgcacattaataagttaatgatctccaagcgtggtggctcaggtctgcagtctgagcactttgggaggcctaggtgggtggattgcttgagctcaggagttcaagaccatgtgatgcaacatagtgagacctcatctctacaaaaaatacacaaaaaaaataattaatgatcacttatgagggctaaagttgttttgaagaatatgataatatcccaagacttcctcttttcttgagctattacattcacaaataagggactttgttgccatgaataaggcaaaggcccacggaaatgtatatctagtttctttacaaaaatactttattgacatatgttaatgcagatatttaatggtcttactattttaattattttccttttcaatttcaatgtaaattcataaagagtttaagtaacatgcctaaattatttgagcagctgggattgtaacccacatctgcctgtttccaaggtcaattctctgaaccactattctattatacaatgagaatcccagaaggactgagctatcaggccttttggagcactaaaagttgtcatatttcaatgtcagctcctgtgctgttgtaatcaggttctatcatggcatctcccaccatttcccctgctaataccagttgcttctttttctcttcttctcataaaacttaccataaacttctaataacatttataaaacttatgataaaataactcatcaataccaaatatcagtagcctgatttttaatggattcagcagaaattcgacatcattttgaattccaaaagaacaaatttatctaatgtagaagataaacagtagcaagtgagtatttaattaggtttgttacttactatccatctaatttaaaaatgtactcttttacccctatgc

SEQ ID NO: 702971 - DNA, 2812 bp, Homo sapiens
cagggtgagcactttgcactgaataaatgggatcatattttcgtacaaggaacaagtgattgtgaggctgcctgttcaccccactgagacccagccgtgggaggaaatcagaggctcaaggggctggaagggagcagagggagtgatggccactctgctcatcccccactaaagggcagccttgattgacctcaagaaccccaaagaaggcttggtggtcccaaaacccttgtgtggggagaggctgagtccccaccttgctcaggcctattttatagcatctcctattcttccaagtgtcctagaaacttaacaggtgttccaagaaagtttttttttttaaagcggggacctcgggtgaaatgcttcctgagccaagccctctacatgtgttatctcatttaatcctcatgacccatctcaaagttgaggaagctgaggctgacaatggctaagtaacttgcccatagtcacaaaatactaggaagtgatggagcccagactcaaccataaatctgcctgactgtaaatgtcacattccaaatgatgatttaaggctggtgtcacccctgccccacccctgggctgtgctaaactgtattctcagagacaggaaagccagagggctttggggaagctttaggagagggtggggtgggcagagagttggacccactcaagctctggggccaccctcctacccctgtgtccatggatccccagtaagagctgaacaccaagtcctgtagaggctaagggaggtggccccctgctcctggcaggtcacctgtggtgccagattggaagccatacttctctcgaggggagggggtcagtggcccagcacttctagctgttccaataaaatatgaagttcggcaactccaggccattgctctctcctctgagtgatgaccttgcaatcggttctcaagctagcttgatttatccactccaatctgggcagcccgaaaggatgaatgagctccagggcctgcagaggagagcagggtccccgggagaagtgaggccgtgggagtgggggccgtttgtcaccagcgagccctgcttaattgtgggaagatgaagcaaggaggtaccggattgcactgtataaatcacggtcttttgtagtaccaccgggggcccagtctgacctggagggtgctcctatttggagagagccgcagggcacagactggctgctctgcctgacaaccactctgtgaaaggggcaggtttgtgtaagggcctcaacgtggaccctgcagtgggggactggagagctatgtggtattgcagccacagtgcaatctggtgtgttctgcagtcagggtgtccttggttcatatcctagttgtgccattggctggccatggggcagtggccacgtcacataacctctgtcttctgggcgtcatggttaagagcactgactgtgaatttgaatgtgggctctgccccctactagcggtgtggctttgggtaagttactttatctgtccctgtgcctcaatttcttcatctgtaaaatggggctaaataataggacttagctaatagggctgtatcagtttcccagccctgccataacaaattgccacaagccaggtggcataaagcaacataaatgtattctctcagagttccagagacccaaagtttgaaatcaaggtgtcggcagggctgtattccctctgcagtctctcagggagaatcctgcattgcctctttctgcttctggtggcttcaggagtccctggcttgtggctacacctctcccatctctgcctgtgtctcctattgccttctcctccctgtgtctgttttcctctgtttttcataaggacacttgtcattggatttagggcccacctgggtaatccagggggatcttatctcaagatctttaacttaattacatttttcaagaccctttttccaaataaggtcacatttgcaagtttcagaggttaggacttaaatatatcttttttgggggggtagtggggaggcaccactcaactcactacagggctgctataagaattaatgaattaatatttgtaaagttcttagaagagggcctggcacccagtaagtgctaacaagtaaccgatatatttatatatatacatacatatgtatgtgtatatataaaatacatgcaatattataaattaagctataccacattaatgcaaacatttatatacacattaacatactataatttacatgtatatgtgtacagaaaataatggcatacatcttgctgcaagtcagactgagaccacctttgcaaaaattatgacagtaagaaaattgtggcagtgaaaaatttctgatctaaccaactcccatcttgcctttaaccttcagactggccttcatcacacctgggcttgggccaagacaattttgggagaaatttagtttatattttaaatgaaaatagccctttccccaaactaaatcacctttgtaaagctaatgagagaacatcaggttaggaagatgagaggaacctgaattctgctaagatatagacataaatgattcctggctattrttccagaggttgcaagatatcaacttctccaattactcctacagataaaatcactcttacagaacctaaggttagccttttgagatgccttttcatgtctttgcatttctgatgacctatggctccaccaggaccctctaatcagtcctgtggcccccacccagaagtggactcagcacacacaagagaattaatgaattaacatctgtaaaggaccattttccacacctctatgattgc

SEQ ID NO: 702972 - DNA, 1343 bp, Homo sapiens
acccatttgagtttagccagatctctaagacagtctaatgagactcccattctaatgctcaaagagctttttatgaataacaattagcattggagacatttttttaagttgctaatattaatttcacagaaataaaatctaattgaattccttctggctctcccccattaagttaatgttatcgacttttaacggatgtcttaattaggctttcctattaatgggaatatggctcaattttcaaataagggcctaagctgccaatattcccatttggacttttaattaaggtgagaaaatattaaccaattacactaggttattgcctgggctctttgtaagatgaggagatcacaataaaccaggcattcaaggagagtaaacgagggtaggagtcgggtttgggacagtggggaaaggacagtggggtttgggcccccagccatctggaggaggggatccagggcccaggatagttattgctccatgtagagatgtagatgtggaagcaggtttttaatacttacctatattcctccctgacatcgctggggtttgtggaaaactcagttggcaagtgtatcactttgatgtgctgtgtaacaaaaccccccaaaacttagtagctttaaaaacaacctttgttatttcacaattctgcaggacagcaatttggactgagctttggtgagacttcttctggactaagccagctttgacgcatcttgactgggtttgttcacgcgtctgcagtcgacaagtggatcacttgggcctggcaggataatgatggcctcagctgggataccttggactgctttggcttctctccatgagtttgttcatcgtctagcagtctagctcaggttatacggtttcaagagctgcaagaaggcaagtgctttttaagtctctgcttgtgttgccactgttctattggccaaagcaagtcacatagagggcacggccccactaccaaaggatgaagayacaggaggcatgaacaaattgggccatttctgtaattaacccaccgaagcaggttgggtgaaaagcagatggatatagactggatgcagtggttcacacctgtaatcccaacactttgggaggctgaggtgggaggattgcttgagcctgggaggtagaggatgcagtagctgtgattgcaccactgcactccagcctaggcaacagagcaagaccctctcttgaaagaagaaaaaaaaaagcaggtggatatagagatagaggtgtctgacacagctcagagaaaataaatcataggtctaaaatctaaatgcctagagaacatggcacatgaatgaatgcgacatccctca

SEQ ID NO: 702973 - DNA, 636 bp, Homo sapiens
aaggtgggacaaagacagagaccttgaagcaagctgtgtgaggaggaaagaggaaggaagctcaggcctaggattaacgtgttctccatgaagtagacgaacaggttggctgtgcagctgggtggacggggctgagctctgagttctggaagcttagagtcactctaagatggggaagatgactagagcttttgaacatcctgtctaattcctgcaacagtggaagcccaggaggaaattaggaggaagctgatgctgacagggccctagagttgaggacaagcatggcaaatgctrcagaagaccaagagggaatgagagaaggctctatcaaaattggtggatgaggtttccactccagatgggtggatttcctggcctcagcatgctcattcccactcctgggcccctaacccatgttgtttatccttcttagatgtctttgcatgtcacctttttctaagtactgccattggtgcctgataccactattaaggactaacttggctagaggcattgctgtctattaaatatggcttccttgagaggcttttcaacttgcatgccgctgtgtctcactctagtgcacagctgccttgcacttgtcttttattttcttgatcttgtaagttccct

SEQ ID NO: 702974 - DNA, 1098 bp, Homo sapiens
tataccatgagctcaaaatgttgctttaaagcatttgaatcagatgtttagaattaaaatcatgtgatgtgaatttgaaaaaataaaatatgttcagaaatgtcatataattgcaggatattcagctgcttttacatcacaatgtttcattttgcaaactttgcccaagtgtttcttaccatcctaataataatacattaaaggttgcatgtgccccttctctagctaaggaatgtcatgtcaggttacaaagataggcccttttttaatccaatgagtgatgctaccacaaaaggctaaattaaggagcctctttctcttcagctactataaattacctatcattgatagatatttcataggacataaatagtataataataagattcatacttctgatgttttcctatggatttgagttagcttattcttaaaagttcattttagaaatcatatttagaagaaagcttagggacccaaataaaatagatgcctatctgcattaatcttattcttgttgcaatgaaacaagatggcatgtgaaaatgagakcactgagagtaactgttattactttatgtaggcaaaatcaaaacctaacaaccaaattacttcagttatgatagttgatgatgttcttacctttacctattttccccatttttaatccttaagaatattaaaaaccaattttattattattttgtagtacccataatctttggcaaatgttctcatgtgtagataaatttcccatgacataagatgtaagaattgtatcttttgttgtgttatttattagattcttatgtcaatatctgtgaagatactgtcctatacccatcctaaagtcataagaatatcaaagcctccatcaagaatttctaatacattttagattttctttgtgatactttttttttaataaaaaagctcaaatgacaatgtgtggtttaaatacacaaattgtaaatgctcttatcattcctaaattttctcaatgtgtttgtatttttgaaccaacagttacctttagttttcaaaacagaagtgcttttatgtaacacaaatccaaattgaataagaaattctcttgaa

SEQ ID NO: 702975 - DNA, 625 bp, Homo sapiens
tagaattactgatatcttgagtttgggagatagaatgagggcttttttttcattatggaagaaaaaaatatttgtcttcatcttgtctaaattttaaagtggtcaaaatcacatttcacatacctttgcatattgctgtttcttcaaaaactttcttaccatgtgtctccctcatcaawtgagatattggtaaataatccttcattgtttctctcatcaagtccaatttcctccacttgatatcaaattatttgatctggccttactatttgcagccattgatgccgcctattctttttcaagatctggaaggtgctgctatgtggtacaccctggtcttgtttactaatcagcttattccaccctcctttctctcacaggttcacacctctgctcctcctctcagcccctcagggcgttcctgcttccccagtccatcacagaagcatccatccatgctctgaaattagttttctccctcaacacccgttttcctaccacctttcctgcactttgtgcatccttcagagcacctgattcttgctaccttttaagaagaaaacaatttgaattaatttacacttcaaggattctaaaatatttatagagtgtctactgagtgcca

SEQ ID NO: 702976 - DNA, 954 bp, Homo sapiens
ttaaactctttgggggcagcaatagacatgtcagtgwataactgcaactacaggctaacaaatgggacaatagagtatacacttaaaaagatggggcagcacaagggggcaattagcctggtcaggagagaccaatggaaatatttcccatccagctgaattgctctggtaataagctgtgggcgtgaaaagactggcggcagggaaaacacaggtgtaaggtatgttactgaagtctagttactagggttaatgtgtggttactggagtgatgcacagaggtccaaatgatttctggaaagctttcaatcacaagcaagtcatgaaatcacagactagggaaataaacctaactatctatgtttcggttgtatctccaaggaaaacaaaggagcaaaaaatttatgtagaattttaagggaagaatacattgtttcttttattttttttatttttttgagtcagagtcttgctctgtcacccaggctggagtgcaatggtatggtcttggctcactgcaacctccaccttctgggttcaagcagttctcctgcctcagtctcccgagtagctgggattacaggctcccgccaccacgcctggctaatttttgtatttttagtagagacaggttttcaacatattggccaggctggtctcttggccaggctggtctcgagctcctgacctcgggatccacccacctcagcctcccagaatgctgggattacaggcataagccatggtgcctggcctgcattgtttcctaatagtgtgctttgagttgaccttacatggcttttatctacaaaggggctacgcaatggggtaagttgagttagtaataaacacagtgaacccttttgttgttgaaatctgtaagtaagatggtatttcgttaaaacttttttgttatttagctgttgattattaaaagaaaggtatcaccagtac

SEQ ID NO: 702977 - DNA, 954 bp, Homo sapiens
ttaaactctttgggggcagcaatagacatgtcagtgaataactgcaactacaggctaacaaatgggacaatagagtatacacttaaaaagatggggcagcacaagggggcaattagcctggtcaggagagaccaatggaaatatttcccatccagctgaattgctctggtaataagctgtgggcgtgaaaagactggcggcagggaaaacacaggtgtaaggtatgttactgaagtctagttactagggttaatgtgtggttactggagtgatgcacagaggtccaaatgatttctggaaagctttcaatcacaagcaagtcatgaaatcacagactagggaaataaacctaactatctatgtttcggttgtatctccaaggaaaacaaaggagcaaaaaatttatgtagaattttaagggaagaatacattgtttcttttattttttttatttttttgagtcagagtcttgctctgtcacccaggctggagtgcaatggtrtggtcttggctcactgcaacctccaccttctgggttcaagcagttctcctgcctcagtctcccgagtagctgggattacaggctcccgccaccacgcctggctaatttttgtatttttagtagagacaggttttcaacatattggccaggctggtctcttggccaggctggtctcgagctcctgacctcgggatccacccacctcagcctcccagaatgctgggattacaggcataagccatggtgcctggcctgcattgtttcctaatagtgtgctttgagttgaccttacatggcttttatctacaaaggggctacgcaatggggtaagttgagttagtaataaacacagtgaacccttttgttgttgaaatctgtaagtaagatggtatttcgttaaaacttttttgttatttagctgttgattattaaaagaaaggtatcaccagtac

SEQ ID NO: 702978 - DNA, 467 bp, Homo sapiens
tttcagtagagaaattgtcttagaagcgtgattacaggaggacatgtgatgagaaaggagcaatgaatgtagatctcttgaaaaaaggtgcacagtgaaagtaaagaaagagatatgctgataacgtgactggacaaaataaaggaatgaaggaaataygtagtgggtgtttatctatttaagtattaagtaggggccaggctggttgctcacccctgtaatcccagcactttgcaaggccaaggtgggcagatctcttgagctcaagagtgctctgaaatcagcctggccaacacggtgaaagcccatctctacgaaaataaaaaaattagccgggtgtggtggcaggcacctgcggtcccagctacttgggagcctgggaggcaaaggttgcagcaagccgagagctcactactgccctccaacctgggtgaagagcaagaccctgtcgcaaaaaaagtaaaaat

SEQ ID NO: 702979 - DNA, 2468 bp, Homo sapiens
tggaggtggggggtaaggggcatatgggaactctgtactttccactcatctttccataaacctaaaacagctctaaaaattaaattatatttgtattagtccattttcatgttgctgataaaaacataactgagattgggaagaaaaagaggttgaattggacttacagtttcacatggctggagaggctttaaaatcatggtgggaggcgaaggaaacttctaacatggtggcagcaagagaaaatgaggaagaagcaaaagcagaaacccctgataaacccatcaggtctcatgagacttatttactatcacgagaatagcatgggaaagaccggcccccatgattcagttacctccccatgagtccctcccacaacatgggcgaattctgggagatacaattcaagttgagattttggtggggacacagccaaaccatatcactattaatgaacaaataaagacttacaggttggtgaaaataagttacaaataatttacctcgttggacctaagttagccatatgttttcaagctcttgccagtattgagaattgtcagttgtttgcataatcttttaaggttaataatgatagctcactctcttactctgttttatttttcatgaatagatcttccggggctactggtaattcttgttctccactaaatgccacctcaggaagtgggagattcacacctcttaatccaagagcaaaggtacacgttaaaatgtaattgtgaaatgcatataggggtgagggtagaaggtggctgatttagtgatttccattcttaattatcattcctgttatcctaaagctggtatgatattcttaaaagaaaagaaatactaatttacctttttaggaaaaacaagccatatacttcttctgttttctagggtaactaaggaataaggtaaaattcaataggatattcaacagtccttaaagactggaaattactggtttcaggtagagcttcccatatatttacggcaggacacacaggtgtgccttgaatgggttgtagatctactgagctattggttcccccagtccttgtgcttgggtggggtctgggacagccagagcactgggtccagtcacttttcctctcattttatccctgtgtgccatatctgactgtgccattggttagataggttatggtaccagggaaaaataaatgtcttaatgtgttcttcatgtattttgatgtgccataggtatgtatagaagctaagcatttcacagtatattcaaaatttttgcagaaggcattttttctgtggtgctagtacagtaaaatatagttcctttgagtggttatggtaaattgtgaggatatctttaaaattgtaaaagttaattttgtagacttgagccaataagtgtctgacattgggaaaatctttgcatttcttattactgagttcagtaattagatcaaagagtgggtgcttatagcccaaattaaatgataggggaaagatattaaatgataggggaatgatagatacccgaattgtccagttctaggagatttgttctttgctacttcttatattctacaaaagctttaaagtaagctaatttatataaattattcttagttcctggaatttagtagcatttaatttactaagaccaaataactgcctttttatcattttaaaaatttatgcctatgatagctataaaacactggacttaaaaaaattatgactcctaaatcagtaagaggatctgttgaccaagtaatcagttatttggtagtatctctgttagagaattaacattgccaataacaatttaatttccagtaccattcaatggcacaggatgactttgttttatgcacttggtctaaatgatctgtaaatcttgagtagtctcatgtttctaattaccatctaaattttttccgtgtctttgttcaacagattgagaaacagaatgaagaaggctggtttgctctttctacccatgtatcataagtgaagtcaagtctcactgagtttgttcttaataatttattactyccctttccctgctctgacttttaagtttttatatccttctttcagataaaacctacaaagatcctgtgaattagtactaatgaaacagagaaataaagcaattattttttgactttctcaaataagttttcaacaaccaactgacctacagctccctgtgaatgaaactttgactgtagagaagttaaagttttgtattttaatactttcttaagtattttaagggttttttttattaatacatttttacctttatctttattcagggttttttgaggtttagtatatcttagttgatccatttatttatttattttcctgaagaactaatttgctttgcatgtaacttacaataaaattcctctgtgtgattagagtctggctttcaggaatatgtaacacccacttttctttctttt

SEQ ID NO: 702980 - DNA, 562 bp, Homo sapiens
acagttcaatgtaaaagaggatcaagtagatgagaattttgagttcatgaccctgttatctgtagataattctgttctcaatcttagttgaaacttggcaaaggaaaaaaatttaaagggttgccttgatggaatatataaaaaggagtcgcttcctaaatacatttcaaaaaactgtatgatattgtattcttygtagaaaaatataatatatgctaagtatatgtccccaaatttaatataaacttcaaaaacagcacaaaaataattctttttcaggtcttttttaggcacaagtataatgtgaagacaaaggcagcaaatgcatatgcactttataagaatatactgattttaacattttctaaaacttttactacgttttggaaataacaacgaaaaatcccaattccatggaaaattgctatgaaagctaagattccccgatggaattaaccacttgctgaactgcatttgaaagagctaccgtaagttgatgagatgtaaagaaaataaaaaactatacgttttcctttaaactgtttcatttgatattaatctg

SEQ ID NO: 702981 - DNA, 562 bp, Homo sapiens
acagttcaatgtaaaagaggatcaagtagatgagaattttgagttcatgaccctgttatctgtagataattctgttctcaatcttagttgaaacttggcaaaggaaaaaaatttaaagggttgccttgatggaatatataaaaaggagtcgcttcctaaatacatttcaaaaaactgtatgatattgtattctttgtagaaaaatataatatatgctaagtatatgtccccaaatttaatataaacttcaaaaacagcacaaaaataattctttttcaggtcttttttaggcacaagtataatgtgaagacaaaggcagcaaatkcatatgcactttataagaatatactgattttaacattttctaaaacttttactacgttttggaaataacaacgaaaaatcccaattccatggaaaattgctatgaaagctaagattccccgatggaattaaccacttgctgaactgcatttgaaagagctaccgtaagttgatgagatgtaaagaaaataaaaaactatacgttttcctttaaactgtttcatttgatattaatctg

SEQ ID NO: 702982 - DNA, 1302 bp, Homo sapiens
aagtctaaatgaatcacaaaaatagtttgtgtgatggaatttatagagtggtatatgaagtgcatcatgggccacacattgctgaaaatmtcaaccaccatatcaactttttttcagtaagctactgttaagtagcttttgtttggttaagaacatgagtacattatttgatatgtacagacatcgataaactattttaacctgaaaatagttaaattcaaggttacttatttgatttgaattattcttaacaatttctatgtgaatttcatgagtttgtagttagtgtttttataatatctctgacatcacttaaagtttgttaactttatacttcaagcaaaaaattaaaaagccatttcagagtgaaatatatttgagggaaaccacatattgttagtgttttttaatcttgtaaatccattctctcatttgataaacagggatttttcatatccaagttcatattaatttgaaactttatatataatataccacataacaagtaaaaagtaaatcaaagcaataattattttagaacatgcttttccaaattatctaagcttctggaaatatatatatatatatatatatacacacatatataatatatattatatatacatatattatatatataatatatatattacatatatatataattatatatatatatattacttcttgtgggacaatctttgagtttcaagtctagtattggtttatctctttctccatttaaacatttaaaagtattaaaatttataaacatttaaaatcaattaccttcaccctacagcgaacttgaaggtagaatgaggaaagagatatgtcacaggcaggatgagaaattttagatattctctaaagtcagatgtggttgagataactacatttcagaaataggacaggtaagtagcagcaagagggcactaggttacagtgagcaggaagcatgtcaacaatgatgtaggatgtgtaaaggaaagaaaaataaagacacaggccgggcacagtggctcacgcctgtaatcctagcactttgggaggctgaggcggtcagattgcctcagcttaggaatttgaaaccagcatggggaacatggtgaaaagccatctctactaaaatagaaaagaaattagccgggcatggcagtgtgtgcctttagtcccagctactcaggaggttgagccaggagaattgcttgaacccaggaggcggaggttgcagtgagccaagatcacaccactgcaatgcagcctgggcaacagagtgagaccctatctctacaaataagt

SEQ ID NO: 702983 - DNA, 1456 bp, Homo sapiens
ccctgctaatacatggagtagcatggctgggagcctcacaagatagttaaatatgcctgatttaacttacataaataatgcatgtacattcagtcttttcacataaaaaggaggaaaaggcagtacaccacttcaaatggtggttgtaaggatcaaaattagaaagcaccttaatagtgtctggcacccagaggtcactcaacatgtgttagctcttatgatttttcaatcagcacatacacccttattatacttaagggttctgcttggaaggatagaaatagtgacaagaaagaaatatggctgtaggctttttggttcatgaagtctggtgaggcaggcaggcatgaaaagctgaggctagggtaagatttaatttagttcccaaagagagagctcagcacgctgctgtggagcagaaggccatgtacttctcctctgcttttgagcttttgggcctccgtggattttccactgtagctcatagttccagacccctggcccaatatccctctaatatccttccctccaatctgtcctcactgattggcagtctagattgtctcttacctggaatacacaaggcagcttggagccatgtttcctgtgacatggcatactgcagctttctagatgaagaggcagccagctgttagctttcctattgataatactcctctgtattctgtttgttatagatgatcctgtgacaaatttcacccaatttcttatggcctgcctacagaagtaaactttataggaaattcttrttggcattgataaataagttgataatgcaatcatcagttcagttatccatacatccctctgtgtcatacactatgatggagagtgtagatgcaaagttctccctgttctggaggaactcagggtcagtgttaacttgccagcaagtaattgcattgcagtgatgtcatatagtgctgtgtagtgtttagggttcttttgggcactgaagccagacagatgaggttataggatgtccgataaggagtcacagaggaggttatataagaactggccttttcagactgattcagaacaagtaaacaaaaaaggatctgccaggacagtaaatggcgactgtgtatacaattcaagagatttttagaatatcacatcttgggaagaatttttttaatgggtgtaaataatgtaatgaatacttgataaaagcagagtcttatgattaggtttgtattttagagaaagaattctgagagtcacatggaggatagatatagttaaaaatattgtatgacatatttccagtttcctgaaaacatggtcctcaaaatcagcacaataccagattttctgagaatattatttatcactgatgatttcagcagtttgaagcacatgttttgagcttgtacttgaggaaaagaaaacacagtactcacataaatttttttcttcaaaaattcaccat

SEQ ID NO: 702984 - DNA, 1456 bp, Homo sapiens
ccctgctaatacatggagtagcatggctgggagcctcacaagatagttaaatatgcctgatttaacttacataaataatgcatgtacattcagtcttttcacataaaaaggaggaaaaggcagtacaccacttcaaatggtggttgtaaggatcaaaattagaaagcaccttaatagtgtctggcacccagaggtcactcaacatgtgttagctcttatgatttttcaatcagcacatacacccttattatacttaagggttctgcttggaaggatagaaatagtgacaagaaagaaatatggctgtaggctttttggttcatgaagtctggtgaggcaggcaggcatgaaaagctgaggctagggtaagatttaatttagttcccaaagagagagctcagcacgctgctgtggagcagaaggccatgtacttctcctctgcttttgagcttttgggcctccgtggattttccactgtagctcatagttccagacccctggcccaatatccctctaatatccttccctccaatctgtcctcactgattggcagtctagattgtctcttacctggaatacacaaggcagcttggagccatgtttcctgtgacatggcatactgcagctttctagatgaagaggcagccagctgttagctttcctattgataatactcctctgtattctgtttgttatagatgatcctgtgacaaatttcacccaatttcttatggcctgcctacagaagtaaactttataggaaattcttgttggcattgataaataagttgataatgcaatcatcagttcagttatccatacatccctctgtgycatacactatgatggagagtgtagatgcaaagttctccctgttctggaggaactcagggtcagtgttaacttgccagcaagtaattgcattgcagtgatgtcatatagtgctgtgtagtgtttagggttcttttgggcactgaagccagacagatgaggttataggatgtccgataaggagtcacagaggaggttatataagaactggccttttcagactgattcagaacaagtaaacaaaaaaggatctgccaggacagtaaatggcgactgtgtatacaattcaagagatttttagaatatcacatcttgggaagaatttttttaatgggtgtaaataatgtaatgaatacttgataaaagcagagtcttatgattaggtttgtattttagagaaagaattctgagagtcacatggaggatagatatagttaaaaatattgtatgacatatttccagtttcctgaaaacatggtcctcaaaatcagcacaataccagattttctgagaatattatttatcactgatgatttcagcagtttgaagcacatgttttgagcttgtacttgaggaaaagaaaacacagtactcacataaatttttttcttcaaaaattcaccat

SEQ ID NO: 702985 - DNA, 1456 bp, Homo sapiens
ccctgctaatacatggagtagcatggctgggagcctcacaagatagttaaatatgcctgatttaacttacataaataatgcatgtacattcagtcttttcacataaaaaggaggaaaaggcagtacaccacttcaaatggtggttgtaaggatcaaaattagaaagcaccttaatagtgtctggcacccagaggtcactcaacatgtgttagctcttatgatttttcaatcagcacatacacccttattatacttaagggttctgcttggaaggatagaaatagtgacaagaaagaaatatggctgtaggctttttggttcatgaagtctggtgaggcaggcaggcatgaaaagctgaggctagggtaagatttaatttagttcccaaagagagagctcagcacgctgctgtggagcagaaggccatgtacttctcctctgcttttgagcttttgggcctccgtggattttccactgtagctcatagttccagacccctggcccaatatccctctaatatccttccctccaatctgtcctcactgattggcagtctagattgtctcttacctggaatacacaaggcagcttggagccatgtttcctgtgacatggcatactgcagctttctagatgaagaggcagccagctgttagctttcctattgataatactcctctgtattctgtttgttatagatgatcctgtgacaaatttcacccaatttcttatggcctgcctacagaagtaaactttataggaaattcttgttggcattgataaataagttgataatgcaatcatcagttcagttatccatacatccctctgtgtcatacactatgatggagagtgtagatgcaaagttctccctgttctggaggaactcagggtcagtgttaacttgccagcaagtaattgcattgcagtgatgtcatatagtgctgtgtagtgtttagggttcttttgggcactgaagccagacagatgaggttataggatgtccgataaggagtcacagaggaggttatataagaactggccttttcagactgattcagaacaagtaaacaaaaaaggatctgccaggacagtaaatggcgactgtgtatacaattcaagagatttttagaatatcacatcttgggaagaatttttttaatgggtgtaaataatgtaatgaatacttgataaaagcagagtcttatgattaggtttgtattttagagaaagaattctgagagtcacatggaggatagatatagttaaaaatattgtatgacatatttccagtttcctgaaaacatggtcctcaaaatcagcacaataccagattttctgagaatattatttatcactgatgatttcagcagtttgaagcacatgttttgagcttgtacttgaggaaaagaaaamacagtactcacataaatttttttcttcaaaaattcaccat

SEQ ID NO: 702986 - DNA, 667 bp, Homo sapiens
ttttttttttgcttttgccacccaggctggagtgcagtggcgtgatcttagctcacggcaacctccgccttccaggttcaattgattctccttcctcggcctcctgagtagctgggattacaggcgcctgccaccacactyggctaatttttgtattcttggaagcctttttgtactaagataaggggtttcagtagaaacttacaaagatagaagtggtaatacggtgatagggtgacataggggctatggaataaacaaaattgtacaagagtttgatcagcctcaatttccctatctgtgataggagagtttgttttcctgaatttagattgagcacctctctgcaaagctgcaaaggattgagcacctctctgcagaggatggatccaggggcctgagggcccaggttctctcactggcttcactatctgcccaagtatctgatctttctctttgttttctttaacctgaattcctgttgcctgactcccagatgtgtcaaatttagccacctggaaaccgttatctgtgaactcactgaaagtcaagtttgaacttggaatattgtgaatgcccactaaatatttatgagtgttgaatggatgaagaatgttgaatagatgaataagttctcgttgaaaaattggataggtaactgttcgca

SEQ ID NO: 702987 - DNA, 667 bp, Homo sapiens
ttttttttttgcttttgccacccaggctggagtgcagtggcgtgatcttagctcacggcaacctccgccttccaggttcaattgattctccttcctcggcctcctgagtagctgggattacaggcgcctgccaccacacttggctaatttttgtattcttggaagcctttttgtactaagataaggggtttcagtagaaacttacaaagatagaagtggtaatacggtgatagggtgacataggggctatggaataaacaaaattgtacaagagtttgatcagcctcaatttccctatctgtgataggagagtttgttttcctgaatttagattgagcacctctctgcaaagctgcaaaggattgagcacctctctgcagaggatggatccaggggcctgagggcccaggttctctcactggcttcactatctgcccaagtatctgatctttctctttgttttctttaacctgaaytcctgttgcctgactcccagatgtgtcaaatttagccacctggaaaccgttatctgtgaactcactgaaagtcaagtttgaacttggaatattgtgaatgcccactaaatatttatgagtgttgaatggatgaagaatgttgaatagatgaataagttctcgttgaaaaattggataggtaactgttcgca

SEQ ID NO: 702988 - DNA, 2098 bp, Homo sapiens
cccctttcctgaccacagggagctacacacctgcccatcctcttgccatactgttatttatgggctatttatccatctctggctacaagctctgcttcccccataatcaccaaatttggcaactggcctttggactggtgcctcaagccactcccacctccggtttcaggagaacccctttgacttartgacctagacagtggcctcacccagctcaaatctgtccccattactccattcctgtcttactcacagaccctcagccctcagatacccctcgcctggagtaatcacaccaaaaggtatgcacatcactcagtccccatccatttgtgccacagagcaaaacaaaataatattcagccttattatcaaagaggtacaagtcaaaaatgtagtattaggtaaagagccagaatggagcgtgaggtcatacagtttgaatctagctgaatgggtgacagataatgatctttctgttcttcagacaggcatcctgctccccgttttcttcttctaaattcccctctattccctctctcagtcatccctaaatctcttatctcctgctgtcctttcaatatgtctcccagtgtcttccatacctcttctatttctcttttatccttatctaaccagtatagaaaactgattacaataagtagtgtaaatatttcttatgtatgacactttttttcatccaatttggaattataaggagagcatttgtcaggatttaaaggacagactttctacaaaattcatgtttccatactccagttaaactcttctcgaatgtctaactcctgaattatggtgtctattatgggttggattttatcccctaaagaaatatgttgaaatcctgaccccagtacctgtgaaagtgacattattggaaatacggtctgtgcaggtgtaatcatgctttacaatgagttcataatggaataggctgagtccttaatataatatgactggtatcctcataagagaggagaagcacagggacacagacacacaggaagaagacagccatgtgacaatggcagcagagattagagtgatgcatttccaagtcagagaatgccaagcattgccagcaaacaccagaaactagaaggggctaggaaggattctccactgcaggttttagagggtgctaacaccttgattttggactctagcctccagaactgtgagataataaaattctgttattttaagccacccaatttgtggctttttgttacagcagccctaagaaagtgtccctcagacacttcttttattttttattttttattttttttgagatgaagtcttgctcttgccacccaggctggagggcaatggcacaatctcggctcactgcaacctccgcctcccaggttcaagcaattctcctgcctcagcctcctgagtagctgggattacaggcatctgccaccatgcccggctaatttttgtatttttagtagaaatggggttttgtatttttagtagaaatggggttccgccatgttggccgggctggtctccagctcctgattttgtgatctgcccacctcagccccccagagtgctaggattacaggtgtaagccaccatgcccggcccctcagacacttctttaaaaaaaaaattcttggggcttctttgagaattcttattattgaccttggttattcattcctgatttatctaattctgagatcagagaagttgattatttatatatctcagaaaaaacatgtaactacaatttatcgttaagttgattttattttaacgtgaatgtcccccagtagcaatgcactagcacctgagccatggtttataaatgtcagtccccctaagaatcctttgatgaaatcctcattccaggtctggaatggagaaaaagtgagcctgggacattttgttggaccagaaagcaatgaagtgctcaaagaccaaccaagacatgtcaaaaaattacaggaaccagcttgaaagagctcctgctaccctaacttggaagaactggagcagcaaatagaataaaagaacaatgatagtaatggatgataacacaatgaattgcctaaaaaaatcc

SEQ ID NO: 702989 - DNA, 594 bp, Homo sapiens
gcccgagggatggtgtttcatattttagctgccagatccartgatgttctcttctcaaaacctgaatgccctgcctccacacaccaggttgcacaggcatggccacgtgtcgaatgtggcgccagcacgagcagggcagcaggacgggctggccctttataccgcagttctccctctgcccagacccatcaccagtgagccatgtgagaaccgtgcagtttgccacaaagacacctccttcaaacactccgggctgggtctacctatctgtggaaggagcagattgaaagagatggcctctagtcttcttccagtcccatcatgctatgatactacagtgtgcattgtggaaggccaaattctgggcatattctctgcctgcctttgttacaatttagccagagatacaaatctccaaattcctgagacctggtgcagagtagtattctgttaactgaagaggcattttaggtacaaaaaaccccaaggcttatcctaggaacagcacagagtaaatacattctcaaatctaaccctccttataaataagttatttgtagattcaaataattcacaattatgaagggaaaatta

SEQ ID NO: 702990 - DNA, 983 bp, Homo sapiens
gctaaaggcttttagaaaaatttagtttggatcactagacatattttaaccacattaatgaggtatctgatttagctcaagtattgttaataatatttgcaaagactcaaattaagaagtcgtttggtaagttaaaagaatggacattaggttagtgtggctggacattcattatagttagaaataatgtgcagaagctgattatgagcaattctgtaagtcatatccaaaagccctaaaattgggagaaaaatcatgcattcaagattctgttctcctataagtatgtgatctagtgtataagctaatttcctatattagtttaagatagtttattcttattattcactttaggtaagtttttatcatggatatacatccactcttatcaaacttctattatctatctagccatcagttgtttacttttttccctttaatggtttaacataatgaattgagttgataggttttctaatgttgaatcacccttcaacttctggtcgtgatatgtacttctgctcacctggagtaaatattctaatgtattattttgtatgctttgatctatagggtgactgagagtgctgttttttctctaatatctattttatcattatcggttcagtaataaaacctaacactttagctgaggatgacacatacgtggagactgcatctctcacccttctatgtaactaatattggtcaggtgactgtgttttagcaaatgatagaggagaagcggtatgtgcacacaggttatggcctttgaaggaagctgctcactcttcctgactttattcctaattctcctactttggaatttggatatagtcatagtagtgacttattactgaccatgtgtgcaaagtaacttaggagatgraagcataaggaacaaagaaatctgagtccctggatgacctagggaatcagaagcgtcctgtcttcttttacaacctacgtatggaaaacttgta

SEQ ID NO: 702991 - DNA, 1350 bp, Homo sapiens
tgcaagagctgtaattttcaggaagcacaatcacatgtttaagttaaaggtatccctttttacaacttttgacctttctaatagtcaaggcaagatatgtaattgatgcatattctttaatggctcttaaagaatgagtaaaagtgaccttttgatagcagctctacttagtgattgtgccaagcctgcaattggcataatagaatttacaaaatggggcccaggtgtgtgagtgtgtgtgaatgtgtgtggtctttaaatacccataatgaaattgaaatactaactcgacataggctttctgccagctggtcttagacaaataacattcagctcttttatggttcaccttcaggtgacagacctttagattgcaagttttctgttttgttgtgttttgatttttaaatttttatttagccactgcatcaaatctagcagtacaatggggtaacaactgaataataaaatcaattatattgtgtttcccaggcttttttagcacttttgcatttataagctcatttatttcttatatcatagaagatagatattaatatatgcataatttttcacacagaataaaacagagattaacttaattcagagatggatttcaagcttaaatcttgcatttatacagtctgttttcttttcattacaacatttatttttacaaaaacatgtatgactcttaacagaatattgtataaggccacaattctccagggatatgaatataataaaattttcagagatgtttatgaattttgcctggattacaaaattatattttacttcactagacttatctatttggttaacaatttatcagaaatataatcactccacaatatgtcacgttagagaggcaaataaaattatatttccctcagtttagcttcacaactattatagattaaaagatatatatttaaaaagaagaaatgaagaaagataaaagccttacmacttcctcacttctcagtgtctgacacagaggagaaaacaaacaaaaaaacaaaggcgactttagtttttgctctgcttttgaagaaagtaaataagtctgatgttctttaagctaaagtagagtgacaaatatattaagtgagtctctcagaagtctctaattgtttttgtttctgagaaaatcagtttctcttcaagatctattaaaaatcacctatcagagaaaattcaaaactaagaaaaatagtttataaaagttaaaaatcacctatagaggattacttctgattataatgttggaagatctttccttctatgaaaatctaaaatatctggataaaatagtctcatcaaggagtattgttttcaaggaagcat

SEQ ID NO: 702992 - DNA, 765 bp, Homo sapiens
cacacatacatacaaatatatatatatatttgagatggagctttgctccatcacccaggctggagtgcagtggcatgatctcagcacactgcaacctccacctcccaggttcaagcgattctcctgcctccgagtagctgggattacaggtggccaccaccatgcctggctaatctttgtatttttagtagagacggggtttyaccatgttggccaggctggtctcaaactcctgacctcaggtgatccacctgcctcagcctcccaaagtgcagggattacaggcatgagccatcacgcccggccattttttgtatatttataaagtattttcattcctatcttgtttgatattcaaaaaatgaatacatgtaagattactctcctttcctcccagtatgatagggtaggaaagctaccatgctggaaggaaagcagggcaacatgttattttcttcactttgcagatgatgctcaatgactcctccaaagttaggttctaacgagttggtagtagagataggacttatatcccacgaatcttgactctcagattgctgtcttgttttctgtatagctactgtcctttgtcactaaatagcctcatattccctctagacagcactactgcttgagtagctctcttaaagggagttctcttcactcctagaagaacccatatttctgactattagagtccagtgatctcattagattccaaggctttattctcctccctcctgttttatgcaaaactgattttga

SEQ ID NO: 702993 - DNA, 765 bp, Homo sapiens
cacacatacatacaaatatatatatatatttgagatggagctttgctccatcacccaggctggagtgcagtggcatgatctcagcacactgcaacctccacctcccaggttcaagcgattctcctgcctccgagtagctgggattacaggtggccaccaccatgcctggctaatctttgtatttttagtagagacggggtttcaccatgttggccaggctggtctcaaactcctgacctcaggtgatccacctgcctcagcctcccaaagtgcagggattacaggcatgagccatcacgcccggccattttttgtatatttataaagtattttcattcctatcttgtttgatattcaaaaaatgaatacatgtaagattactctcctttcctcccagtawgatagggtaggaaagctaccatgctggaaggaaagcagggcaacatgttattttcttcactttgcagatgatgctcaatgactcctccaaagttaggttctaacgagttggtagtagagataggacttatatcccacgaatcttgactctcagattgctgtcttgttttctgtatagctactgtcctttgtcactaaatagcctcatattccctctagacagcactactgcttgagtagctctcttaaagggagttctcttcactcctagaagaacccatatttctgactattagagtccagtgatctcattagattccaaggctttattctcctccctcctgttttatgcaaaactgattttga

SEQ ID NO: 702994 - DNA, 1387 bp, Homo sapiens
ttggagcaagtttgttccctttggcagaaaacactattcatgagaaaaattttctaatgaaaaaaatcctagactttggtgctgagtatcagcagcataaggaaaagcacaactgtgtgaggattagaactttatatgtgtaattgacttcaggctccaaccaaagacagcatcaggataaatcctcttatgcttttacttgctctgaaccacctctcagatgtccaggttcatggtaaaatgtgtttcatctatgcctgaagtatcttgaggctctaaatctttgcaagagtattttattccctcatccatgytagaaaaacatcaccaggaaggcaaacatagttacctgatggtctcatgttagactttttgtttatttaggtaagcacctcttcctactagtggactcatctcagaagatttcaaaaacaaaagtctcaagtgacgtggatatttccacctggttgtagtgggataggctggattgatgatttttcacactaagctctgagtgttccaatgagttccttggaagtctctcaggatcaacaggggtgagtggaaggggctccccactccagtttcaatatgagatactctatttttgtccattttatataagttgatctctaatctgaatttcatttgaaaaaagtgttccactgcttaaaggtaagtttaaaaagagaacagaactagaatacttctaaaaaaattcagtagttagcttacattgcatacaaataaagtaggcatgggatattgatattgctgttaattcaaagcagtaacacatttaaaaattcatttattctacaaacatctattgagttatgattgctgctaaatatgttcagtttgagattctacccagtatgatgggatagtgtttttcacaaggtacatggctctttgcagatgtccaacactctataaactacatagctggaagggaacccgggaattatccagtctaccctcttcctttttagtcaaagaaactagagtagaaagaaattaagtaagttgaacaatgatacttcaggcaccaagtgggcagctgaagtaaatccacatgcagcctgccctgtgtgtataaaaataatgcatcttggggatgacagaggaaactaaaatatgttctgtcttattttatattacaagactaactctgttcatgtcaagttgctaaaccattaatacataaaattaagaaaaaaaggtacttttgtatgtttgagaaacattgtgagaaccagtctctaaatatgaattcttgtcttccctgtttcactgcactatgtgcaaaaatttgtttccaaagagatcaaggaggcatacacactgatttatcctatggttgttatgaaattctgcctaccct

SEQ ID NO: 702995 - DNA, 600 bp, Homo sapiens
taaatcatcacagcatactactccaaactttagggcctaactcacatgtattctgtgtgatattggcctaaaaaacatatcattgtgacctttaattaagtatcacctrcttctataagttctacacagataggtctatcattctagagacaaaaattataagtcctgagactttgctgaagttgcttatcagcttaaggagattttgggctcagacgatggggttttctagatatacaatcatgtcatctgcaaacagggacaatttgacttcctcttttcctaattgaatgccctttatttccttctcctgcctgattgccctggccagaaattccaacactatgttgaataggagtggtgagacagggcatccctgtcttgtgccagttttcaaagggaatgcatccagtttttgtcaattcagtatgatattggttgtgggtttgtcatagatagctcttattattttgagatacttcccatcaatacctaatttattgagagtttttagcatgaagggttgttgaattttgtcaaaggccttttctgcatctattgagataatcatgtggtttttgtcttttgctctgtttatat

SEQ ID NO: 702996 - DNA, 654 bp, Homo sapiens
ttatctatcttttataattatcaaggctggacattttttctatgtgtttatttactatatttacctctctgtacggcttatctgttttatactcttttctaatatacctattggagtcctaattattacatatatacataaatgaataatttttatataggtgttaatacattttaatttaatttacatctttttttctttttttaaaattttggtttttacattgctataatagaacaattgtgtattcaaatctgttggtcttttaatttgtgacttttttctatagtttagaaatattttaaaagtatttacctctatgaatatactttagtgcagtatattcatttatttgggaaattataaatataaggatataaggatagcaaatacaagttttgtaagtaggtctctctcaatgacagacagccctgaacctttacagtggccttcctacctgcccttcccaaccttttctccackaaatactgtcctccaggaaaatccctctcagttgaccgcattgaaatatgaaattcaatattttttgtcagacctgatatagggtgaggttatacatgcaactacatgcagattttctgttttactttcctaacttgcttctacagattacaaacacttaagaaatcatcc

SEQ ID NO: 702997 - DNA, 1645 bp, Homo sapiens
atttggtaattgtttcctcctgcagaataagcttgactctcaggaataacaaaaataatcaataggtgtataaaatagtaaaatgactttttgatagactatattggttgctgtgaaaaaactgggttggagtcagaaagaccagaagccttgaggccagtttcaaggctgctggaggaatctaactgagagaagttgcaggaatcacaggtattttttacaaatatcagatgggagaatagtggctgagagcaggactacaggcattcatagtgggaataggaagaaaaaatgtgcagattcaaaatgtatttgatcagcagaaccaagagaacctggtaactgataggatataaggatgtgaatgaaaagaaaaagcattaattaaattaatttaattaattaaaggcattaattaaatgctctggtttgtggcatgaaatcggcaggatatataatattaaagtgagaatattgtcattaagactatgaaagaaaaatggttcagttttagaaatgatggatttgaggtgcttttctaagatccaagtctaggtataggtagacattttgtttttttaaaaaaaacaaattagggctcaagaaagagttctgagccaaaggtataaacatgtgaaatattaggatatagttgatcatttaaaccaaaattgtagatgagatcacactgaatgtgtgtgttcaaaatgcagttgagcatgtcccaggatgatgctggttaactggtaaatacatgatgacagaaaattgcaatagcacataatcctggaaaacagagcagaatttaaaaaaaaatccaggcagatttgattccagacaacaaacactgaattggggagtccaaaatatgacttatatttttatttattattttcttacactaaagactgaatcagttataatataaattatatattcattctgcatgtacagaagacttcataatacattatttttaagatctgtggccttttcaagaggaggcatttgcatctttattttattctgttatttgaatcaataatcagaagtaaagtctaaaattttagctagagataaactgttctctccatttaattattttttagggaccttaagtgataagcttattcatattgcataactcatacataaataacttgataagctcaatacacaaatgagttcaattatgatgctgttgttatgatcagtttatttgcctgttcattcagaactatttttttttcctgtgcctagcataggtatcacaaaataggcaatatgatttcattggtcatctgttgcagaataaattatattgatatgattaggtatcctgtagttgacaaattaatggtcactcatcatgatgcacaatttatatrtatttgggaatgcagaagcttgtgatttctgataaacattataacttttaaagttgacatattttctgataataaatatcttgttatttgcttatatttattttgttcattttaggactattaaaaagtcctcgggcataatttttaaataaaaatataaacatttaacactgagtcatgcactgaagttagagagattaaataggacaaagatctttagtttctaactgtctccaggcagatggggtggcagatta

SEQ ID NO: 702998 - DNA, 1398 bp, Homo sapiens
  misc_feature 720, 721, 722, 723, 724, 725, 726, 727, 728, 729, 730, 731,732, 733, 734, 735, 736, 737, 738, 739, 740, 741, 742, 743,744, 745, 746, 747, 748, 749, 750, 751, 752, 753, 754, 755,756, 757, 758, 759, 760, 761, 762, 763, 764, 765, 766: n = A,T,C or G
  misc_feature 767, 768, 769, 770, 771, 772, 773, 774, 775, 776, 777, 778,779, 780, 781, 782, 783, 784, 785, 786, 787, 788, 789, 790,791, 792, 793, 794, 795, 796, 797, 798, 799, 800, 801, 802,803, 804, 805, 806, 807, 808, 809, 810, 811, 812, 813: n = A,T,C or G
  misc_feature 814, 815, 816, 817, 818, 819: n = A,T,C or G
tctattactcatatcagccatcataattttcaaattcctgggaggtagaaggaatgaggcttggctttgtgcttctgggtgccagactccaagttgcgaagatgcctgtcctttttccatttattgactgcctcgcctggggaggttctgccctcttagctgacacagcacaggaagacacttccytcttgcagcaaatgcagcttcagagaggcctgagatcttgcttctacgttgcttgctcctttgcccactgccttgcaagaagatctgtggaggcctctgaggacgaggctctcagttggaagaagccaagagccagccttcaatgttgccaaatgcctgtctggcccaaagcaggaagtctgcaagaacacacccacagtgctgagtgtagagctcgtttgaggataaagtgcccacctctgagctcagctcagcacctcataaagcgaggctcagacggcatgaataagatgtatctctaaggcgaagtgaggcttgcagaatttatgcgctcctggggccccttgcaaacaagcttaaaccaacagtacctgcctctccttcccttctgtgtaccatctgacgtggctcctaagactgcctcttgtatttgtctggggtatgcctaggctgagcaggcaggcaggagcatgtgtggcctttgagaggccctggttccctctggggaaagactgctcacaaacacacacaagnnnnnnnnnnnnnnnnnnnnnnnnnnnnnnnnnnnnnnnnnnnnnnnnnnnnnnnnnnnnnnnnnnnnnnnnnnnnnnnnnnnnnnnnnnnnnnnnnnnngaattcatctccaggttaaaatagaatacttctttcatctcaactctaatctttaaaccttgagtcaaagcacttcctggagcataaatgtggcagctttagtatttcaaaaacgtcagaaggaattaaagtcgctttcatctttcttctcctataaccaacaatttacctttccatagaaaaagcactcccccaaaaaccctgtgtcttttacagtctagtaaatttaggcagaaagaatgggagaaatccccagacctggttttattcctgctctctctttttgtgggctagtgggaaaggagtgtggagcagtaggttgtaagatttcattgtataaactgtgatcatctaagttcctgcctctctctccagacaggaactcctccagggcagggacttgggcaaagctgcctttttgtcttgtaatgcttgacgtaaaataatactcaacgcatgtttgttgaatgagcaaatgaatgagtgattgattgaataaagacctggtggggagaccccactattgtatgtttcccaccagaagaaattttccgggctgttacactaatcagggctaat

SEQ ID NO: 702999 - DNA, 1582 bp, Homo sapiens
cacaaccttaattccctatgcaaccttagttcccttttgccatgtaaggtaacatattcacaggttccagggattaggatgtgtacatctttgaggggccattactctgctaccatagcaagagtccaatcattgtgtggcttttcccatctattaaaaagagattctaatacttcactcacagggttatagtgaggcaaaataccaatagctgacatttgcaaagagcctaccatgtccaacactactctgagcaaaatggctctgtccaccccaacactcactgagtgtgaacacaccccgtacaatctgggcagggctgtcatccaagttctccaaaggtgcagcgcacctgagggctgcaggtggccatgagctgtgaaggagccttatctctgcccactcctccctgaccttgaagcccttttggcctttcctccctcgtacactcactaacaaggtagaaaggagagccctagctggtgcaaggcagggactgaggcagtcgctctcctgcctccctgtttcttcctgacccacacagacggaatcattatagtgtccaactggcttcctgctactgttctttggacttcggtgttggtatttggctactcttaagtgtggctttcaaaactccctaaagctgcagttctattgttagtttgttgttgcttttatttggggaggggggattcagaaccctctgagaaaaaatgttaaaattgtttttctttataaactacccagtctcaagtattcttttatagcaatgcaaaacagattaagacagccagggatacaggaatttggccctgcactctgggaggtactggcaagagttagggaaggcaactccagctaggtgggctaggactcagaaagggtggtgggtcccagcaaaagaccagagtcagttcagtccgggctgacatggcagacaaaggacaggaagacatctgactctgcaagcttagtccagatactacaggatgatctctctccgtcagaaaaatcccactccactcctgacgggctggcactgctgggtctttcctcccctgcaagggggacttctgggcctgggtgtgtctgagtgtgcggctaggatggctggtgcaggtaggagcagcagggctcagcatgtgcacacacactcacagamgtggaaatagccttgattagaaattatgcagaatgaaagctgctattaaagggtcaagtttttacactccatgccaactatataaagtacatgtgaaaaaactcattttagagagtgacaaatgtctgtatcttaggaatcagaatttatatgtgccattacttgctactttaaagcaacctttaaagctagaattctgcctaggagagatataataaactctgaagcacataccgttatcccccccgctcccgcccgccaccgagctgacagcccggagctgacacccggacttctaaatatacactacactgttcacacataaaacagtgttcccagtgtttccacacatcaatctattggaatgaacaagccagaccaaccctgctaatgttaaagaggcatgcttccctgaca

SEQ ID NO: 703000 - DNA, 277 bp, Homo sapiens
aaaatagaaaggagattcaaaattgcagttgattgggctctgttagaacagttaagaagatgagcaagaaggggccgctggctggggccaatggcatactgtatgagatgccggagagaaagtgcagcccctcagcttccattcagmcgcttgcatccatgcctgggagactaatgtgcaatttgaagggaagaggaaggaaattaacatttattaaataactgcaatgttccctcactgaagtgctccacacattataggcattatttaatcttca

SEQ ID NO: 703001 - DNA, 743 bp, Homo sapiens
gagaccaggcaaacagccatttatactctgatcctaaggagaatccattcctccttatagatccccatagatgtggtaccacaaagactgcttttccttagatacaaatgaaggcctagataaagctgattaaaatggacaaagtatttaagactcttcttgtcgaaaaccaatcaattattaaagttatctttctctgagaatattatgatgctaaagactacccatttagtaaaaatgccttaaaatttgattattatggttgtttccagctatagctatatatctctctgtagagaagatagagaagactaaagaagagaaacacttgtcattctggcactgtaattggaatttgaaggactaggactcctgtacttggagccaagaatagtcttagtgtgtgaacttgtaattttttgtcttatccttagctggtatacttgagtgaaaatcttgttcaagtaatggactcagagttcttgccctgtgcaataggaactttccagttggcagagctctttaaggagagttatttactttccagatcccctgtcgttatcatgtgtttttgcctacaatgttcatcaaaaaarcaaaacaaacccacaaaacacttgcactattttataaagctataaagctgacagataggaaaagagaaaggcaaggtttagaaatgttctaacttagtgacaatcaaacttttatactcataaaccccctaaaagaatttttgaaaa

SEQ ID NO: 703002 - DNA, 636 bp, Homo sapiens
ttttttttgtttttttttttttttgagacggagtctcgctctgtggcccaggctggagtgcagtgatgcgatctctgctcactgcaagctccgcctcctaggttcacgccattctcctgcctcagcctcccgattagctgcaactacgggtgcccaccaccacatcggggtaattttttgtatttttcatagagacagggtttcaccgttttagccaggatggtctcgatctcctgacctcgtgatctgcccgcctcggcctcccaaagtgctggaattacaggcgtgagccacaacgcccggacccaaaatttcacctgtttttaaaacaccatgcatacaaaataaaacaggtcagctggccagattcagcctaaagccttctggtttggggtccttggttctaaagcctgctccaggaaattagttcaattatacargagagagagcatctccatagaggaccgagtagaaaaacattttcaaagtcagagtgaaggctgtggagttctgagggcaacagtagaattttcttcctttcagctagatcattaaaagcagaaaagacatcaattttttacaatcattatgggcagcttagcctggaggcagaaagctgaatcagacgggcttgac

SEQ ID NO: 703003 - DNA, 1709 bp, Homo sapiens
tgtagtcccagctacttgggaggttgaggcaggaaaatcgttttaccctgaaaggtggaggttccagtaacccaagatcgcccccctgcagtccagcctggtgaaaaagcaagtttttttttcaaaaaaaaaaaaaaaaaaaaaaaaaaaaaaaaaaaagagtattttccctaagaataccattgtaagattaatatcatgaatcatgaacttcaaacaactagcaggatgtatgaaataatgtggatgctctgctcccttattaaactaataacattattatgctaaccattcccctccttaaaaaaccacaatgactccctatgtatgaagacatacatatatacacacaattgcaatgaaaggtagtatatctttatatgttatacacacttacacagctttctatatcctggctacaacgacttctacattgctagtagaataaaatccaaattcctaaccctacattcaattcaaaaatgagaatcaatccatctatctctctagttgttcttccattctgcttcttctatactggatgcttcacccaaatcatacaacccactgagcctcaggctatctcttttctatggcttaatttttgctattttttttttcacctcgaagaacacttttcttgtgtcagagtgttaaaatcagccccatacttcaaggcctcttgcagattcctcctccctcataaactcagagttaatcactctgttgctgaatgatattcataaattatctaacatttctctggcttttgtcatttccctccttgcattgttgttaatgcatacacatacctgttcggtccttcagagcagctgctgtgttttatttaacttcctaccctcagaagcaagtatagtgaatggcaccagcgtatgtacccattaaatgtttgttgaattgaatagaactaaattaaattattagakcttgagcaattgtagggtacatctcatgccttttaatcttagtgttatccatctctaatgctgctaagcttctgtatccagaacctgtaagagagttgcaagggtcttatggacagctgcaatcttggaaggaacctggatgctcttcacttcaccagtggaccctgctgagtgaccctcctcccaatggagggctcaagatgccgcctttctgttctaatctattatgtactggggcagaaccacagacttatctgccatttcactctgagtgcaaagaaatgaccagagattcttgactggtgcagtaataacaagaatttcctagaggactaccctataaaaaatgtctggtttcttacctaaaacttcacaatccacttaagaaacaaaggtattttcttcttctcatgttacatttattcacagtctgagtttgctgggaggctggaatgattgccaagccttgtgcagctggagtgtcacacagtaacacgtgaagtttaccatttcaagaaagaagtggggatgacaaattctgttttttctgggggccaaataagaataagtggtcttttatttttagcaggagagaatttggttaaaagtaaggaagatctgtcagataacaaattgtttaagtatgcaaaaaacatacaaaatgagtaataaggtttctttattattgctagacaacgttaggatttatctattcatctacctgtatgattggctgcattatgaaaatgtggaaatagacca

SEQ ID NO: 703004 - DNA, 1746 bp, Homo sapiens
gaccagcgactaccgccggccacgatggggttcgtagactcgtcggtcctggcttgtgcacctgtagttactcctagtgaaagttgcaaagctcttaactttggaaagttcatttattttggcatttgaccaattaaggttggaggagggagttttagtggagccatttgcttttcctgaggtccctgggtctcccaggtcgtctcatccgttactggctactggaaaatgcattccttccaatgtttgcttgagatgtttctcacctggagaaatagttttctcgaatattctcccaacctaagtacttaccaaaacagcatattgtggttggattgttaaaaatgggatgagaaaatggcctttctcttgatattgctatgtataaatattggaaatgagctattgccttgcaaattatgatgtacgaattgaaaacaatttattatataaaaatccatttatccaaaagataaattaaagaattatttgatttataaagagtgtcacrctgagccagacttaaatagcatatccttgatatattcaagatggtcgtgtggggtgaagtcatctgctaaaattttaaagtttatatcagattttccctaccagaggcttttttttcctattgaaaaagaaaaaaatattgttttccattgccggtggttatattaactaagtttattgaatgatcattgatatattacttcaaagtggataattgggtagagaaatactgatcccagtggtttccagggaggtttaatgtccagcctatgtgcatctcattgctggatgtgatgtgctgaataaaccacagtcccttatctcacaagctggagtcccaggaagatgtcttaagtcggggaagttcgtccttaagcagcagaagcaagacaattattttgcatgctttgcccaaagcaagtattagtattgaaacatctcacttccttgcctgtgaccagaccacgagttctccttgttatcccacataagcagttgtctttggctttacaagagaagatggatgaggcctatctctgaatcacatctttttggccagttttctgcttctactccttttaatccgggagctggatcctgtgttctcagattctcttcagcccctacaccaggcaacccctgagaaagagtcactaagtaggcttcttacaagaggaaatctgattccttggcggaggaatagctagagataggagtcgaccttgctgctctgagttcctgatagcagtgctctgctttcttaaactaggacacaagggttttgaagtagccccatgcccctgtggctctttggtttttgttggaaagtagccagctcatgaggacaggggtgggggttttcgagtgcaaggtgagaggaaatgaggccaaagattacatccaaagtgcaccctctccttcaggacacttctcccttcatttccaaatctcccttcatttccctccttccttgccttgccgacattaattcttacatcagatgcatttgtcttcatccctctgaagcaagagtgtctttaatctcggaaccctaaaagctgagtagtagaaaagctgcaccacacaacgccgtgtgaataatgtccctgctgttgatagtgtgaaccagaacaaccatgcacagcagccctgagacatgggttcctagagagagtcatctcggtaaatggatgacttctttttctggaaaggaatccacctgaatgccatgtccca

SEQ ID NO: 703005 - DNA, 649 bp, Homo sapiens
tcaggaatttggtcaacaaagttgccggcacctccgggcaccgggaagcacggggcgggcggagggggacacacgcgtgcggggcggcgcgaggggccggggacggagggccggcktgtggggggccgcggagagcgcaggactgtgggggtcgcgggacaacgcgggtgggtgcgagcggcgggggcgggcacggctggcagccctcagggcgttaggaatccccgcccaagcggccaccactgcccactttcgccccccgcagggctggaggcgccttgctgggcctggagtgggacggggggtaactgagacgggaaggcggggatttccacctggcggccgtgcacctgctgggaggagacggctccggttcacggggcaaaggaggtgacgatgggcggtgggcctgtgaccccaggtccccgacaccagcgagccgggtgatgggagggttgcgccaggagttacaaggccggtgacccgaagtgggcctattgtttcttctcgaaattctctccattgctgttctatgacttcagcaatttaaaaaaaaaaaaaaaaagtctaaaatgtaaccacctgtgtagagaaaaaaagcctggaaggagttgcgcagaggccacagggaggcctggtcacggcgccg

SEQ ID NO: 703006 - DNA, 481 bp, Homo sapiens
tggctaactcagtacttggcatatatgtatatatatatatatgacatatacggcatatatgacatatactatatataaacaatatgtgcaaataaatgtttgaaaaaggtttgattttattagtttacaaaatgtatattaatttattcaatatagcacatatttttcagcatgtgctgggactcaatcttacttcttttgacattcctaggaaaatcaatactgtttttaaaaactctttgaaagcagtggacctcagagcagaagaaatcacatgatcacaaacacttgcaccaagcaccccctccttcattacaattccacatttgactactgcttratagtttcattcatgttcttctgccaccaaactgagagttccacaagggcagtgaatacatctatttttgttcactgttgtatcctcagtgcccatggttggtgttccataaatatttttggtataaaaactgaatgactc

SEQ ID NO: 703007 - DNA, 828 bp, Homo sapiens
tgacaacacaatatgcaatgttgtaatcttccatctttcagagggttaaaatgaccccacaaccacagattattaacagtatttttcttcaaaatatttcatacacgtctcctcacctggcttcacgaaagctgcatttaggtacttcctcttcaccaactgcttgatttaataggtgcctataaaatccactgagatctttctgcttggttacatccaaacatgctaacagagggaaagcaaaaattagaatatattcaataaggcacagtgcagtttcattttacagacatacagtatataacatacagtgtgtaaactactcgctggatcaggagttggcaaactgcaggccaaatctggcctgttgcctgttttcataaataaatttttattgaaacaaagccctgttcatttatgtattgtccacaactgcttttgtactacaaaggcagagytcagtaactgcgacagagatcatatacacaaaaagccctaaagtatgaatatgatctggcattcaaaatatgaatttataaatttaaagtcttaaaatatgaatactaaaatactatctggtcctttacagaaagtttgccgactggcactctaaacacatagtacatgcttagacagaatgttatagacttggttttcttctacttaaaagctgaagaggatgggcgcagtggctcacgcctgtaatcctacaactttgggaggctgaggtgggtagatcacctgagctcaggagttcgagaccaacctggccaacatggtaaaactccgtctctataaaaatataaaaattatccaggtgtggtggtg

SEQ ID NO: 703008 - DNA, 2717 bp, Homo sapiens
gaaataaatagtattgaagaataacatatacagaaaagtattaatatacagctcgtaagtgtacatctcaaagaaatgttataaattgagcacacctatgtagccaaaaccataccaggagacaaaaacatgaccagcacttcagaagcccctcttgtgccccctcccagccactatgcccaccatggttccccacccttctgactcctaacaccatggagtagtctgggcttcagtcactctggcagtgatagtgatgcataacatttatggagcgctaaatgccaggccagacttcaggctcaacttacactcacttttctataaatcctcacaatagttctatgaagtggttatagttctggcactcccattttacatttaaggagattgaggctgggtgcagtggctcatgcctgttatcccagcactttgggaggctgaggtggttggatcacctgaggtcaggagttcaagaccagcctggccaacatggtgaaaccccgtctctactaaaaatataaaaattagctgggcgtggtactaggtgctactcaggaggctgaggcaggagaattgcttgaacctgggaggcggaggttgcagtgagctgagatcgcgccattgcactccagcctgggcgatagagcaagactctgtctcaaaaaaaaaaaaaaaaaaaaaaaagaaaagaaaagaaaagaaaaaaggagattgaggcttagcaatgtaaagtgaagggtccaaagtcacataacaaaaagaactgttcaagaccagggaaggatctgctatgctcttcatgggggccctggatggggtactagtacttctgtgtttacaattttgtatgcatcttcttcaagatgatacaaagctctctaagcaaaaatccacgtcaaaagtagaatccatttattaccaaaggacctgggtgagaaagttgagtcccaagggttgtccacgtgttgagatgtgttcaatattcactttgtccttggttcacgtgcccctgtccaagatggataacagcctgctggcctgccaagtgtgtgctgaagtagcctggggtaaactgatgtcatgcacaccagcaggcactattcttcagttctttcatttatctgtaactttgttttttttgtgttttttttttttttttgtcttttagagccagaaatgttgttagattcttccttcagtccacctccagcctattaggagtatatgggctatcccattttgttttaggacatctctttggcatccagctgttctgtgtcccctttcaaaacagctgggtgcagtggttcacacctgtaatcccagcattttgggaggccgaggcaggtggatcccttgaggtcaggagttcaagaccagcctgggcaacatggcgaaaccctgtctttactaaaaatacaaaaattagcaggacgtgaacaagactcagtctaaacaaacaaacaaacaaacaaaaaacaaacatgaaaacagccctttttgtattctgtgttttgactttcttggggtaaccctttattttttgtacttcttttgtacccacacatcttgacattaacttatctatgatggacaacatgcttgttcttgtctctgtgacactgcatgtgtctctctgtaccccagaattcctctttgacttcctttcccccagaccctggaggtttccaaaatcaaagccagtgtttgcaccaagcagcacatgttcccaggctgcagtgactctggtgcaagctctgggctcctgagatgttggcctcggagctccttatgaccttatcagcttgctgatgcatttaggcacatttaaaatgcgtgtgtttttaaatccagaagttttagttgttttcagtgagagggttgttggaaatcgcctagcccatcctaccagaagcagaagccctgacataaatgggttattaatttatattattaccagtacttctcaataatctacttaaatatttttatttgtttttcaaaggaagaagagtcattggattaattccttgagggcagaaagatgtttgtttgtttgtttgtttacttccatatttattccccacgcagtaggaaatgatgtctaggggagacttgaaggcaagtgaaacattcactgtgggtataaaatttaagaaggcaccaaagagctcaggactcaggataaatattattttcacacaatattttttaaaaataaaaattaattcaaaaagatccatgattaacaaagtatcaacattttcaataaacacaggagccagccctgtacttgtacatcgtacttcactcgctttaccctcatctggccctgttagatcctgtcttttaaaaaattgtaataaaatattatttattttgattttggctcctgctgaaatgtygtgcctgaggtgagtgcctccatgtgccctggggcttggggctgttcgtttctgtcaatttcctgctgtcagactgggtacactcttgatgcacagtcattgagtttctttgcccaggaaaacccacgtgcagctttggatgtgggcgcactactcataattcccatgatgtttgccatactcacccctctacagccaagtgccctagtgcctgagagaagcaaatctgtcttccacttctacgttcacttaacagatcccctgctctgggcttcttaaggctgctttaggtaaacaacaagtagctta

SEQ ID NO: 703009 - DNA, 542 bp, Homo sapiens
cttaaggcatctcccaaagcctcaaatgcaagggcaaaagagtgagctgatcatttgggtgcaccagagcattcrgcttgggctgtgcataggttttcaaacttatcagacaactaccctgcctcctgcttgccactgggcatggatatcagacctgtgatgtctggagcaatacacaaattttaagtggcaattatggtgggaaatgtccatggtcacttttctaacagcaatgtgaaaagtattattttgaaaatcatcacaaaataaggatgttgcaacagtatcatagttttagatcaaaattattagctatctaacaatagcatgattttagctcaagccattggagtaaaaatgttttgccaggatagcaagattcatttcggtaatgaatgcgctgtagaaatgttaataacagtaccttacaatttgtatgaatgccattttcaaagcatctgcatgtcgattatcctattctgttatcaaagtaccttgggaggtaaatgggcaggcattattaccagacaaggacactgagg

SEQ ID NO: 703010 - DNA, 584 bp, Homo sapiens
atgggtttcaccatgttggccagtctggtctcaaactcctgatctcaggcgatccacccacctcagcctcccaaagtgctgggattacaggcatgagccaccgtgcccagtccttgcaaagctattctaaggaaataagggaaaaattaaaattttcccagatcaaaaaaaaaaaaaaaaaaaaagctaagggggctcatcatcactacacctgcgttacaggaatcatgaaagggagctatttaagctgaaaccaaaaaaagacacaaattcataacaaaaaacatataaaagtataaaacttgatggtataaataatacggtcatattcagaatattctactactgtaatggtagtacataaagcaattttatctctaayatgagtgttaaaagacaaaacttttttttattttattttattattattatactttaaattttagggtacatgtgcacaatgtgcaggttagttacatatgtatacatgtgccatgctggtgtgctgcacccagtaactcaaaagacaaaactattaaaacaactataactacaataaactaagggatacaaattacaaaaga

SEQ ID NO: 703011 - DNA, 584 bp, Homo sapiens
atgggtttcaccatgttggccagtctggtctcaaactcctgatctcaggcgatccacccacctcagcctcccaaagtgctgggattacaggcatgagccaccgtgcccagtccttgcaaagctattctaaggaaataagggaaaaattaaaattttcccagatcaaaaaaaaaaaaaaaaaaaaagctaagggggctcatcatcactacacctgcgttacaggaatcatgaaagggagctatttaagctgaaaccaaaaaaagacacaaattcataacaaaaaacatataaaagtataaaacttgatggtataaataatacggtcatattcagaatattctactactgtaatggtagtacataaagcaattttatctctaatatgagtgttaaaagacaaaacttttttttattttattttattattattatactttaarttttagggtacatgtgcacaatgtgcaggttagttacatatgtatacatgtgccatgctggtgtgctgcacccagtaactcaaaagacaaaactattaaaacaactataactacaataaactaagggatacaaattacaaaaga

SEQ ID NO: 703012 - DNA, 1041 bp, Homo sapiens
tgccaccttttctgtgtaggatattttagggaaactctcacaatggcatggatagacacccaacaaagatgtcatctgaaagtccagtatcttcatctgtgcttctaattaaatcgttgagtataatttggccaattttgcctctgattcctggcaactcttaatccaaacaagtactttattcattaccacccctcactcctaaatgactgccttgtcaattttttcaaaggaaagacaaagtctctcatgttctttcttatccttctcatatggaggaatggataaagaacatttacattaaagctaatttttcactattttcttacttgatcagaattaggtgtctttcctctrttctaaagtgtaatctgtccctgtgctactaatctcatgtccttcaaagggcttataaaccttaatccatcaattatctctttctccccagtatattcaaatattactccctgctttgtatttcttctcaacccatacatttatgcaagtctctctcacagttgtggtttttagttcatgaaggtagaccaagcagatgctacttattcttcatatgaactccaattccaaggagcacacttacaaaaaaaattccattgccacattgaaaaataagaagcaactctcttggtgaaccagaatctgtgaattcctaagagaacaaaagtatacagactagactgaagaaaaacacacaataataaaggacctgcaacagaagactgttctaaatggtggaaatttttgcacttcataaacaaatggcatatatgtaaataacacagatactctaatcttgaatttgtatccccccaaattacttaaggggcaagatggggggaacccagttgcccatttctgggacagcgaatgtataaatgtgcggggtgcatggcacagactttaggcagcatttaaaatcaactgatagaggtactgatagccacacggatagatctttaaaacttactgttaggaggagcaaagtttgtgcatgtaatttatgggtgtgtatgaacttca

SEQ ID NO: 703013 - DNA, 659 bp, Homo sapiens
taaaggtagtgcagacccaaagagtgagcagcagcaagatttattgtgaggagcaaaagaacaaagcttccacagtgtggaaggggacccaggtggattgctgttgctggctcgggtggccagcttttattcccttatttggccctgcccacgtcctgctgattggtccattttacagagtgctgattggtccattttacagagtgctgattggtgcgtttacaagcctttaactaracacagagtgctgattggtgcgtttttacagagtactgattggtgcgtttacaatcctttagctagacacagagcactgattggtgcatttttacagagtgctgattggttcatttacaatcctctagctagacacagagtgctgactggtgcatttttacagagtgctgattggtgcatttacaatcctctagctagacagaaaagttctccaagtccccactcgacccaggaagtctggctggcttcacctctcaacacgttttggtgagcaggtggttcacagagagaaactataaataatcaaaaacaagttttaaaagacataaaatttgaaacacaatcttttagtttatttatttatttacttagagacagtttctcactctgttgcctaggatgagggcagtggcacaatcaca

SEQ ID NO: 703014 - DNA, 2748 bp, Homo sapiens
tcagtactaaatcatttattattaattattatcaagtattgtatggcatgatagtggcaatactaataaatgttcacatttttaaattcatgtgctagtcaaggcacattaaatgtttatttcataatttattcctcataaactttatgaggtaggtatcatcatttattccaagattatagattaagatctgtgataaaatacagattaaaattacagaggcacagagaagtaaagaaaatttgttgtacctgttttatttacacagaggaaacagaacaaagaagtgactaagagcaaggcttcgaagatacatgtagctgagtataagaactggcttctgccacttataatccatttactattggtaagccatgtgaccactctgagtctcaatttccacatcagcaaaaaaggagataataagagtttgcatcctataaagttatcgtattaaatgagacaattaagttcttgctgtggtgtctcacacagagaaagcatacaataaatagtttatgatttttgtcatcattcacatttggagctttgtgttcagttatggatattacattttaatatggacaattaaaaattggagtgtcatcaggattcggtcagtgcaaggtctaaggaccatataatttgcatggggatcacaggaaagaattaagaatatttagaacataaatttcagaaaattatcttctggtgtttgagatgcagtcacaagagaaaatatgggatatgttatataactctagaccaacagcagtggagagaagtttcagaggaatctctcaaacaggcaaagttattaaaaaatgaagtagactgcctcatcagagtgtgagcttgcccaaagcttgatagttcaaaagcaggtcatacccttgtaaaagtgaatttcatattaagttagaggttggactaagtgaattctacaagtaaaatgagtttttaargaagaagctctttagtgtgcaaatgattcaaaccccaagcaatttatatagacaggtaatcacctgtttggaaagaatgcagaatattggaatctaggtcctttttatgtgcaagtatgagttcaggaccattatggcaatttttctagaagcaaagatgcatgaagggctcagtctgtttgagtccatctgttttacagaacgggttgaaaattactttttatatatctattttaaaaattttaattttgtctttccctaatgtactctaagcttcatttgggctaggtttgtgtccatcttgttcacatctccattcacagcatctggtaaagtacgtggcctatagaaatcacacaatcaacattatctgattgaatgatgggtagtagtatagtcaggatttgatcttttggatgtgagacaggccaggaggagaaaaagtaacaggttccatggtagtaccttctctgagcaaactatatacatatataaaaagagctcatatatatataaatctctatatatatatatatatatatatatatatcttttgggggtttgaaaatgacaatgagtttcatttttgatattttgtttatgaggtgtttgtaggacatccaggtagagacttctaagtagacagtattgcatgtacacgagcagcttatgttaaggatgtctggcagtcatcaatacccatgatacaggtagagccatggtagtagatgatctcacacagaagagattataggaactgggatggaaagaaggctgaatagacgactctggggaactaaccattcattcaattggcaggggaagacaacttcttgaaggaaactcagaaaaatgcagcagacaggtagcagaaaatatccaggagtgaaatcagaaacatcactgtaggaaagtttctagtatctggacaaagtataagaaattgaggcaagcttccaggtattttatcattacaacatcaaaaccacttacctgccaagaacttggagtcaaggctcatatccttagaatcttcacaacttgacctttgcttggataattccggtgaaatggagtttactatcatatcaggtaaacgatttgtgaccacaataaaatatatatacagaaaattaaataaaagttgacttattttatttcagtttttatttgggcttctatatataaagtcagaaacagtaatttattaaatgatatcccatccaaggagaagaaatatagggaatgaagtcctcattcaaagcaaatgtgccacaggggaaaacttccaaattgccgaattctgacttaataaaggtctgagatcgggccatcaataatgagttaaaccttgcccaagagaattaaaggaatgaaaatgcatttataagcaggagagagtatcagtcatagggactgaagagataacctactaaatgaaattaatgatgactctaaattggcttctctcctgaattcattttagcatctgccttgaacaaaggaaataaaacagcaatctggataattgtaaagtaataaagacatattttaaaagttgatagtgataataaccttatgtgttcttaaacatatacaacttggagctttgtagtcatgtagcagtaataagctgaagaataggcaaaatggataaaatttaccatagttgagaggtgttagaaagtaaccaattcacataaatatgaaccccacaagcctgttaaaatgtctcagattttatcatttaagactgtgctatccagtatggtggtcctagaca

SEQ ID NO: 703015 - DNA, 312 bp, Homo sapiens
cctggatgaacccacaacccagagtgagaacttctgttcctgtttacccactcttttctgatttattctttctgaataatgcctttcaaccaatagaatattgccgttttcaatatagcctgactatcccctattctgagcccataaaagccccagactcagccacattggggrgactttcccaccttcaggtagggggacaccccagcataccctctccatggaaaactatttcatcactctctgccttgctcactctccagctgtcagtgcatcctcattcttggatgctggacaaaagctcaggaccta

SEQ ID NO: 703016 - DNA, 1106 bp, Homo sapiens
cacctctggtcacctgttgcaccttttctggatgtggcatgtggtactcatcttgttctgtcttatgtcacagttacttgtgaataaagcatctctttagctctatcctaagacccctccaagagcagggactgtgtccaattcatcttttttttttttttttttttttgagacagagtcttgctctgtcgcccaggctggagggcagtggtgccatctcagctcactgtaacctccacctaatatgttcaagcgattcttctgcctcagcctcctgagtagctgggattacaggcacgtgccaccatgcccggctaattttttatatttttggtaaagatgaggtttcgccatgttggccaggctggtctcgaactcctgaactcaagtgatccgcccgcctctgcctcccaaagtgctgggattacaggtgtgagccacttagcccggcttccaattcatctttccattgtgcacaaggccttccccgtcagagccgtccccaaagttccagaatgcttcccctcaatagattccacagtctccggaagcagggctggggaagaaatggcaaactagggatcttacctgggccttcccagttgagactacgtcaaaatgggctcccatgagactgcctggctcatgcagatggaaggctaacatctttttagaaacaactcgtgctaccctctcctgttccaaaagcctgtctggtcagaatggtggtaagtcactttaggaagggagagacgtcgtcctgtttttcaggtagagttagcaaaggttcaatttaaaagaaaaattatctaagaagttaaaaatgaaagtgtgggggagattcccatgacatccatttttatctatttttccctttctcttacatttcycatgaggcaaactttctaaaacagtcttagtcttttcaagtttacaaaaggcagcgcccagactatctgaataaaatgacgggatgcccaggagaagagtgaacctctcccacgtgctccctgcctgggctccatgctgtcgcggggtctcggctactcactcagcgggcatttctggagttccaggaacacaaaccccaacaagatccaatcgac

SEQ ID NO: 703017 - DNA, 556 bp, Homo sapiens
tcaggctgagcatttactgggtgccaggattgtattaagtactgtaggtagttttctcagttaatcctcacaataaccctgtgcagtagacactcttaatattcccattttatagaaaaggacagtgaagtttagataaaattacagcatccaaggtcccagctggtcaatggcagagctagatttgaactcaggcagtttggctcaggaatctgcttacatgtctgtgtctacataaatagctcggcatagacaaatgattgctaaagagcatgctaataatgaatgcaaatggaacacatgattggcaagtgaagggtaattattactcaaccctcattctgcacaaatccacagcataatgcagcctctgctgggaagtgtaagagcaaatagctcacgcatatgtgtgaagtccaagtttagactatcttccaggaaaggtacaatggcaggcagaggtagtaactgcagggccctagctctgacaagagattactgttaacagcagaagcaaaccygactgaaactgttaagtcagctagtacagtaagtc

SEQ ID NO: 703018 - DNA, 604 bp, Homo sapiens
tataatatcactaccagtaagttattgtgataaactttatcttatttaaaagcatacctccccaagtgttaaaacacaaaatatatcaatcattctcatttaaatctaaggatctttaagtaattttgtgtgtgctgagaggcatgagataaagatttctgagaataaggctcagcctccagagggtgaatttgtgctgcacaaaaccataaaacaccctggagaaaggaaaatcaggatgtggagaaatgggtccagcacttggcagagggccattcctgaacaccaccaccaatggcatcgttcagcgtgtacttccacrtgcattctcacatctaaagcctcctcagttctaccagggaggtactaccactgctacagcaaggaaatcaagaatcagagattaaactgcttttcaaagccactttaactttggtggtttggtgagaccgcagaaattttcacttccaaacctgtgttttttgtaataccccaaaatttaaggaatctaggtcctggctaagggttgccataaggactagaacttgagtactggttcacctgtgcttccttggtccccagaggtgatctgcagcatgtgctg

SEQ ID NO: 703019 - DNA, 2900 bp, Homo sapiens
tgatatccatggttcatgagtactgactttacraaaggctggttgcaatagtggcaacatgctaagataaaactcctcccaggaaccagatattgctagccaagaattgttttttcaattgttaaattcacactctaggattctgttgacttcagctggactgaatccagattacatttcactaggtacatgagaattctgcacggaaatctaagtttatgcttgtggtgcttttatgctcctatggagtggccacctgaaaattgctgctctggtttatccttcaaccagctcttggtttccattacgctcactgagctaaagcttatgtttggaagttctcagacattttctctgtttaattgatttgatgagaatttttacttagactgctcatgtactgatgaatgcctgatgaagatagccacagtcaaaagccaacaaggcagcagtgattcccacactagatactaagtacctaagtgcatttagtagcctttgtggaaggagagtgatgaaaaaaaattgagtcctattttaaaagatttgtcttgctctactgacatcacggagctgccttgaatgttgaatatgtttgtacatataaaagtacctttgcaaacagaggtgctagttcatcattagtgtctggaacaataacttccaatggttatcctctctactttccattggtaggaatgaaaataccaatacttaggtaagtatcaggtatcacatgaaaatcaatatctgctttgactttttccaatcctttttcttttccacttattcctccctaagagaatactcaagaaagtaagttgtaaagtggaagttttacttagtctctacccagatggcataaatatttctaagtaatttttctttatagatagtagtcaaacaactgaaacattatcagagttattttaaaagctacccttctaccctaccccccaaaatatgttcttgaggctttgataaatagaagatggattttgtttttatttaaaatataaaacttcaaatttgcccaggacttctcatattgagctgggtggggggggcacttgaaacttaggaagttaataagaaaaaagttagacacaactgaatagtctcagttacttatccttagaaatttaaatcaaatcctataacctttttaaggtacaaccaattaaaaaagaccttagtgtgatacagaacattttgagggatgatttgcaaaagcttataacagtagatagaaagacagcatgctatttctaaacaaagcaatgtaaaagattctgatgtagaaatgtttgcaaaggagtaaagcaaaattgaaggtgagaaattgctatccaaagtgttctattgtgttttgtgtgattataatcactttggggagaatgagaaaaagaagcagagggacatactggaataagcaggaggaagaaggcaaaatcatttccttgaatgtgagctctattgttgaatacagaaagtccaacagaaggtaagaaatcatatgtagagctaagacaagggcataaatgagtagataagtggcagagaatggggctgagtttctaatatttttatatgcactgtgtggatagcttaacattgagaataatgtagggaagcattgttaactgtttagacaccataacttcagactcatgattcagtttgggcagaaaatagcaccaagcaggaagagataagggaagaaaggaaaaacaaaattaaaaaaaatatattgattagtacatcctgacacatcgttaagtactttacatgacttatctcatattgatgtcattcactatttttctccagttatgagtaatactattcttaatgaaacttaatatagaaaaaataaaaagtatttataatctcactaccttacatgtctgtaaaccacatagatttcatagaatttatgccataaaatacagcgttatacataatggttggtttttgtcttttttttcctgcttgccatggtccttgtcacattattacctactcatggaaaaactagtatttaatgacatcccttgattattaccttgtaagttccttggaagatgatatcagaattggtctcaaccctatatcaaatatctatatttatttttcgaaactttttcttcaaaatgcactataacaataaaaaaaaaaagcagagataatgctagcttctcctaacactttcctgtagagaaatttgtggatcaactaagaatgagccctcactgattacatggcaaaatgtatccatgtggatacaaacctgtctttgtggctaatgatgacaattttaaaaattataatttggatatctgtattttctctgtttactatttcataccaattgccttctggatataaaatatttaatcatacactcaatcataattaagcatttcaggatattgggtatgattatatacagtaataaaggggtgatgttaatatgatagtttttcgtgctgcctcagttatctggaaattatgacagccaagtcacattagcatgttattgctctctgaggttaatagcatgctatttaatgtgaaaaaccaataagataagctgggcctctttttcctaaggttaaaatgacaaagggcatggacttctatgtaaattttttttatatagaatctaattaactgtattgattaaaaatatagttatattttgaaataggtaaatatacacacacacacacacacacacacacacacagatagtattttctgctcctttaagcttctattgtagtaaaaggcagaacattgagagagaataaagccaggctagaatcaaccctaaccctaaccctaatatgtgtgcgtgcgtgtgtgtgtgtgcgcgtgtgtgtgtatttatctatcta

SEQ ID NO: 703020 - DNA, 2332 bp, Homo sapiens
aagaattaataaataaggtgctgactcacatgaattctcagtttgttctggaatcttaggagtcgaaggtgggggggtcaataacaccatacttcagccacataaatcagactttctcaatagcctgaaaaaccagttgttcctgccattgattgcgctggttccagaaacacctccaacagccctgaaggaaagacagccatgaaacagtcaccactgcacgtgccttctgctgaggctgagctggaattgattttgtttattccaaaatcaggcttggaaagtgagaatttggtcttccaggtgaaaacaggcaggcatcttggttttctgcagaacctcctatttttaaaattgggttgctcacaggggatggatgctttgacccgaacacacaatgtttttcaaaaacagaggccatgcctgcagtgttgcgcccgcccctccacatttaccaccacactcagcctcttcctagccgaccagggacgggtgagttccgggaactctgctgctcatgagtcaccctccaggggcctgacaactgctcctggatcctgatcagttttcttcaagagactggctttggtgtttagggctcacgctgcaatagcttgcaaaaataaaacttctctccttattacgagcagagtgagcaagcacatgagaacacaagaatcaaaccctgcccctctcctcctgcataacaggaaacattcatttctgagcccctaggtcaggctatcatttggcagctcaactattttagcaaaggcaagtttctcatcaccttttcccggcagggctgcttagctgggcaccttgggtttgtgccatggtccaggggcagtctggactttcctggccagaggacaaagctggattggcctaacaccacgagaatttttctagcctgctttgtgctctgctgagatctccaaaatatattaaccgtgtagatccttgggcagaaaattctctgttgagccacgctacatgtactttcctagaacagatcaaacttcagcaaaattaaatctgtgagcttttcagtatgattaatccctaggaggtggccctgccaagaatagccttgtctggaaacgtgtgagcctttttggctcaaccgagaaygaagaccacgctcacgcttcctggggctcctgtggtcactctgctagctccacagagcagtttggatgacccctttacctgcaataaaactccacgtaacagcccgcttgccaaacagaaacacactgtctggatggaattggaagaaatagatctgcagtgggagctccagagagctggattccacggacaagccttttttttttttgagacagagactcactctgttacccaggctggagcgcagtagcgtgatcttggctcacagcaacttctgtctcccaggttcaagcaattctcctgcctcagcctcccaagtagctgggattataggcaattacacccagctaatttttgttatgtttagtagagacggggtttctccatgttggccaggccggtcttgaactcctggcctcatctgatccacccacctcagcctcccaaagtgctgggattacaggcatgagtcactgtaccaggccctgtcatttttctctggacctctgtttccgcatctgtaaaccctaggggcacaagcacagcatctctcaagtcccttgcaagctggtggattttcaattccagctcaaaaatatatttaaaagaatttttttcaatgaattgccaacatttcaaagtccagatggctctcatgagaattgggaagttttacattaagattccaatttctacatgatcttgggaaattggcagatctggccccatgggctagcattctcaacaggaggcaggaaccaggatgggccatgagttcctgggaaacagaatgcatggcccaagccattgctctcattttcatgatgggctggccctgtgagcctcaagtttgaggctcccattctgaggtccggctcctccccacccctgccctttaacatattgcttaaactttttcacttttcatttcagctgaacgctcaagaatgaactatgaaatcaaaattttttatttaaaaaaaatagtaccaaaaaatctgttaagtggagatccaccaacttggggcctatcccccagcctgcctgcaattctgacactgctcatgcaaggaacctagagctacttctaaagttccccggaccctctgacctctatgggctgtctcgcacaacccgccaccccttatcccagtccctcagcccctcagccaagaatccatgtttgggacccatgaca

SEQ ID NO: 703021 - DNA, 650 bp, Homo sapiens
aggataatcattattatataagactaagactgatgatggctgggcgcggtggctcacgcctgtaatcccagcactttgggaggctgaggcgggtggatcactaggtcaggagatcaagaccatcgtggataaatggtgaaaccccatctctactaaaaatacaaaaaaaaaaattagacaggcgtggtggcaggcacctgtggtcccagctactcaggaggctgaggcaagagaatggcatgaacctgggaggtggagcttgcagtgagccgagatcataccactgcactccaacctggacaacagagcgagactccgtctcaaaaaaaaaaaaaaataytgatggatgagtggatgagtgaaaggattggggaagagaaggcatttatgtgcctcttcagttctactagtgtcaaattgctttccatcattatggtagagaagttcgtgttgcttcacatccctgccaacacttggtattgtctgacttcttagttttccaatatagtgaatatgaagcggtatctcactgtggcttaaatttgcttcaccctgactatgaagttaagtatatatttatgtatattggccattttttagtttcttccttgtgtgtaaagtgcctgctccaactttttgcccatttctct

SEQ ID NO: 703022 - DNA, 921 bp, Homo sapiens
tgaatacttgtgtactttttactggagaagaccctcaagttgcaaagaacttaggagatgtagaagatagggagatttggctgtagaaacagcttgttgccaagtacttgccattggctttcctataatatctggagctactgcttcaaattatcacctgtaaggtgatgcaaaaatgtacatgttaatttttcgattcatactggttcagatatactgtagcttaatggacatttggatgccattgcttgaaaygagatttcatgtgatgataccaaggtttccaaaggagatactaaggtgggattggtatctgaaaagaaagtattttataaaagtaagtacatgtatgtttttaacctctaagactcatctgttttactaatcagaggctggtagccagatgtattctacatttaggaaaacagtaaagaattttaaaatgtgagacacatcagttagacacaaagacgacttttctaacaagaaaattacccaagctataaatttatctgtgcaggatgcttgaaatggagtaaggaggggatctgatggttgtaaaaataccaaatctagggaaataacatcaggatgcatttagaaaataccatggacaaactgctgaggtcccaactagaacccaacacatccatacatagaaactgacagctgtggcagtgccatctacagatctccatctctgaagtagacgtactttcctcagaaacacgttaatttgaacaccattcattcctgaaactcacatttcttcttaactgccataatacctgcattttagataagttgccttcccttctccaagccctagaggagactataaatttgaaataaattaagacagacaggagttgcctaaatgaaaaaaagacttttttttatccaacctaaatcagggcttga

SEQ ID NO: 703023 - DNA, 921 bp, Homo sapiens
tgaatacttgtgtactttttactggagaagaccctcaagttgcaaagaacttaggagatgtagaagatagggagatttggctgtagaaacagcttgttgccaagtacttgccattggctttcctataatatctggagctactgcttcaaattatcacctgtaaggtgatgcaaaaatgtacatgttaatttttcgattcatactggttcagatatactgtagcttaatggacatttggatgccattgcttgaaatgagatttcatgtgatgataccaaggtttccaaaggagatactaaggtgggattggtatctgaaaagaaagtattttataaaagtaagtacatgtatgtttttaacctctaagactcatctgttttactaatcagaggctggtagccagatgtattctacatttaggaaaacagtaaagaattttaaaatgtgagacacatcagttagacacaaagacgacttttctaacaagraaattacccaagctataaatttatctgtgcaggatgcttgaaatggagtaaggaggggatctgatggttgtaaaaataccaaatctagggaaataacatcaggatgcatttagaaaataccatggacaaactgctgaggtcccaactagaacccaacacatccatacatagaaactgacagctgtggcagtgccatctacagatctccatctctgaagtagacgtactttcctcagaaacacgttaatttgaacaccattcattcctgaaactcacatttcttcttaactgccataatacctgcattttagataagttgccttcccttctccaagccctagaggagactataaatttgaaataaattaagacagacaggagttgcctaaatgaaaaaaagacttttttttatccaacctaaatcagggcttga

SEQ ID NO: 703024 - DNA, 2048 bp, Homo sapiens
aagtgattcccatgtgttgtagcttcatttttcctccaagaacttctttcagtgacattccgtcagccaagaagggaactggtctcactaaataagctcagtaaattcttgctgaatgagtgaatgactgaaagatagacagatgggtcgtcagtgaaatttacctcccaaatggaaagctcgccagctttgtgttagttctcaggaccaactggaaaagacagctacaagtacctcctaggaagagcaacagcaatgttattccggcccaaattgaacccggaaggaatggttccatgccctcagcataattgtctgtcttgtctcaggagaccttatgctaaaggatctctttaaggtcccttagtgtcatgtcatatttgcagcagggatgtttgccttcagactaactgattggatttttgccataattgcacctaagtcccaggggaccagccagagccttaggtgaataatttaagcatttaatttataataaagtttgcaatcagcatttcttgttccaaaacattccatttacttggttttaaagctgcataaactgttttaaaggcaatctgctcaattgggcaagttaatgatattgaatttgaccgggccaaacgtcactgggtgcatcccgtctataatcacagccatcatcaccactgttttgtgtaatgtagatgcaatgctaatcctgagaataaaagttgtcattctcggttggctgacggcgtgcaccggagtcatcatctcgctaagagtctcagtgatgtgattccaagatgacagtgtaataagtgttatgtgcacaaggtaattcaaaacaaatttggctgcaaaaatggatcgtctaggatagtaaactcccgccttgtctcatcatcttttaagagaatgtaatgatccctaaaataccttgtcaagaagctcatgtggcaggggtcaagtcctgtaaaatttttctgttgcacccccccccctcctccaagaatcccaactcgagggctgaaaatatccatgtgcatattggtaccccagcaacacacaagatgggcagggagcttctgggaagtcaagaagccttacggcatacaaatgtctcttaagaacacctcactaggctgggttttgcttctttgatttatagattgtttcctcctgggaaaatgtgtctcttctactacaggatccccacgagcactggagtcttagtaaattcttattattggcatttaggcattaccagtaagttatctcatctaaactttatattaccctaaaaagcatgatgctatatttattttgcagatgagaaaactggaactgagaacagttaaattgcccaaagcccacagccaggattccaacgctggcttcatcccacaattgctgtccctgcacactccacctctgagctgtgaaaaaggaggaggtcatctggcttgtggaggggcttatttgaactgtatttgattgaaaactgcatgggctactaaaattgttttcttgggcacagttgtcagaaatgcgtttctgtggaacccagctgtaggcaggggggacattcttgtgtgggatgacagggcatttctcagtcaccccaaagtcccagttctccctttggggttgctactgctcttccctctgtaacctgggcagtatggatgctgttgtatcaatgccgtgtaacagtacccaaagctggacagattcagaacagctttcctgctttttgtaattgagtatgcctcaacacagaggagctctttgtagccaagaatgcttttagctttagactgatccaagcgggtccttcatgcatcattttcttggtaccatttaaacatccactcartggtactagcatttggtttataaaaatgtatccaagtaaagcaatagttgccatcaccttgctataaaaatgaactaagatgtaatcctaatcagagaaggattttcactaattattttacccacatagaagaatgtctctaggaatgaatgagaaaacatttgtgcctaattttacaatatatcta

SEQ ID NO: 703025 - DNA, 1292 bp, Homo sapiens
ttatttactggtgcactcaagtcattttgtgacccagagttcttttctgccgaactccctcgtgatgtaaataaattacttaagtggattgaatccaaatcattaataacctccactggcatgattcatttgggcttcattacaaggaaagaattcaacatctatttctcaacccaacagttgtttacaaygcacttcagcctaagagttgttgtccctacagggccagagtgaaagggtttgggggaaaaaaagagaaaaacagctttacaaccaatacttatgttctgcctggacatagggaaactgaagtgctctgaggatagacctaattgtcagcatgctttgaagtccaagatactaagggaggaaaatgtatatatgccaaataggaaaaggctgtggttcagtgttcattttgacatttataaatacatgctaaaaacatgcacattgcaagagtggactattaatctaagagatttaaactcaggaattgctatgaggagtgacttgaatgggtcagtgttctccagaataactttgggaagctgagcaacttctgcaggcatgtgtcctatggaatatgattcctataccctcctttacatttgctttttaaaaaccaccaaaccaaacccttgggggaatactatattttttaaattattgtggagcctgatccattttatgcagtccaatcataagatgtacccaaccttttggcatataccactgaaacatagttcctttgttttatgggggagggaaaagagaggataaattaaatcactggacttcattctaacttggaacgactttgatttttagaaataagactctgatttctatttcatcttatgtcagctgttctaaagaagctgggttgagtgagttttgattgtaccatttgggagaatcctggacaccgcgtccaacgttctgacccagcataaactagtaaggtcctctcatgaggtttgaggctctagggagggagatgatcttactttcagtcctgccaacttcacaggactatgatgagagaactgttgagaggtatcttcatttaagtcatgcagcagacagtagtcactcaataagtgcaggctttgaggatgcagtaatagcaaagcactgcacacagtgggaaccaaaacagcaattaagccagcggtcacttcccccaaacgctggccatttgaattccttctccataataacttgccatatgccgctatggcctgaactgtcatttacttaatattttcaatggactttttaaagagcga

SEQ ID NO: 703026 - DNA, 600 bp, Homo sapiens
aaggcaatattaagtctaggtgacattctgggatcaacagaatgtgaagtatgtttgcatttggtagggagcatccagttcatctttgaaccacagaaaatcattagaaatgcgtatatatatggaggaagccctttttcatgccacttacaaatggaattcgctttccccactgtgatttttgatgtggtatgtagacaaacgctaaaagaaactttaaaaggctagatcaagatcagatgacatgcctaaytgacagttcctgtatatgatccaaaagccattgataaaccaataaaccctacaaagtgtctaaaattatttttaaactttttcaatttagttatactgaatatggtcctggttagtgataaaattagtaagcctatagcctacctgctcatcctatggagtaacagatggagagactcggacctgcagcttgttgaaaagaaagttaatttagaactttgaggagacactcaaaagccaattggatgaatttggttatcacaggttattgctttttgtaaattagattgacttttctttgggtccattctactttaactgtatctgaagagttaagcccgggtgagc

SEQ ID NO: 703027 - DNA, 600 bp, Homo sapiens
aaggcaatattaagtctaggtgacattctgggatcaacagaatgtgaagtatgtttgcatttggtagggagcatccagttcatctttgaaccacagaaaatcattagaaatgcgtatatatatggaggaagccctttttcatgccacttacaaatggaattcgctttccccactgtgatttttgatgtggtatgtagacaaacgctaaaagaaactttaaaaggctagatcaagatcagatgacatgcctaactgacagttcctgtatatgatccaaaagccattgataaaccaataaaccctacaaagtgtctaaaattatttttaaactttttcaatttagttatactgaatatggtcctggttagtgataaaattagtaagcytatagcctacctgctcatcctatggagtaacagatggagagactcggacctgcagcttgttgaaaagaaagttaatttagaactttgaggagacactcaaaagccaattggatgaatttggttatcacaggttattgctttttgtaaattagattgacttttctttgggtccattctactttaactgtatctgaagagttaagcccgggtgagc

SEQ ID NO: 703028 - DNA, 600 bp, Homo sapiens
aaggcaatattaagtctaggtgacattctgggatcaacagaatgtgaagtatgtttgcatttggtagggagcatccagttcatctttgaaccacagaaaatcattagaaatgcgtatatatatggaggaagccctttttcatgccacttacaaatggaattcgctttccccactgtgatttttgatgtggtatgtagacaaacgctaaaagaaactttaaaaggctagatcaagatcagatgacatgcctaactgacagttcctgtatatgatccaaaagccattgataaaccaataaaccctacaaagtgtctaaaattatttttaaactttttcaatttagttatactgaatatggtcctggttagtgataaaattagtaagcctatagcctacctgctcatcctatggagtaacagatggagagactcggacctgcagcttgttgaaaagaaagttaatttagaackttgaggagacactcaaaagccaattggatgaatttggttatcacaggttattgctttttgtaaattagattgacttttctttgggtccattctactttaactgtatctgaagagttaagcccgggtgagc

SEQ ID NO: 703029 - DNA, 1115 bp, Homo sapiens
ttttttttttttttttgagactgagtttcgctcttgttgcccaggctggagtgcagtggcgcaatctcggctcaccacaacctctgcctcccaggttcaagcgattctcctgcctcggcctcctgagtagctgggagtacaggcatgtgccaccacgcctggctaaattttgtatttttagtagagacggggttttccatgttggtcaggctggtcttgaactcccgacctcaggtgatccgcccacctcagcctcccaaagtgctgggattacaggcgtgagccaccgcacctggcccattgtaattctgatgtaacgctgttttatatgcttccatatcttggtaataaggcataatcaatataactttcttgatgaccccaggtcaagattctgggcctttgtggtgacattctgaatgccactagactactgtgtcaaagagtgattcattcacacattcacatttcttaactcaaaaaaaaaaaaaacaaagaaaaacactgggggtgctacagggtgacaaatattatcagcatcttctaggagaatgagcactggtctcatgttcaatgggcaaaaaaaaagaaaagaaaagaaaatggacttaaaataatgcaaattagttttttgtttttagccggagtcacgctctgttgcccaggctggagtgcagtggcgcgatcccagctcactgcaacttccacctcccaggttcgagggattctcctgcctcagccttccgagtagctgggactacaggcgcatgtggccaggcccagctaattttttgtatttttagtagagayggggtttcagcatgttggccaggctggtctcgaactcctgagctcaggtgatccacccacctcggcctcccaaagtgctgggattacaggcatgagctaccatgcccagtcctgtatcttttttttttttttgaggcagtctcactttgttacccaggctggagtgcagtgatgtgatcttggttcactgcaacctctgtctcccgggttcacgtgattctcctgcctcagcctcctgagtagccaggactacaggtgtgcaccaccacacccagctaatttttgtatttttagtagagatggga

SEQ ID NO: 703030 - DNA, 1794 bp, Homo sapiens
gctctgcctcaccttggggyttgacttttgtataggtagatgttcagattgctttgattaatccagaataactagcaccagggactatgaatgggcaaaactgaattataagaggctgataattccagtggtccatggaatgcttgaaaaatgtgcaaaacagcgtttaagactgtaatgaatctaagcagcatttctgaagtggactctttggtggctttgcattttaaaaatgaaattttccaatgtctgccacacaaacgtatgtaaatgtatatacccacacacatacacacatatgtcatatattactagcatatgagtttcatagctaagaaataaaactgttaaagtctccaaactacttttacacttcggcacattctatttcaatgtggtatgcctggaatatacaaaaaagttacttttgggctcagagcccgggaaataagtcgtaaactttcatggcattgctctatcacggaaatggaatacaccagtgataatgaccctgctctttcactgtggtttctaacctcctgtccaaagtgtggggcacatttgtttaacttccagaatgtggtcacaggatgaggcatagttttaaatgtcagattttatgcatgtttattaaatcctggcagtctgttcaataggcttaaagatgttttttgggcttatgtatcccaaaatcactcaccaaaatacggagaaccaactgacaacagctaagtagaatgcgcagagaagtaggccagaactgacttaacagtgtggttttggggctgaatagacgagagctgaatccctgccactcaccagtttgtaagaccttgggcgaatctcttagcctctgagcacctgtttcctttctttttggtgaaacatggatcataacagcaccacctctatgggttggtgtgaatacctgagacactgcatgtaaaacacttggcacagtttgcatttggggagaaaaggtccaaaaaatagcactagttattatttcttacaagaactggtgacacaaaatggaagccctccatgtcagctccgtgggttagcgaggcgagggagggtttgtatcgtgccttccaggtgtgtggcataccatgtgcacctggtgcagctgagcacaggctgggcctttcagagcccacatgatcctacctactgtttcataaacatgcctaaatgcgtctacaagcagagttttactgtactcaggccacatggacctccgagtgcttcctccaactacaaaatctgcccttttagggtgacaaggctgacatttatcttttaagtggctttcaaagagagtttctgtcattccccctttgtgcattcatgttaacctggaacacttctgacagaggggccaccagtccctggtatccctgacagtgtcccggcccaagggacagaggcagaagtagagtcaggagacagggccctgcagcatttccacgagtccccatggagagatgcagaaaggtgtgatgagaatgcaggctctgggctcactctgacagtgttcagtgacagctccaccaccatgtacccctgtgcaggggatgcagtacccctgacccaagccctggttcaccacctacaccactggctcatgaaggccttccctcctggggtgctcatgagcacggccagcacactgcaagcaccatgcttgggcctgcctggccacagcaacagaaaagcagcgctgggaccatggggctttccctgaccaggtgcccgccccctcccagggtccctgcactggccttttgtagc

SEQ ID NO: 703031 - DNA, 1794 bp, Homo sapiens
gctctgcctcaccttggggcttgacttttgtataggtagatgttcagattgctttgattaatccagaataactagcaccagggactatgaatgggcaaaactgaattataagaggctgataattccagtggtccatggaatgcttgaaaaatgtgcaaaacagcgtttaagactgtaatgaatctaagcagcatttctgaagtggactctttggtggctttgcattttaaaaatgaaattttccaatgtctgccacacaaacgtatgtaaatgtatatacccacacacatacacacatatgtcatatattactagcatatgagtttcatagctaagaaataaaactgttaaagtctccaaactacttttacacttcggcacattctatttcaatgtggtatgcctggaatatacaaaaaagttacttttgggctcagagcccgggaaataagtcgtaaactttcatggcattgctctatcacggaaatggaatacaccagtgataatgaccctgctctttcactgtggtttctaacctcctgtccaaagtgtggggcacatttgtttaacttccagaatgtggtcacaggatgaggcatagttttaaatgtcagattttatgcatgtttattaaatcctggcagtctgttcaataggcttaaagatgttttttgggcttatgtatcccaaaatcactcaccaaaatacggagaaccaactgacaacagctaagtrgaatgcgcagagaagtaggccagaactgacttaacagtgtggttttggggctgaatagacgagagctgaatccctgccactcaccagtttgtaagaccttgggcgaatctcttagcctctgagcacctgtttcctttctttttggtgaaacatggatcataacagcaccacctctatgggttggtgtgaatacctgagacactgcatgtaaaacacttggcacagtttgcatttggggagaaaaggtccaaaaaatagcactagttattatttcttacaagaactggtgacacaaaatggaagccctccatgtcagctccgtgggttagcgaggcgagggagggtttgtatcgtgccttccaggtgtgtggcataccatgtgcacctggtgcagctgagcacaggctgggcctttcagagcccacatgatcctacctactgtttcataaacatgcctaaatgcgtctacaagcagagttttactgtactcaggccacatggacctccgagtgcttcctccaactacaaaatctgcccttttagggtgacaaggctgacatttatcttttaagtggctttcaaagagagtttctgtcattccccctttgtgcattcatgttaacctggaacacttctgacagaggggccaccagtccctggtatccctgacagtgtcccggcccaagggacagaggcagaagtagagtcaggagacagggccctgcagcatttccacgagtccccatggagagatgcagaaaggtgtgatgagaatgcaggctctgggctcactctgacagtgttcagtgacagctccaccaccatgtacccctgtgcaggggatgcagtacccctgacccaagccctggttcaccacctacaccactggctcatgaaggccttccctcctggggtgctcatgagcacggccagcacactgcaagcaccatgcttgggcctgcctggccacagcaacagaaaagcagcgctgggaccatggggctttccctgaccaggtgcccgccccctcccagggtccctgcactggccttttgtagc

SEQ ID NO: 703032 - DNA, 595 bp, Homo sapiens
gatgtaagtataaatgtttgtcagtgaactgcctacaattatccgatatagcattatatgtgtacataacacattcttcaaaacactaagttgaaggaaaaaggaaagttcttcctcagtggacaaaaatacatctagaagagcagagaggtttcacacagttgtcaggttttggatcatgacttttcattccatttttattaagtgtgtgatgcaagaaggttacagctctaacgacccctgaaattgaacaaccaacatgtaaagagcactatcaaaatgaattagtttatttgaatgcacttcataaattacaaaasaacttagaacactgaaaagcttcagagcttcacagcaagccataactatgggacgagccaaaacttccataagtttataaattattaaggaagaatatacaatttttaaaagtttagataaagagggaagataaggccaggggtggtggctcatgcctgtaatcccagcactttgggagaccaaggcgggcagatcgcttgagcccaggagttcgagatggtgaaaccccatctctactaaaaaatatgaaaattagtaggatgtgttggcacac

SEQ ID NO: 703033 - DNA, 1380 bp, Homo sapiens
gtctaatttttttgtatttttagtagagacaggttggccaggctggtctcaaactcctgacctcaagtgatttgcytgtctcagcctcccaaagtgctgggatcaactccttgccatttgaccagaaataataatattcctggattgtattttctaaactttctcctgggtttctttgttttattcacaatatagttgatgctgagcaaatgttacttactccattcagcattttcaactaaaagatacagacgctttttgccaaaaggtttcctgggtttttgcctgggttagagcttttggaaccattacatttcttatcattcatgtaattttgtgtacaatattttatgcaacttgttagaatgtttccattctctccacctcccccaccccagggcaatatctttcatagcataatgtagtacattgctcaaaattttcttgagatgaatttaacatctaaaagtgtgttttgtattttaagattaagtcattttagcttgaaaatttttgctttcctagtaggggtaaaagagatagctatgttgctttttaattgttttctatgaattttcaacatcctgctttggacaataagtccctttgtctaaggaatccatttggaggaattttttttttaccagactcggcatcattaatattaatacaaagccacctcattcattgaagatgcattatttcagagatgaagaagaaatacagctcaaggttctgggttgtttttctttttcttttgatgactttggtaccaaaggcttctgtttttaataatcatatttaatgtagcaaataatttgtaacattttccttatttttagcatgattcttcactatgtttttctcttgagtatcaagaagatttctgcttccaatgcctactcaaaatggaaacctgcacacttgcctaagagaaaatatagtctagtccttctctttctatatggatttaaggggtattaatatgtatttttatatttatgagagcccagaaaaaatccaacacactgctctaggataattcttggatagatttatgatccttgtcttaaaagattatagattctcaggggtcacctgcgaactcttgtctcaatacttctctggaagctttcccagtgcattgtgttacatcttctcatcctttgaaacacatattgagacattaaaagactcagttttaatatctattttcttaacatgtaaagtgaaactcagttgagaactatgtggtatcttaattacattattttgcctaagactcatctacacaaattcatgctctagttaacaaaatatttagccaatttttcattattttgcctaacaaaaaaaaaataagaatgactcaatattttt

SEQ ID NO: 703034 - DNA, 891 bp, Homo sapiens
gtttttagagatgaggtcttgctatgttgcycaggctgaattcaaactcctatgctcaaatgatcctcctgccttagcatactgagtagctgggactataggaatgcactaccatgcctgactatatttaaatattaataagcatatcctagatcaaatggcagactactccataactgagcactgctagtcaattattgggtctgcacctatattgggtttagagtcaaatgaatgacaaatggtggaaacttcctggttgctggctaataagaaaagcacagagaagacttataaatactgtattcatgctatgtattccaaaaaggtgtgaaggtttcaatgctgttcactatgaggaaaatggcgggagagctgagtgatcacacagcacatggaacctgtattatgctaaactcacaataccatgtttaagtttcagaaaaacatcttccatcatagtacataatgttgctaattcaaatttcacaggttttatattaagcattgaggtagactattaacactggtgggccccaacagagtgttcaaacccttatgtagtcccctcccacactgacaatgagcttggccatgggatttgcttgaacaataagatattaggagatgcaatgcaagcagaggcccaattagcacttgcatactgttggcttgtcctcttagaacatttgctttttgagtcagccaccgtgctgtaaagaagcccaagctatccacatggacagagagagaaagaagttctggccttgcaggcatctctgctatagtgccagaaatgtgaataatccaacttggaggtgccagccccagttaccacctcactacagtatgacagacccaacagtgaccaccagcagaagaaccatccag

SEQ ID NO: 703035 - DNA, 1351 bp, Homo sapiens
tgactgacacttccctggtgatgtccagaattgttctgcttctctgccctctcctgagccttcaccgccaaagaatcggatctggaggggccctggcatggcttcttccaactctccctgtgcctacgaggaggctggggctaagagctgagagactgcccgaggtcacgtgtgaagtctagatgagatcaagactaccgtctgggtttcccaaatccctgtgaggtgtcctctccagcctctcctgaggtggtgtccaccatgtgtgggctgggttttcttgccttttttctaagcgataatccttaaagatgacgagacgtaggtacctttacccatctttactttttcattcaactttagtacttagtcaaggtcacagatgaaaaagaaagttgacatcattctttattatcctgttcaaaaactttggcgtgcctgtttgggtctccctgccttggggaagaaaggccatgaagaactgtcacccatattaccaaatagactaaaacatgatagaatcactgtaagactgacctacactttttaaaagtcatggatattcactagtttcctagattataagttacaatgataacattgatcgacctcttgtcatgtgctagccactatactaaacacatctgccttatctcagttcagcctcagagatagataccactattgtcattaactattttatacgcaaggaagagaaaacataggctctgagagctacagaatttgcccggggttacatagttaattacaaggsaacctggctttcaaacccagacagtccgatcctagagtcctagctcttcaccactgcattatcagtgaacagatggacaccatttgagtgttttgaggtccacctacaggttgaacctgtaagtttcctttatgttacacgattatgtaaacaatagtgggcattagccctgagagcactaaatgtatcaaaacttaaacatctagtcttcagctcattgctgatttttcacacagttgagaacactctccaatagacgccaagtgcatttacaaagtgtgattgtcccaaggtcatccaaaacctgtagttttggtcagttcccacacagaggaatcagactagtgagtagcaagtggttggttcacttgtctgggtccagtgcccccaagaagtgcctgttcaagaactatcatggccggatatggtggctcatgcctgtaatcccagcactttgggaggccgaggcgggtggatcacctgaggtcaggagttcgagaccagcctggccaacatggagaaaccccgtctctactaaaaatacaaaaattagcctgacgtggtgccacactccta

SEQ ID NO: 703036 - DNA, 1351 bp, Homo sapiens
tgactgacacttccctggtgatgtccagaattgttctgcttctctgccctctcctgagccttcaccgccaaagaatcggatctggaggggccctggcatggcttcttccaactctccctgtgcctacgaggaggctggggctaagagctgagagactgcccgaggtcacgtgtgaagtctagatgagatcaagactaccgtctgggtttcccaaatccctgtgaggtgtcctctccagcctctcctgaggtggtgtccaccatgtgtgggctgggttttcttgccttttttctaagcgataatccttaaagatgacgagacgtaggtacctttacccatctttactttttcattcaactttagtacttagtcaaggtcacagatgaaaaagaaagttgacatcattctttattatcctgttcaaaaactttggcgtgcctgtttgggtctccctgccttggggaagaaaggccatgaagaactgtcacccatattaccaaatagactaaaacatgatagaatcactgtaagactgacctacactttttaaaagtcatggatattcactagtttcctagattataagttacaatgataacattgatcgacctcttgtcatgtgctagccactatactaaacacatctgccttatctcagttcagcctcagagatagataccactattgtcattaactattttatacgcaaggaagagaaaacataggctctgagagctacagaatttgcccggggttacatagttaattacaaggcaacctggctttcaaacccagacagtccgatcctagagtcctagctcttcaccactgcattatcagtgaacagatggacaccatttgagtgttttgaggtccacctacaggttgaacctgtaagtttcctttatgttacacgattatgtaaacaatagtgggcattagccctgagagcactaaatgtatcaaaacttaaacatctagtcttcagctcattgctgatttttcacacagttgagaacactctccaatagacgccaagtgcatttacaaagtgtgattgtcccaaggtcatccaaaacctgtagttttggtcagttcccacacagaggaatcagactagtgartagcaagtggttggttcacttgtctgggtccagtgcccccaagaagtgcctgttcaagaactatcatggccggatatggtggctcatgcctgtaatcccagcactttgggaggccgaggcgggtggatcacctgaggtcaggagttcgagaccagcctggccaacatggagaaaccccgtctctactaaaaatacaaaaattagcctgacgtggtgccacactccta

SEQ ID NO: 703037 - DNA, 634 bp, Homo sapiens
ccatcagccacacactgtgattgagagacagcttttgttgttgatattgttaaagcattaattgactcaagagcaatcacagccatgtatataaatgaaactaaatagtggttctgcccattgtctacctgatcagagcactgtaaccagctggcctccaaataatgaccaagtaaacttttcatgtccttttttcttttctgtggtggctttctatttaggtgaaatataaaagaaaaagaaaaactgtaatggctgatgamcattataatttataattttaaaaaaatggaaaaacgttcataattacattacctagccacaagagccactgtttttgtttgttatttggggtggttttttagagacagatattactctgttgctcaggctggaatgtagtggtgcaatctcagctcactgcagcctcaacctcctgggctcaagagatcctcctgcctcagcttcccgagtagctgggaccataggcaccacacccggctagttttcttttattttttatttttgtagagacagagtcttgctatgtttcccaggcgggtctcagactcctgggctcaagcaatcctcttgccttggcctcccaaagtgctgggattacaggtgtgtgcca

SEQ ID NO: 703038 - DNA, 620 bp, Homo sapiens
attgtaattaaatgtatttaaacacacataaaaatactttaggagatgtgttcagaattcctttgagagagtgaccaaaactttttttctcttttgttgaattatttgaagtttttgcaacaaatgtactttacttttgtaacttaaaactttgaatcaaaaatttagtgggggaagtggatgcttattaatggatgttggaataaattggcttgcatttagaaaagcagatttgattaatacttcataccacatagaaaaataaattcctytggaataatatttactgagtatttaattctgtgacagggactatgctaggatttttcttcgtactcatttaaacaactaagagaatgtgcagtacggtgcattccatttataagaagagctgggattttacatatggaagagctggcattttaatgcacatggtcctttctgttcctctctttctacttcagtgttggctgaaatttctacgcatgtcagaaaaggataaagtagttttagataaaatatgatgcatcctgttggttttttttttaattggcccaggaaaaattcttaaacttccttagaaaagataagaaagagaaaaatcaaacttatactctata

SEQ ID NO: 703039 - DNA, 1000 bp, Homo sapiens
tgcctgtttttatcaaaagagaacagataaggagtcgtcttctgcctccattagagttgcttctggagatgtcaaaatatttctaatgttggcagcaggctctgtggtaggtatattttgggtagaaaacaactccacctgtttcttggaacttattttgaataaatctcctgggaaatcatgaggcacaagctctttatgaaaagaggaaatctcactgctggaagccccgccatatgcagaaagagcatcaggacaagataacctggagttctagttcttcctccaactttgctgcctgtcagatacgtggccgtaggtaaatcgcttacccggcctggacttcagtttctgtctctgtaaaaggaaaacattggacagtttctaagtcttcactagcgttctgttatcactgtcctttcctggcatgttggctgtggctattaccagcctccttctcccagaagcactatatccttacgagacacgacttctatctacccttgtaaatgatatttataaggcaaaaggcacatatataaatttctcattttttaatgacttttaaatacttctagtaaatacaatttactagcaaattgtatctagtaaaacttccttggctggaaccctattaaattctttctttcagaagagaaagaggaggtcacttaagaaaactattttagttaggtttgtaaggagaaacttaagaaaattaactctttaggcattgtggtagcagacagtcactaataatgagataatgacaagactaaatatactgagttgggtaagggttaacaatctgttagtcttagttggatttacaacacatgattaaaggtaatgaggcccatttctttaatagtggtctatggttgagatttttcactctttgtggcygcacacatagaactaattaggcctttggatccaaattggcctatcaaattgagtatcaagaggaaaaaaatctgattagttacatttttcaaaa

SEQ ID NO: 703040 - DNA, 1049 bp, Homo sapiens
aggatgtgaaatccctggggtggggggattgcggggatgattctgctttttacctggtgatcctatccattttctccttttcattatttcattttttttactcccagttttgttcaggtggcactttgcctttgtaaaatactcacctctccagactcccttgctgctaggagttattttttgatccagtttcggccaaggatatacagtagtcctccttatccgcagttttgctttttgctgtttcagttacctagggtcaacggtggtcttaaaatattaaatagaaaatttaagaaatatacaatccrtaagttttagattgtgtgccattctgagtagcataacaaaatctcatactgtcctgctccatcgcacctgggatgtgaatcgtttctttgtccagcagatccatgctgtagatgtcacccgcctgttaatcacttaggagccatatagatgatcagatccactggcgtggtatcacagtgcttgcctttaacgaactcttattttacttaaaaatggccccaaatgtaagagtagtaatgccgcatattgttataattgttttattttattattagtcattgttgttaatctcttactaagcctaatttataaactaaactttatcataggtatgcatgtataagaaaaaacatagagtttggaactatccatggtttcaggcaacctctgggggtcttggaatgtatcccctatgaataaggggggactactgtataaacagaataaactgtgtgggctttcagggacagctattgatttcctgataaaaagtagacaacctaagctggcatggatgattttcccttcaaccatctctcttggtcctgcttggatcatagccacaaggctaaagggggagcagttgtcttgtagctgcaaaggcagaaagtctcatgttaggggtgatggagcagaaagttccaagctgacctgagaaactggggcagtggtgacttgcctatccctgggtgtctcgtatggccttgttacacttgtaatagctactagttattgag

SEQ ID NO: 703041 - DNA, 1049 bp, Homo sapiens
aggatgtgaaatccctggggtggggggattgcggggatgattctgctttttacctggtgatcctatccattttctccttttcattatttcattttttttactcccagttttgttcaggtggcactttgcctttgtaaaatactcacctctccagactcccttgctgctaggagttattttttgatccagtttcggccaaggatatacagtagtcctccttatccgcagttttgctttttgctgtttcagttacctagggtcaacggtggtcttaaaatattaaatagaaaatttaagaaatatacaatccgtaagttttagattgtgtgccattctgagtagcataacaaaatctcatactgtcctgctccatcgcacctgggatgtgaatcgtttctttgtccagcagatccatgctgtagatgtcacccgcctgttaatcacttaggagccatatagatgatcagatccactggcgtggtatcacagtgcttgcctttaacgaactcttattttacttaaaaatggccccaaatgtaagagtagtaatgccgcatattgttataattgttttattktattattagtcattgttgttaatctcttactaagcctaatttataaactaaactttatcataggtatgcatgtataagaaaaaacatagagtttggaactatccatggtttcaggcaacctctgggggtcttggaatgtatcccctatgaataaggggggactactgtataaacagaataaactgtgtgggctttcagggacagctattgatttcctgataaaaagtagacaacctaagctggcatggatgattttcccttcaaccatctctcttggtcctgcttggatcatagccacaaggctaaagggggagcagttgtcttgtagctgcaaaggcagaaagtctcatgttaggggtgatggagcagaaagttccaagctgacctgagaaactggggcagtggtgacttgcctatccctgggtgtctcgtatggccttgttacacttgtaatagctactagttattgag

SEQ ID NO: 703042 - DNA, 522 bp, Homo sapiens
gagtgtttggaggacatggaagactggcaacctgctttagaacaaagatgagggaggagaataagttccctaacacaatattaaatggaaaataaccactgctctccctaactctcctattgcccttgtttctctcagagtcaacctttgctactcaaagactatctatctttgctctacatgtcaagagacttgatatattgttaartaggtaagcagaatcctgaacctcagccagtgtcctccctgtcccttcagagccatggggacagtaatgacctcctggggaaggaccttctcatttgactagagctacttttgttgtaaattgctaagcaaggatggggcatagcaaaccctctgtaaatgtcagctgccatctgtatcctcatttcacagatgataaaatgaaggctcagacaaggcattcatttaaaaaaggcaaaacactttagggaatgcttttaagttgctgtggcacacagaattggaatctatactaaaacgtttagtaaagatttt

SEQ ID NO: 703043 - DNA, 627 bp, Homo sapiens
tattctcttaaaggttctatcatatagaatacaaagtaaaatgttaaagccccaatttccttatctcttctactcatccaccccaaagataactactttataaagtttatggttttttcctaggcatttacatcttttttcaaatataaatatgatttttatacatttttacatcagcccatggaaatttgtattactttaaacagctacatgtatacttgattataaatgaaccttactgtatttggccatttttctgtggacaatgagatttttttttcctaccctgttttctttaagaacattccttcataatcatcattatctaaatcaaggatctgcatgtctatgaatcattatggaaacttatggaaatgtagaattaaggtcaactgaacagttttcttttataaagagaatygtgaaatgtactaatagaattaagaccaagaaacacacttatcaataaatatattaaagtattgtcaaaacagacatcatttctctggaatgcatagggaagacagtcaaaagagtgagaaacagggagaaatagtgagggataaaggaagagacataaaatgtttacactttcagaagctcaatggacacggtattgataattca

SEQ ID NO: 703044 - DNA, 635 bp, Homo sapiens
taattgccattgcttcatgtttctaacaatgccagtttaaatacttgagatgatcaagtgttatacagaactcaggccaagtcttacagggttcactaggtcagcagttctcaaacattttgcctgcagaacccctttgcgttcttaaaaattattgaagaccctgaagggcctttgcttataaagataatgtctgtaagtatttactgcattaggcaattttggcagcttcattgacatataattcacataccaaacaatacaccaatgtaagatgtaaaattcaatttttttctcacaaacatggaaaaccaacagcctagttagttctagaacatttgtattgtctcaaaaagaaacccaatatcctttagctatgacccctgtrtccctttatcactaccaccaccatcgcctcactcccagccctaatcaaccactaatctaatttatgcctctatagatttccctattccgggttttcacatgatgggaattgtataatatgtgtcttttggtgactggcttctttcacttagcattatgttttcaaggtttattcatcctgaagcatgtgtcagcactccagtcattttatggctaaataatattccactgtatggatatgccacctt

SEQ ID NO: 703045 - DNA, 630 bp, Homo sapiens
agtcttcttgtagctccatagttttccatgtgtttttctaacaatttctgtctcctcaagtaacctaagtatgctctgtaccttgccaagtaaaagagcctaagtaacacggtatctttgtcaagtccacaccctaaactgttggagtgcctgcatattgcatgggagtaagcacgcatacagtgagccagcatgcagtaagccttcagtaaagtttgctgaataaagctgaggggtgtgtgattactttgggaatgactgagtccatgttaggcyggcaaagagtatttctatatttggatcaaggtgtacccaaagttatctgaaaacttgcgggctggagcaaaagtgaagctttgtgagtaagtgaaggaagaaatagtttaagtgcaacattaccaagaagggcctcaactcaaaatatttttgcctccaacttgccatactgcctaaaatatagacacgatattaactccttcaatggaaggcactggctatctaagtgctcacttataaagtatttatgttcagagacaggagtaacacgtaaaacttatcatatttcatatcttagtgtgcattcattcagcaaacgcatttctagcagatttttatcctacggactgagga

SEQ ID NO: 703046 - DNA, 338 bp, Homo sapiens
gtcacaagcctttttaaatgtcctttctcactgaggtgggtaagaggagtgcagggttctcaggggtaccaacmaggcaaggcccagctgttatccccagtggctaacataatgtagtcaaggttcattcatcactcatctagtacttattgagtccctactgacctgagccatgcatgggtctaggccctggggatagagcagccaagaaaacatcatcatttcctgccttcaagaagcttcatttgcatatggcacgaaaggctggcccacagtcgttctgatacagagctagagcctttagagagctaaggggctagccctcaaccagtgcttca

SEQ ID NO: 703047 - DNA, 570 bp, Homo sapiens
attttggtacatactcttcctaattcataatcccctccctctctctcacacacaaatgtacacataaaatagatacactttacacacatataattttattgtaacattttcagaaacacggttttgtaattatttaaagatattgtgaataaattttgtgaataatacataacatattatacatcttagttttcagattttgttttctgctgtttggggtggcaggttcactttttgctaacatgaatcgtctcagtgtctttgattttccttctctcctstaagctattgcttttggaaggggcgcctggatctccctcctgtttacttgggggcaaacacatagtatcatggggttttgaagacatgttgcctgcgccagatagcaacactggctgtagttctgaaaatattagcgtttttgtcctgtgattaatactaagatgtaaataaagtggttttagataattgtagcaaatgatccagatataactgtgtgttttagatcattgtagccaattatttagatacaactcggtgagtactttttaattaagagctccagatttc

SEQ ID NO: 703048 - DNA, 900 bp, Homo sapiens
ttttcccaccagcagtgcatcatcaaaatttgtgagcagatgtaggttacatttatcctcacacctgaactaggttttatttaataccccccrcctattgtagaagtgaaatattttgcagacacccactgccaaataacaggtgctgagctgcctgatcccacctagctgttataatatccaagtggcaaggtcaggaacgagaggcaggcaggatgcttcttctgttgaggttgttggtgagattgcctcttatactggggagcccttaggcagtggtgtgatattgtgtaggcaaaagacctgctgggctgcgtcttccaccggccatctggttgttatggtgccttattatttggcataatcccagtcttctggattgttgggaagaattaagcgcaggaagatcagtatgctataggtatgcaaattgctaacatcctaaatccaaaaaatgagatgtcctttaagaaatgaaaatttagcatgatgttgctcttcaggcttacaaagagcacttagaagtaaagcttgcagagaaaactcagaaaacagcaaagcccataaaattcactctagtgcaaatcaacgcttttaacttcagccttttaagttactccttcgtttcttatacaattggattcctaacttgcttaaagaagaagaaaaaagcgacagtgaaacatctatagaggcaaagggaaccattccctcttggttttcattcaaaggaaggccacatatttaaatatttcctgttttggtagaattattgaaggtatttctttatattttatttgttcgttcttttgttttaacctttctttatgctttgttttaattgtacttattataggtatcctatagctagctattattccatccttaacaaaaggatgc

SEQ ID NO: 703049 - DNA, 900 bp, Homo sapiens
ttttcccaccagcagtgcatcatcaaaatttgtgagcagatgtaggttacatttatcctcacacctgaactaggttttatttaataccccccacctattgtagaagtgaaatattttgcagacacccactgccaaataacaggtgctgagctgcctgatcccacctagctgttataatatccaagtggcaaggtcaggaacgagaggcaggcaggatgcttcttctgttgaggttgttggtgagattgcctcttatactggggagcccttaggcagtggtgtgatattgtgtaggcaaaagacctgctgggctgcgtcttccaccggccatctggttgttatggtgccttattatttggcataatcccagtcttctggattgttgggaagaattaagcrcaggaagatcagtatgctataggtatgcaaattgctaacatcctaaatccaaaaaatgagatgtcctttaagaaatgaaaatttagcatgatgttgctcttcaggcttacaaagagcacttagaagtaaagcttgcagagaaaactcagaaaacagcaaagcccataaaattcactctagtgcaaatcaacgcttttaacttcagccttttaagttactccttcgtttcttatacaattggattcctaacttgcttaaagaagaagaaaaaagcgacagtgaaacatctatagaggcaaagggaaccattccctcttggttttcattcaaaggaaggccacatatttaaatatttcctgttttggtagaattattgaaggtatttctttatattttatttgttcgttcttttgttttaacctttctttatgctttgttttaattgtacttattataggtatcctatagctagctattattccatccttaacaaaaggatgc

SEQ ID NO: 703050 - DNA, 1124 bp, Homo sapiens
gtgctgggtacttacttaggcatgcaattgccaagccataagatatataactagtctagtttagtacaaggtttctcaaacttggcactgctgaaatttggggcagataattctttgtcccgggggctgttgtgtgcagcatagggtgtttagctgaatggctggtctctatacacttggtgctgatagtaccacctccgagttgtgacaaccagaaatgactccagacattgccaaatatcctgaggcagggggtacacaaatcacatctggctcagaaacactactttaaagaataaaactgaggcaattacaaagtggttgtatcagctgatacacttgccaggaatgtgagtgtatcctatgtatctttattctctgtgacacttagttttgccagacttctgaatttttgtcaatattctttagcatgacaatttatattcctaatcctatgctgtaattagtcaactgttcttctttgattcaactaactcaatatacttatttatttattcatcctgcaaatatttgagtagaaatgtcatgtccagtactggataggtgtgagataaagtaatagcagaaggcaatgcatgcctcttctcttacagcttgcacaacagtgggtgaaatgagcattaatccatttatcatcctgttcaatagaaagggatgaatatctagtgctgaagacctgtaatgggggaatttgacccagacagcaaaatcaggagctcacaagagaatggaagagcatgagtgtttctggtaggtgagagtgagggggattattttatgaggtcttacaggagatggagggtcagactatgtagggccttgtgtgtcaaattaaggagtttggatgttagcataagagacatgagaggcctttgtgttagtctgctcaggctgycataacagaataccacagactatcacaaataatggaaatttattttcttacagttctcggggcaggaagtccaaggtcaccatgttggcatggttggtttctgatgatggttttctttctcctggcttgtaaatggctctcttcttgctgtgtcttcacaaggcctttcctctatgtgcacatactcctggtatcttcttattcttct

SEQ ID NO: 703051 - DNA, 1199 bp, Homo sapiens
aaaacaagaaaaaactgattattcctgaaaaagattggctaggaggagagggagcttgccttagcagatcttaagcctcataataaaactaaagtaatgatgacagtgtaatatcggtacataccagcagaatagaattagagaatccaacaacagacccatgtgtataagtagaaaatacacaaagttgagaggaagcatttagaaagatttatagcaatttggcaccgctacaatatccaaatgcaagatttcataagtataggtccataatagattgaaaattgaaacaaaaacaaccgaaaacccagtccttcactatttttgtaagtatgggcttagattaaaagactggaattaaaagtaatcttgaataataaggcaaaatgatgcttcccagatacactgaaatagactgcatgttgcaaatcacaatgagtaaaggtggaggatgaccagttttgagtaaatgggtcaggttggagaaatatttagaggtcagagtggattgcaagctaaactcagcccaacgttcattgaccaggattggacttgtgcccttacaatctaatcatagtgtgaaatataaacatggagtcactgacactctaagacccattgtggaaaagccagtaagcatgctgtaacaatgccctggatatgaaccatatgttgcacagctccagggaaatcagtgcatattcatagattttgtagattcatggcktattaaagctgaaagggatctcacaagccatgaatctgtaccttgactcactctctcttttttaaacacagcagatacaaacactgtgaggttgtaagctagccccaagatcacacagccagtcagtggcctggtgaaactaggacttggatttcctgagacataaaaggcttctgtttgcagcttgaagaaagcagtctctagacaaagtaagtagtcctatttacttagtatgaaacaaaactgccagttgccagagagggtacagaaccatattttgcaggaccatgaagtcgaaagggactgtcccatcaactggggaaaataccaccagctccagtctatccacagactctccattctcaagttaaatgatggtacttaggacaacacgcattggaagtgatgaacaaggctgctgtaaatctactcatgtctatcaatatgaaacaacttgccttataagagttaa

SEQ ID NO: 703052 - DNA, 1199 bp, Homo sapiens
aaaacaagaaaaaactgattattcctgaaaaagattggctaggaggagagggagcttgccttagcagatcttaagcctcataataaaactaaagtaatgatgacagtgtaatatcggtacataccagcagaatagaattagagaatccaacaacagacccatgtgtataagtagaaaatacacaaagttgagaggaagcatttagaaagatttatagcaatttggcaccgctacaatatccaaatgcaagatttcataagtataggtccataatagattgaaaattgaaacaaaaacaaccgaaaacccagtccttcactatttttgtaagtatgggcttagattaaaagactggaattaaaagtaatcttgaataataaggcaaaatgatgcttcccagatacactgaaatagactgcatgttgcaaatcacaatgagtaaaggtggaggatgaccagttttgagtaaatgggtcaggttggagaaatatttagaggtcagagtggattgcaagctaaactcagcccaacgttcattgaccaggattggacttgtgcccttacaatctaatcatagtgtgaaatataaacatggagtcactgacactctaagacccattgtggaaaagccagtaagcatgctgtaacaatgccctggatatgaaccatatgttgcacagctccagggaaatcagtgcatattcatagattttgtagattcatggcttattaaagctgaragggatctcacaagccatgaatctgtaccttgactcactctctcttttttaaacacagcagatacaaacactgtgaggttgtaagctagccccaagatcacacagccagtcagtggcctggtgaaactaggacttggatttcctgagacataaaaggcttctgtttgcagcttgaagaaagcagtctctagacaaagtaagtagtcctatttacttagtatgaaacaaaactgccagttgccagagagggtacagaaccatattttgcaggaccatgaagtcgaaagggactgtcccatcaactggggaaaataccaccagctccagtctatccacagactctccattctcaagttaaatgatggtacttaggacaacacgcattggaagtgatgaacaaggctgctgtaaatctactcatgtctatcaatatgaaacaacttgccttataagagttaa

SEQ ID NO: 703053 - DNA, 1217 bp, Homo sapiens
taacggttttctggatttgcaagaataaacacacaaatctctaatagatttactgaaatctatatcccacataattggcttttattgttatcaaatggattattttatcatgtgcagaaagaacagaggcttcagatggcaatataattacattcatattatatatgttttattgtaatcrttttacacataaagaaaaagggttttcttatgagtcaacttcttttttaatccataaatatgatgcatcttggaaggaagaggaacatttaagggcagttgtcaaagtttgcctcaaataatttcattacatagcagcctgctgatttaatagtcttcaaaggcatatagttccataatagactgtaagtaatttattagaaatgcatacaccattgcaactgtttctcaaagatgttctctagtaattatttttgttttctattataggcataacattaatattctaaaaatctaaatagttgtatttataaattcatccaatgttaatgtattcatcagaagcctttgttacaccaaaaagctcactataagctgtaatgatgaactaattgattaatcatattttttgcttaaatcttaatgcttaatattaaagtttaattaagtagcgtcttgatgacttaatataatttttaaacaattgaattgcttccagtgctaaaagcaagaattatttaataggattgtgtttgtccactattttaacctcttatttcccacagcctaacctcctgaattttcaacctattgacttttactgataggatattcttgtccttgatgatgagcaaacaaatcagctattaatcataatatcctcttactttgaagatgttattgactcctgatgagatggtgcctcggttcaaacgacaaactttccttttctaaatgacatgaatttgagggctacaattttcatccacaagagacttctcaatggcagtagacacttacaaagtctaaataatgtctttcaaatctcccattccctggatcattagactatgcactcattcacaataggtgtcatcctcatctgtgcatcccccttgcttaacaaatgtcctatttcagaaaaattaaacagaccaaaacttgtcgaaacaaacattgtgtccaagtaaattctcagtactatttatatttgcattaaactcactgtgctgaaattgtttggttagttaagtgca

SEQ ID NO: 703054 - DNA, 1217 bp, Homo sapiens
taacggttttctggatttgcaagaataaacacacaaatctctaatagatttactgaaatctatatcccacataattggcttttattgttatcaaatggattattttatcatgtgcagaaagaacagaggcttcagatggcaatataattacattcatattatatatgttttattgtaatcattttacacataaagaaaaagggttttcttatgagtcaacttcttttttaatccataaatatgatgcatcttggaaggaagaggaacatttaagggcagttgtcaaartttgcctcaaataatttcattacatagcagcctgctgatttaatagtcttcaaaggcatatagttccataatagactgtaagtaatttattagaaatgcatacaccattgcaactgtttctcaaagatgttctctagtaattatttttgttttctattataggcataacattaatattctaaaaatctaaatagttgtatttataaattcatccaatgttaatgtattcatcagaagcctttgttacaccaaaaagctcactataagctgtaatgatgaactaattgattaatcatattttttgcttaaatcttaatgcttaatattaaagtttaattaagtagcgtcttgatgacttaatataatttttaaacaattgaattgcttccagtgctaaaagcaagaattatttaataggattgtgtttgtccactattttaacctcttatttcccacagcctaacctcctgaattttcaacctattgacttttactgataggatattcttgtccttgatgatgagcaaacaaatcagctattaatcataatatcctcttactttgaagatgttattgactcctgatgagatggtgcctcggttcaaacgacaaactttccttttctaaatgacatgaatttgagggctacaattttcatccacaagagacttctcaatggcagtagacacttacaaagtctaaataatgtctttcaaatctcccattccctggatcattagactatgcactcattcacaataggtgtcatcctcatctgtgcatcccccttgcttaacaaatgtcctatttcagaaaaattaaacagaccaaaacttgtcgaaacaaacattgtgtccaagtaaattctcagtactatttatatttgcattaaactcactgtgctgaaattgtttggttagttaagtgca

SEQ ID NO: 703055 - DNA, 1217 bp, Homo sapiens
taacggttttctggatttgcaagaataaacacacaaatctctaatagatttactgaaatctatatcccacataattggcttttattgttatcaaatggattattttatcatgtgcagaaagaacagaggcttcagatggcaatataattacattcatattatatatgttttattgtaatcattttacacataaagaaaaagggttttcttatgagtcaacttcttttttaatccataaatatgatgcatcttggaaggaagaggaacatttaagggcagttgtcaaagtttgcctcaaataatttcattacatagcagcctgctgatttaatagtcttcaaaggcatatagttccataatagactgtaagtaatttattagaaatgcatacaccattgcaactgtttctcaaagatgttctctagtaattatttttgttttctattataggcataacattaatattctaaaaatctaaatagttgtatttataaattcatccaatgttaatgtattcatcagaagcctttgttacaccaaaaagctcactmtaagctgtaatgatgaactaattgattaatcatattttttgcttaaatcttaatgcttaatattaaagtttaattaagtagcgtcttgatgacttaatataatttttaaacaattgaattgcttccagtgctaaaagcaagaattatttaataggattgtgtttgtccactattttaacctcttatttcccacagcctaacctcctgaattttcaacctattgacttttactgataggatattcttgtccttgatgatgagcaaacaaatcagctattaatcataatatcctcttactttgaagatgttattgactcctgatgagatggtgcctcggttcaaacgacaaactttccttttctaaatgacatgaatttgagggctacaattttcatccacaagagacttctcaatggcagtagacacttacaaagtctaaataatgtctttcaaatctcccattccctggatcattagactatgcactcattcacaataggtgtcatcctcatctgtgcatcccccttgcttaacaaatgtcctatttcagaaaaattaaacagaccaaaacttgtcgaaacaaacattgtgtccaagtaaattctcagtactatttatatttgcattaaactcactgtgctgaaattgtttggttagttaagtgca

SEQ ID NO: 703056 - DNA, 455 bp, Homo sapiens
agttaacctggtccctggtactataccttgttcagcagctggaaaaatgaggataatactatgtttatttagaaaacattatttcttgcattatttttatttcctttcatttgaaatgatttgatatttagaaagtttgtaaaactagtacaacctttccttttttaatttggaagttaccatgacgtcatgcttcactgcctctgaaaatctgagtgtgtcatttctacgagcaaaaatatattcttgcakagcaataataaaacatcaaaaccaagaaatagatatgatgctttattataataatagcagcatattctgtttaagttttcaaattgtgccaataactcatttatagaaaaacgtgccaattgggtttatttctgcatttaattgttatatgtttttaatttctttctgtccttgatttcaccctattcttgactttcataact

SEQ ID NO: 703057 - DNA, 635 bp, Homo sapiens
catactttgcttcattgtttttaagaagcacataaaataaaagtatagtagaatcacagattggaattatttaagggcatgtaataatcacaatgacatcttttattcatatggtgaatacatgtttactgagcatttttatatatactctttcttttctaaaacaaatatattaaatcttttattaaatgaatggaaattgtatcccggtttcctcatttatatgtgtgtacaaaatttctgtcctatctgcctcagacagtttttttttctgtctttttgttaacttcacacccacagttgtgaggatttttgatctgttttgttttgtttttgagacagagtctacttctgtcgtccaggctggagtgcagtggtgccatctcggctcactgtgacctccgcctctccagttcaagtgattctccagcctcagcctcccaagtagctgggattacaagcatccaccaccatgcctggctaatttttgtatttwtagtacagacagggattcaccatgctggccaggctgctctcgaactcctgaccttaaggaatccacccaccttggcctcccaaagtgctgggattacaggcatgagccaccgcacccagcctagttataagtttttaat

SEQ ID NO: 703058 - DNA, 2787 bp, Homo sapiens
aaaatatattttatagcttgcatcttgttagcttaattaagtttcatctttattccagataagcaacagagctcctctctctctttttttccatcagtgagtttcagtacttccaagttcctattttattgcatattaaatgtttgtcaaatgaggagcttgctcaggcctgttaattggtatggtttcccatacactgtcacattgacttggtcagaaacctggcaaaataaagatctgctaatttgtcgtatgggtctgttacaagtgatttcacattgcaaatgtgcacagaaaacattaaaaatgctctttatttttttcctttttaaaaaatctcagtttaaaaatctatttgtaatagacactagtagcaaaagtataagacagtaattttacagttttgtcaaaattggcaaataatattagctacacatagaacattatagaaaagaaattgtatcatctataacaaaataattttaaatagaattataaaaacaaagatataatattttaaaaatatacccatcatgtaaggtaaactccaaagccatttattatatgaaaagtaagaagggaaataaaagcactctcaagaacccaacaaacaacaataataataattagaataataaatgtaataatgcatctaatccccagcatttttctaaaaagatatggcaaaattaatgctaatgcagtagaattaaatgtgatctaacatttcttaatttaattctctctggccagtgtttatggtttctctggggcaaaggttcccaaaattctggtcttcagtagctggtgaaacagtcattgtaggcatcaatgtgtttgaaaaatctaattttcaatcaagataaaatcttgatttaaaacagaaaagtgcaacaaaaacaattattagtcactgactatgtgacactgtcctccaaatattattatttcatattttgttaattatgtgtactaatatgttaacaatctcagagaagtaacttgttcaaggtcacacagaatataagtgatatatttcaacctatgtctgcctgtttttaataataacaactcatgttattgaggctttactatatgccaggtagtattctaagaacttacataaagacagtatatcaatgcaacagcacaatgaagtaagaaatattattgcttgtcttttacacattaaaaaaaaacaacttgaggcacaggatggtggtaactggcccactattacgcatgtagtagttgatagagatacgaagacaagcattctggagaatcatttctgagccaccttgctctagagccactctttttttcttttctttttttctacaatagcattatgaagtaattgaaaacaaacttttctgagattcaaagcacttaattagaggatcatttggcagtgtcatacatagaggtacctatgtggtataaatcgaaggtatcctgaaaaacacacactctgtttagatagagagatgatagatagataggtagatagatagatagatagatagatagatagatagatagataaatagataagacttttagtcttacctctttttaagaaggcttcagggtatagtaaaaataatataggttttggtgcttatgttaaaaaacttaaaaacatcttcatttttctcttcctgccattgccctaagcatagattaattttgttttataatcttttaacacataaagcacccaaatataaggagctcaaagataagagaaaaatgaactagatttcagttttatagtgtattatttcatttcatgatcgacacttacttctcaatcactccccaaattctgtgagtattatattctacattttacaaataatgaaactatgtatcaaaaagttakataacttactaaagtcattcacctggataaaatagattattcaccaaaatctatgctctatccactattcgcaaaagcctccttaaaaggaggtgagactatcagcctgattcatgtattgaaagagttcaaacggatatctttctttttctactaaggtgaaatcctcaaaaatagtaggaacttagataattatggaggaagaagtcactaaaaaaagcatattacagattataaaggatacattctcttaattttttaagatttcagctaaattaaattacattgtccaatagtagtgttgcttggttgtattactatctttatgtatttctttatcactcatttaaatttataagagtttagtgaaaaatgcagtgtagtattatactatttttacaaatgactttcagaaagggtatgcagtaactctctgaggtgataataatctatatatgttgatattgtatttgtgtgacatgtgtgtgcgttcatcaaaaactgagtaaattaatagttaagatttgtgcatttcattgtctgtgaattattacttcaaaagagtaaaaaaattaaaaagttttaactataattaataatgtacatagaaatatttaaggagaaatgtacttaagtctgcaatttactttgcaatttattgaatattatgaattaaaagatagatataggaataggtagatggacagatttgtaataaaacaagcaatgccaaattctaatggtagaaactaggcgtattggatgatcactataagtttaacttggcagtatgtttgaattttttcacagcaatatgttgggcaatgccatttcttaatgtaagaacgtttagcatgagattccttcacttaacaaccaccaaattttatcttcaaata

SEQ ID NO: 703059 - DNA, 1143 bp, Homo sapiens
ctgctcatgggggtttaacaacaacaacaaaatacttccataaagctatataagagctactctaatggcaaaatagacagcatcctccccaatattcctacaataaacacatcagctagctttgtatggctgttcttataactactttcaatgcaagctaaaataacttaaaagctcatttcataaagttaaatgtgtgtgtgtgattctccagttgctgtttattaaagtagttataggatgggtgggcataaaacaaaacaaaacaaaaaatgcaaacacatcaggccttaacagagagtaatatttyagcttggagaggtaaagtccattggggatgaggatggatgtgtggtatgggggtgggccatgcctattgttgatgatcatcaggagaacacaggtgagatctgccagcggggctctttctactacttggagggccctgagaaggcaggggcaggggcaggggtgagccttccccccaggaaagccgattcttcttgctccttgatgtctatattatatgcctacaattggccctgcttcctcctcctggtggtgtgtgatggttttgattctgctgatcctgtgcatggggatggttgtcgggctggtggctctggggatttggtgtaagtgttgactctgccaaagatttgattggaggaaggcaataccgaagggtcatggcatatcccactaagcttctcaatggtcactatttgtctgtttgtcactatccaattgtcctatacatagctgccaagatactctcaataaaggagaacactgaccttttccttgtgatcaaaatagctaagttttttattaattaaaagtatttttaagaatttactactggcttttaagaactcctcagtgtggatccaaactatttttaaaaactattttgtccctcttcctatcttgcatatcctaagaatcagccaaaatggagtttttcaatttcatatgtatttcctatgttcccctgtctgaaatctttctcattctattctctctacctaaaatttgcgtcatcccactttgtttactaaaatattgtgcttttttcctccaggaaatctcacagtcttccagtggcacattgtagtctgtgtagctgttgcttgtttgtat

SEQ ID NO: 703060 - DNA, 1206 bp, Homo sapiens
gtctgtctctggggctcactgaatttcgaaaaagaaccgtttacaagttaatctctattctctgttcattctacctagtaatcatttattgcccatcaacagaattaactatattccccatcccctccctctcctctgaaaaaaggctatccaagcttttgtatcccattgtttggggtgataggggtaatcactgtgtgtttctctcctgtgcatgtagatatttgccatttctcccattaatctgccttttgtcagttggtttattttagcgaaacttcagagggtaaaggggaagtttccccttagcccctacatcagaaatatgccataggaacttaactcttgtttatgtcgattagcctatggtaaaaatggcttcgttgctgttttgcttcaagtcgcagtttccaagaacctattgataatgttaagtgaggacttactgtttgtatttataacaaaactgtgaatatgatacataaatatggatgatgaatttcactgtgaaatttctcaagctaatgtagacagatatgaaaacctctactctctcacttatccttctgttcagttgaatctcctgtgtatataacagcaaggagctggagttattgctaggatattggcagctttcttttttcttctttcccaaagacttcctaagagaacatgagatcctatgttcctctggaagtttaccttcttctgaaagtactgatatctcatcatattgtagcttagttggaaagaattcttatatttctctttttatatcttggggtctctatattcatgtcacatttagatttgctgctttcattagctcatatttcaatttaataagaacagggcatcagaaagtttctgcttcttagaacattgytagtatttctctttcaatttgtttgtatctgtcataacttgtgctgtctcccatccaaatactgagctgtatttcctgtgtaggtgacagtaaaagcctgcagttattactgcagaaatgattaagaatacatttaagaaagaacgtcagatttttaggcttgaaaaaccattgaacatgatatctgtttccttcgagaattctagaacatagaaagtttgaacatataagattagaaatcatccaatcccattttactgaagctgaatttttaacggcacagcagaataatctaatatgcacacataaactaggtcaga

SEQ ID NO: 703061 - DNA, 1054 bp, Homo sapiens
aaacctggtcatatatatatttcaaatacttattgcttgcagctgtcatatacacttaagattatttaattgcaagagagaatataattgcccttgacatttaattaaagttacggagatacgagagtatcagagaattgcttggagattatatactttttaaaaaatttcatctaaaaagagactcatcttccaattaatatctttaattgatttgatgaggagcactaaatattaactccaaaaaaattgtttgaagataggataaggagagaggggggagtctaggctgaaaagggaagcaagccttaggtcaccatttcttattcaaagggaatgtttcatgttgataacaacatgaaataaaatggaaggctgatttgagtgtcttgaaaaaccatcttcatgagcaaaagagaaaaaaaacatgatcatttgctattaagcggtacattctgagaaaaaatttgccatggaaactttcaaagaaaggacataaaattgcctcataagtcctgtatggaaggaaagatgagaatgtaacttctcaggttgtttctagtgggtattaaatcccattttaaatcacatttagaatgttttctttaccaaaatgttaactttcttaaatctttgggtcatgatattatttggaggtgggggaaggagtcatcctctaatgttgatyattttaaaatgtgaaaatgtgtgagtcaagtcaaaataaagattatgcaaattataaaactttagtttgctccagtttaaagatgattaaaaataaaatttagagaaccagcaagcatagattccagtttgagttactgtttaaatggggcagtccaatttgctctctctcactgaatttgactcacattttccccagggccctgtataaaaatacataatcatcgcacgtgcttagtggtataacatttacatatggcatatagagtgtgtgctttttcttagtcgtttttcatatcaaataccatttttggctaattttatgttttttttttttttacagttctctctcttcctgtgtgtgttc

SEQ ID NO: 703062 - DNA, 1200 bp, Homo sapiens
tgttctctatttctctccttcctcacctgcctttagaactaaagcctgggccacctaatcaacttggatctgacatatcaaacaatcaaaggscagaagctggaaaggtccaccatgtactcttcaagctgaaaccttgggaagaaaaagatttcttgccatttccaggtgaaaaggcattttccactggacggactctgaatgtttctgaagagcatttacaacaggctgacatagcaacctggtgagaatagcatgagatgaaacacgtctccctccttctcctgccttctctcctccatactagaaggctgaatctggtctacagatgcccagaatgtgatttttaataaatgagttgtagtagcaagatggagagtgagggatagtatggagattaacggcatggagtgagagagactagagtgtgggatccaggcctcatcacttattagatgtgcaactttgggtaaataacttaacctctctgaaccactgtcctcctcttgatcaaatggggataacatgaaacaaacttatcatattagctgtataataaaaataaatgatgcacaaaaagctgttatcttgtttgcttgtttttgtttgtttgttttgagaaagagtctctgtcacccagattactgtgcagtgcctcagcctcccaagtagctgggattataggtgccgactaccatgcctagctaatttttgtatttttagtagagacagggtttcaccatgttggccaggctggaactcgaactcctgacctcatgtgatgcacctgcctcagcttcccaaagtgttgggattacaggtgtgagccaccacacctggcccattaccattattattgttgttttcacaaaggcaccagaatccttgaggtgaatatagatgtcagacttgctctaaaataaatctggctgctttaggagcatttctgaggctaggaaatgactgaaaaattgggctacttgggtcatgataggacatacgaaatctcctataccccctgtctccaatttcctccctgagcaagaacagaaattgccttcaaaagtcagtggggatagacccatgtggtagaaaacgatacagccaatccttttaaaggaccacccctgttgtggaattgattaggagacacattctaatgaactgttgagcgattacagctcaaaggaagccagccct

SEQ ID NO: 703063 - DNA, 584 bp, Homo sapiens
cactggaagagatggtgattcccaccagattcccaagagagcttattttctcttgtattaagcagcaggggtcaggcttatggccttgtatttgtagaaatcagccatcagcttagcatcaccagatttctggcattagctgcccacgtctgtggcacttcaggcccatgtaactatttccagagtgacacaagtttcttccacagttgtcaacaagtggccctcacaggttcagtgagaagaggaagagggagagagatcatcaggattaatggattacttgcatttgtgagacggtttgccaagtattgctacaaacaaggcacgggattttcttttttcttttcttttttttttgagatggagtcttgctctgtcctccaggctgtagtgcagtggagcaatcttggtttactgcawtctctgcctcccaggttcaaacgattcttctgcctcagccctcccgagtagctgggattacaggcgtgtgtcacaacgccctgctaatttttgtatttttagtagagacggggttttgccatgttgcccaggctggtctggaactccctgcctcacgtgatcct

SEQ ID NO: 703064 - DNA, 593 bp, Homo sapiens
caaaccaaagaggctattccaatgtatacaggcatatgacagataaaaataaaaataaagaacataaaacttgcagaggacagaagacatgagatcaaaagaaacaaaataagtaatcaaagatatcaaagaaaaacatatgtaaactgctgagaggaaatcatctcctacatacattctggaggggaaaaatggtgaattataaagactaactagagaggaaatatcatggaggcctcagaattcttatctgaaaaataacagtgcttgataatattattaaaactacaggatttaggggaggccattgtaacttaaaaaacatataaccataattattttgtgtgtatgaaggtataagaaagatattcaaaaagagtttttatgagtcattaagaaaaatatttttttaatgagcaaggaatacaaagaaaagctcaaagggagattccaagatggccaaatagaaacagctccagtctgcagctctcagcgtgagcaacatagaagtcaggtgatttctgtatkttcaactggggtactgggttcatctcactggggcttgttggacagtgggtacaacccacggagtg

SEQ ID NO: 703065 - DNA, 1865 bp, Homo sapiens
gacctcatatatacaaagaatctaatcaggcaggatattccaagtgcttatggtttatttcccaggaaccaactaagggccactcctttctgttgaatgtatagggtttgaacaccacagacatgctgagataaccttttattgcacatttacacaactatcttcattttttaaaaatgaatagttatctcagaaaaggtttctttccttatgtcttttggccttcccttttctattgtatttatgaatcctcaaaatatcactaattgaaactgaaaagctgtgtgtgtaatattagtggcacattcatctcttggaaatggatgtaataattttctgaaaaagaaattgacataaaaatgaatcagtaccatgatttctaatattctgttgagaagcttaacaatgatttctaaattttcaccatctgattaaactcatttgtcccctcaagaaccagcattcatagtaagttaattttttcttatttaatttgtttctgttttgtataatcactattttcttaatgtgattttttaatttctttttttaatggtaattttgtggcatttctgctctagtacaacttatgtaatgtttttgaggtgacagmaattcagtcaccatttagaacactgatgttctgtacaaatacaatcaaggccacaaccaatctactgcaagtatactttaggagaatagtttgcttatagttttaggattgttcgtattttcttggtgtctaaagcaaagttcatcatttttgaccaatttacagatgcatatttttttacatagatatgcaaaccatttgttaaataaggcttagttcttaatctacttaatttttagagtgctacaaggttatttcattcaatgattgttgtattagtcagtgttctctagaggggcaggcctagtagaatagatgtatatatgaaagggaatttattaaggagtattgatgcacagggtcacaaggtgaagtcccacaataggccatctgcaagctggggagcaaggaagccagcccgagtcccaaaatcttaaaagtagggaagccgacagtgcagccttcagtctgctcgaaggcctgagaaccccatcgctgcaagccagtagtgtcagtctaagagtccaaaagctgaagaccctggagtccgatagtcaagggcaggaagcatccagcaggggagaaagatgaaggctggaagaacggttttctgtttaactctagactattttatagatttttaagtcatgttagtagccacagttcgtacacacaatagactttactatggcttgtttaactagaaaagcatttattgagagaaacgaatagagacctcaaagttccattgagaagcctcaaaggttcactgagaagagacacactcaagtaggaggagctataaccagaaccatagtgcagggacaagcaaccaacagagctgctgcctttgccaggaggatgaagttgctattcaagaagtcaccaccatagttactgacaccagaacccgccgactctgccaggctctacgccaggaaaataggtgtcctgcatctcaccttgcttgcctcatgtaaacccatttcaagtcaaagtctgaatgagtgcttttctctccaagtgacccagttccaaatcaaggtcttgcaccaatccctgattggtggaaattgaataacacgtagaatgctagctgtaagagtttgggaaatataattatacagcttgcctgctttggcatgctagaagggggttggaacaggtgctgaaaccgcaaacccaccacctgtcatagaagggagggctgtgaggagtggccaatgcacttgtgtctctccgttttctcatg

SEQ ID NO: 703066 - DNA, 971 bp, Homo sapiens
tctttctttttctttttttttttttttttggtctgatagcagatggcatagattctgattaactatatgtagatgatttcgattatttgtttgattttcccagtcactgatacacaatataaaaatctgccactggattctgatatatcagaaaaacatatataaagaaagtgtaacttaamgttaaaagatagaatccaaggcagtaacttctcttaatcacaggaaacatattaggtattttcttggcctggctcctctggaaattccgggacctctgaagcaagaattaaaatgctaacactttatttggaaagcagaaacccaaaatggtgagagtaaagaaaagagggaaggaaggcaagggaagataagatgcaaagatatgcaatgtgtgactttgctggctacatttcacaactgtaatgaaaagagacatgtatgcatatttattcagcacatggagaaggttgcaaggaagacctgaacgagaataggttttatttattaaccacttactaagaaaagaagttaatatcaatattgtctcaaaggctatattgttcaggaacttctgaacaatattgtttagtttaggaacttctgaaattcacttattcaacatatttctcaacagattatagtcaatatatttctcaatacattatatattcaatatatttctcagtacattataatattcagataagattcagattgaatgatgatgagataatggaaagcaaacaacaataaaaacttcaaagaaatccttttcaattttacaagaggaagattatgtgattggtatgacattcaaagaagatatcaaggcaattggtattttcagaaaacttcagacatgaaatatgtaaggaaaaaataccaccaaggaatttctaattaaaacctttctttttgatctaaaaattttctcttcactgcagcagtaaatatttatgagcattaga

SEQ ID NO: 703067 - DNA, 971 bp, Homo sapiens
tctttctttttctttttttttttttttttggtctgatagcagatggcatagattctgattaactatatgtagatgatttcgattatttgtttgattttcccagtcactgatacacaatataaaaatctgccactggattctgatatatcagaaaaacatatataaagaaagtgtaacttaacgttaaaagatagaatccaaggcagtaacttctcttaatcacaggaaacatattaggtattttcttggcctggctcctctggaaattccgggacctctgaagcaagaattaaaatgctaacactttatttggaaagcagaaacccaaaatggtgagagtaaagaaaagagggaaggaaggcaagggaagataagatgcaaagatatgcaatgtgtgactttgctggctacatttcacaactgtaatgaaaagagacatgtatgcatatttattcagcacatggagaaggttgcaaggaagacctgaacgagaataggttttatttattaaccacttactaagaaaagaagttaatatcaatattgtctcaaaggctatattgttcaggaacttctgaacaatattgtttagtttaggaacttctgaaattcacttattcaacatatttctcaacagattatagtcaatatatttctcaatacattatatattcaatatatttctcagtacattataatattcagataagattcagattgaatgatgatgagataatggaaagcaaacaacaataaaaacttcaaagaaatccttttcaattttacaagaggaagattatgtgattggtatgacattcaaagaagatatcaaggcaaytggtattttcagaaaacttcagacatgaaatatgtaaggaaaaaataccaccaaggaatttctaattaaaacctttctttttgatctaaaaattttctcttcactgcagcagtaaatatttatgagcattaga

SEQ ID NO: 703068 - DNA, 624 bp, Homo sapiens
ttggaaataaaaagaatcagatctttaaagttaattttgcaaacttgatgttaagagaaacaaaggacataatatgcaaacacattttctaaataagttcaacccattggctggactcggtggctcacgcctgtaatcccagcgccaagacgggtggatcacaaggtcaggagatcgagaccatcctggctaatggtgaaaccccgtctctaataaaaatacaaaaaaaattagtcaggcrtggtggcgggagcctgtagtcccagctactcgggaggctgaggcaggagaatggcgtgaacccgggaggtggagcttgcagtgagccgagatctctccactgcactctagcctgggcaacagagccagactctgtctcaaaaaaaaaaaaaaaattcaacccatcagccatctagaattcatataaaaatacctaaatctccagaatctgtaagaaaatgaaagtatgatggtaaattgtatgtgtcagcttgaactggtctctgtaaagtaggcttccctccccaatatgggatgtgcattttccaacccatttaaggcctgcatagaacaaagggcagatgatagaggagtgtgaccctttctgtcctgtctcactgctta

SEQ ID NO: 703069 - DNA, 624 bp, Homo sapiens
ttggaaataaaaagaatcagatctttaaagttaattttgcaaacttgatgttaagagaaacaaaggacataatatgcaaacacattttctaaataagttcaacccattggctggactcggtggctcacgcctgtaatcccagcgccaagacgggtggatcacaaggtcaggagatcgagaccatcctggctaatggtgaaaccccgtctctaataaaaatacaaaaaaaattagtcaggcatggtggcgggagcctgtagtcccagctactcgggaggctgaggcaggagaatggcrtgaacccgggaggtggagcttgcagtgagccgagatctctccactgcactctagcctgggcaacagagccagactctgtctcaaaaaaaaaaaaaaaattcaacccatcagccatctagaattcatataaaaatacctaaatctccagaatctgtaagaaaatgaaagtatgatggtaaattgtatgtgtcagcttgaactggtctctgtaaagtaggcttccctccccaatatgggatgtgcattttccaacccatttaaggcctgcatagaacaaagggcagatgatagaggagtgtgaccctttctgtcctgtctcactgctta

SEQ ID NO: 703070 - DNA, 624 bp, Homo sapiens
ttggaaataaaaagaatcagatctttaaagttaattttgcaaacttgatgttaagagaaacaaaggacataatatgcaaacacattttctaaataagttcaacccattggctggactcggtggctcacgcctgtaatcccagcgccaagacgggtggatcacaaggtcaggagatcgagaccatcctggctaatggtgaaaccccgtctctaataaaaatacaaaaaaaattagtcaggcatggtggcgggagcctgtagtcccagctactcgggaggctgaggcaggagaatggcgtgaacccgggaggtggagcttgcagtgagccgagatctctccactgcactctagcctgggcaacagagccagactctgtctcaaaaaaaaaaaaaaaattcaacccatcagccatctagaattcatataaaaatacctaaatctccagaatctgtaagaaaatgaaagtatgatggtaaattgtatgtgtcagcttgaactggtctctgtaaagtaggcttccctccccaatatgggatgtgcattwtccaacccatttaaggcctgcatagaacaaagggcagatgatagaggagtgtgaccctttctgtcctgtctcactgctta

SEQ ID NO: 703071 - DNA, 627 bp, Homo sapiens
gggactaaaagcatgcaccaccacacctggctaatttttttgyattttttagtagggatggggatttgccatgttgtccaggctagtctggaaatcctgacctcaggtgatccacccaccttggcctcccaaagtggtgggattacaggtgtgagccacctcacccaacaagaataacaactttctaaaggagtcgttttctctctctctctctctctctctctctccaggatttgggagacatggtggcaaggtatgttaatggccatcaatgcaagctggagcacaaggcgtgctgtgaaaaacatcaagttgtttccaacaaagggaaaacataatttactaacaccataatgtgtcaatgtgattgtgtgtgtaagtgtgtgtacttatgtgtttgtgtggtatgttgaatgttacctatgcctcttatcagacattaaacttttcttacttttccaagtgactcaggggtttctgttttgaagagttcaatgcagaagttgctagaatacaattgcctctttttaggattcagaatcataattagagatcaactatttggtggcaaatagggagagaggcatttatctttcagtggcagtaggttagaaacggagtgaagag

SEQ ID NO: 703072 - DNA, 627 bp, Homo sapiens
gggactaaaagcatgcaccaccacacctggctaatttttttgcattttttagtagggatggggatttgccatgttgtccaggctagtctggaaatcctgacctcaggtgatccacccaccttggcctcccaaagtggtgggattacaggtgtgagccacctcacccaacaagaataacaactttctaaaggagtcgttttctctctctctctctctctctctctctmcaggatttgggagacatggtggcaaggtatgttaatggccatcaatgcaagctggagcacaaggcgtgctgtgaaaaacatcaagttgtttccaacaaagggaaaacataatttactaacaccataatgtgtcaatgtgattgtgtgtgtaagtgtgtgtacttatgtgtttgtgtggtatgttgaatgttacctatgcctcttatcagacattaaacttttcttacttttccaagtgactcaggggtttctgttttgaagagttcaatgcagaagttgctagaatacaattgcctctttttaggattcagaatcataattagagatcaactatttggtggcaaatagggagagaggcatttatctttcagtggcagtaggttagaaacggagtgaagag

SEQ ID NO: 703073 - DNA, 627 bp, Homo sapiens
gggactaaaagcatgcaccaccacacctggctaatttttttgcattttttagtagggatggggatttgccatgttgtccaggctagtctggaaatcctgacctcaggtgatccacccaccttggcctcccaaagtggtgggattacaggtgtgagccacctcacccaacaagaataacaactttctaaaggagtcgttttctctctctctctctctctctctctctccaggatttgggagacatggtggcaaggtatgttaatggccatcartgcaagctggagcacaaggcgtgctgtgaaaaacatcaagttgtttccaacaaagggaaaacataatttactaacaccataatgtgtcaatgtgattgtgtgtgtaagtgtgtgtacttatgtgtttgtgtggtatgttgaatgttacctatgcctcttatcagacattaaacttttcttacttttccaagtgactcaggggtttctgttttgaagagttcaatgcagaagttgctagaatacaattgcctctttttaggattcagaatcataattagagatcaactatttggtggcaaatagggagagaggcatttatctttcagtggcagtaggttagaaacggagtgaagag

SEQ ID NO: 703074 - DNA, 1751 bp, Homo sapiens
aaaaaaaaaaaaaaattaacttcaaattccaaaacacttaatgttgcaccctccttgaacaataactaaaaaaactcrtttccactctgtgaaaatacaatctttgagcttataactggtatcagcagatcaatataaaaaatacagtaccaagctacactggtatatttccattttaagaactccacaatatcctcattgctgagagcatagtccttgcattagttttcagtatgctatgaacaattatctgctgcatgtaaacatgtctaaataactatagataaaatacatcaatcataaatttctgtaaaagataataaaatatcttctttaaaaaacaaaacaataagctattactgcattatttccaattttatgaaaatggaacaaatatatggttgttgctagtcttgagttcattgcaataaaaatggccctagttcctggttaaagtcagcaatcaatctattttcttcaatagatgtcttctagttgtgtaggcaagaatttgttttacatgctattctgtcagtttataaaattatacaccagaaactgaccagtaccacagtactctgttgcaaacagttttccatcaggagtgggatctgagaaagcaatttcttctttactcaaatatgagatatatataaagttactccttaggcattcaatcatgcgagaagcaattttcttccaacacatcatgctgaatacccatattcgactgatcccacagattgcaggctctggtaacgttgagcagcaagattccaattttaaataaatgggaggctatgtttttctcacctacttatacaaattgaggaggtaatcaaaacgaagattgacactttcatcaactggatttcctctgtacgtgcaagaaagtgcaatctgttgccatctcctgttcagtgagaaagctgaaaaaacatcctgagcaagaggacctgaatgtaaggaaatgacctggtgttttcctcagtacttctgttcccatcctattgcttcaagtttaggtatacagcacactgaactgcaagatgtatccggaagtgctgaatacacactaaaatgtttatttttatttcctttattttattttatttttatttcttttgctagagacaaggtctcgctatattgcccatggtggtctcgaactcctgacctcaagcaactctcccgcctgaactgcccaaagcactaggattagaggcatgtgccactgtgtctggtcttttctttttttggtctcaaactcctgacctcaagcaacccaccctcctcaactgcccaaagcactgggattagaggcatgtgccaccggtgtctggccttttctttctttttctttttttctttgatttagaagagaaagaaaattaaatgacagcacagcagaagaaatgcccaagagcttgtgttcaatgaaaatcaggtgatcctttactgaagagttgcttttagttagaactgggaatgggtattcaggaataagtaaactctgcttttcaccactgtcgaagtgtccagtgtttccccattcagcaactggctaattaagggtcatatggcaagaaggatcttatgtgtcttttaatctcttaaactgatcactaactcaaggtgattatacaaattatgaaaatgcttattagcaatgcttccttattctttctgtctgtactacctacactccttagttaactttctctcttctcctcccacacacttatttgcag

SEQ ID NO: 703075 - DNA, 929 bp, Homo sapiens
tggtgagttgcttacttgttcttcactttgttttacactgtattttctgagtttatgggtgtctgtgaattaaaaaggaaaagtagaaataagtaaaactcaggttgaaggaaatatacataaataagataaagctgacctgtagatataggcaggttataagagcttagagtagtctcagttgggtgcaaattttcctctgatctttctgatgccgagacaaaaaaggcagtcatatttgttacgtaattggaatggaacccgagaagagagcatgctgtgttcttgtgggacaggaaagattgtgtgcaccaagtccgaaccaccaccttcattggtgacatagattatgtgctggaacatatttcacaccggcctggcagtaaccacttgtagtgttgtgcagtggaaacggtcatcttccgctaaagcacagcgtgttgtgcagtggaaatggtcatctgccgctaaagcacagcttccatcgtaaggtgtgctcattgctcaaagagtgtggtcccaaacagcttttgggaggtcctccttgattcatggatgaaacccagaacatcttgaggactgagttaaccataggcccttaaataactctccagacatttttcttagtttatctctacatgcagggtgtgcagcagcctgttcaaagtcatattttctgggaaatatttccagtgtttatttgcactttagcccactctgtgtagtcttaacttattwcttctaaactcaccattaacctaaataatagtcaaatttagggggactgtatttgacttactcaagtcttctaccatagttgaaactgtagtacccgagtaagttagagataaacgccacactttgagacgaattcaggggtcctttattagctggtgactgagagacggctaatgcacgaaattctctcg

SEQ ID NO: 703076 - DNA, 2003 bp, Homo sapiens
atgccaccgcactgcagcctgggtgacagaacaaaaccctgtctctagaaaaaaaaaaaaagaaatccaagtttttatcaccttctgagagtaatcaacattcaggaggaacagagaagaacaaaagaccactgaatggttgagggtgggttgctggttaggttcagtggccagctgagtagtatctgaaaaattcattagtaaaattatggcactaggggtgagtcatgcagtcgaaggatgaatactaaatccagtacaaacacccatggtctttctttacatgaattccagtgaaaaatttctaagtgcctaaaatagcaagcggtctgaaatgatggcagcagtttattaaagactgaaaaaagaggccaggcacggtggctcacacctgtaatcccagcactttaggagtccaagaccagtggatcacaaggtcaggagttcaagaccagcctgtccaacatgctgaaaccccgtatctacagaaaatacaaagcttagccgggcatggtgacatgtgcctgtagtcccagctacttcagaggctgaggcaaaagaaatgcttgaacccgggaggcagaagttgctgtgaattgagattgtgccactgcactcgagcctggtgacagaggaagatgctgtctcaaaaaaaaaaaaaaaaaaagaaacggcatcttcaagaaccacaagaaccacaagagagttccacgctgaagaagctctgattctgcatttgctgaactactgatttgagttagccaatataacactatcttagataaagtgtacaaacaactcaatttcatctcctcattaataactgattggtctaatatcaattctgatttttaaaaagctaattagaaaaagaattaattatagaaccaataagaggtttgaatagttacaagctattcaaaggagaattcaaaaaaccattcaggtatgaggccataaagtatgatgaaataaatttcattaatatattttaaaataaactgattagacaggcaacaacacctgggcacgggtctcctcacctccagcaacacaaacccaatcacgcagctatggggttgcaaaggctgcatagtgacaaacagactgctctgagctgagatttctttacttgtatctgtattctgagaccgggtctcactctgtcactctggctgcaatgcaggggtgcactcatagctaactgcagccgtgacctcctgggctccggggatcctcttgcctcaccctcaccatagctatggctacagatgaacaccaaaacacccagctaattttttttttttttttttgtagaaagaggagccttgctatgttgcccaagctggcctcaaactcccaccctcaagagatctgcccacctcaacaacctaagtaacaggttctacaggaaaataccactatgccgggataattatattttattaatttttatttgcatagacaggaggtcttgctgtgttgcccagggtggtctaaaactcctggactcaaaccattctcccatctctgcctcccaaagtgctgaagctacgggcataagccactgcacctggcccgacttaagatttctgtaatctagcatcccatacttcatataattgggaaaagcagtagtggtttttttttaattacttactatttcaacaagaatcaaccatctctcaccattgccagggccctggtcagaaccattatcatctcccacctggaggttgccacagcatggcctccctgcttctacccaaatcttcccacaatctttctcaactcagctgccatgggatgcttttaaatcagtagacagttcgcgtcacctctctgctcagaacccttcctcatctcccatctcagacagaataaaaaccaaagccccagcaatarcctcccagggcttacacaatctgcactgatctgagtccaacaactccctggcctccttccctacttctctccctctctctactccacagacctctttc

SEQ ID NO: 703077 - DNA, 651 bp, Homo sapiens
ataaccagttgtaagtgtacagttttgtagagttaagaatatttacagtgttgtgtagcagatttctagatttttttttttatcttggaaaactctatacccattcaacaactattaattcccccttccttccacctcctggcaagtactattctactttgtgtttctaaaactttggcttatatacctagggttatataatatttgttgttttgtaagtaggttccatgttatatgtcagatgtgtcaggattttcttcctttctatggctgaataatatttcttcatatatatatatatattttctctctctctctctatatatatatatccttttgtttatccatctattcctggatggacgttttggtttcttccacttgtggctgtgtaatgctcctgtgaacacaggtgtgcacatatctgttggagttcctgctactagttattctgtctctgtagaagttggatgcctggatcatatggtcattttattttattttttgtgaggagccagttcatatttccaccaayagtgttcaagggtttcagtttcacctgcacttgttactttctgttgggttagaagtgatgtcccattgtggtttctatttgcatttctttaatgactagtgatgttacacatcttc

SEQ ID NO: 703078 - DNA, 1920 bp, Homo sapiens
ttagaatatgcgcatctttaagatgactgttttctaaagtgtttttatctgtttacatttccacagcaggtctgaaagttctctttgttttacattcttgtcaaaatgtgatgttattatacttgtaaattgttgctaatttcataggtaagaaatgataagccactgtgatttgaatttatatttccctgaatatgaatgaggatgagattttgttcataggtttactgggtttcctcttctgtggattactggacccatttttctattgggttgtttgccttttaaaaaatagatttgtatcagtatagttatttataatatatatgttaagaaatcaaactctttctatttgtggttaggaaataattagaatccaataattagaatccaatgatagaatccagtttatttaagaaaaaataggattttaggtaatttggtaaaagaatttacaaacttctattttttttactttggatctatgcaaatatgctttcagatgtttgcttcttctaaaagctttagatttaggctttccaatcttgaatattcaaatgtctctttttctgttgaacaaatcccaatttctacttattttaatgaggaatacaggctagaatgacaatatgtgcaacatcttatgtttttcactttcctcccaataccagggcttgctcgggtttgttcactgttaccaagctatggtacgtaaatctgtttctacagcagcataaagggctagtcatttaggctatatttttacaaaggaactaatcgaggaagtgctgatgttcaatgagaaatgcttcactactatttcactggcttcataaggcaggagtcaataaagtaagctcaaaataaagcattttaaaatcacatctccttaaatctgtccattttgaacagtgaaatagaaatgccaagtggctcttacggacacagcttgaccatgcaaattattccagtgctagaatcccatgataagaaagatacacattttacacacacacacacacacacacacacacacacacacacaaacaaaamaacaacaacagcaacaacaacaaaaaacaatggtaaaaaacaacgggagagaggctgcagccatggagatgtcacattctcagactcaggacaactacatttgtaatagacacgatgaagaaagacaaagtaggaatttgcttttttattcccccaccttttgtctttgcttttacagttctttagggatgcatacatactgtttttagaagacaatactagcaaaatagatttcagagatggcagaaaaatattacatttgacaaagaaaaggcatggagatagaaaataccacaaactcataaaattgttttaagttaggaagtgataatttttaaaaaatgaaattgaaaatactagatacaagaaaagttgttgtggttatatgtcaatagatttaaatcagtaagacctttcataatatatacaacaacattttatctaaaaggcaagttttcgaagtcacttaggatttcatttacttatattaggggttaatccccaaagtatataaggaactcaaaacaatacaatagcaagaaaacaaagcaattaaaaaatgggcaaaggactttgctatggtttcattgtatccccttcaaacttcatatcgaaacttaatcctcattgtgtagtattaagagatggtgccttttggaaagtgattgagtccctcatgaagcggtaagtgtcttatagaagtgctggagtgatataggttagacccttttttgcccccgtcttctgtcatgtgaggatacaacatttatcctcacaaatgctgtcaggaaaatctggaaaactgtaagaaggctcctcaaaaaactaaaaatggaattaccaaataatctagcaatcccacttctg

SEQ ID NO: 703079 - DNA, 588 bp, Homo sapiens
agtgaaaccaactgggcctagagatatctttttggggagtttcagaattacaaaatcaatttgcttaatggttatgggatagtagtagyagaatgttggctttttcattactctcatacattgctggtgggagtataaattgatataaactttatagagaacattatgtcaatacccttaacaaaattacaaatgtttttaccctttggtacagaaatataggggttataaccagcattttaaaaatgaaacatggtggggggtggggagtcggatcgcaggacacctagttatggtaaagggtatttcctgaaactgttgtttcagatatgtgtgtatgagtgtactaggtcataacataaaatatatttcttactatgagttgtggtcatagaagtttgggagctattgtttcagctttaaaaggataacctgaggcaaaaattataagctgacacttagggaagggagggtataatgtcaggatatgaagagaaagttaaataaggcagataaggagacaaagcaaacgtgaaatatgacattaccaagctatgcagagccatgagaaaactggcctatttgggg

SEQ ID NO: 703080 - DNA, 1966 bp, Homo sapiens
caaaacatagagtaatgtaatggactttggggactcggaggtggaggctaggagggggttgggggataaaagactacatattgggtacagtgtacaccactcggatgatgggtgccctaaaaactcagaaaatcagtctggttgattgcatatcctgatagatttttttttcctaattctaccatgttttaggcaactcttgccttgaattcatacaagtttttactattatttcatttaagttctaataacaacaataataatgacagtaatcaactacattttctgtggtactaagcattagaaataacttataaaggtcatgcagtccataaaagagttggtttatttcagaacctgacagaatcccctttcatgggacaactattcaaagtgggtaaacaatcttacacacttctcaattatatatttctcaccctaccacaaacatatatcccaaagtcacagttatctggtagatcctaccctgagctcattgttttcaggaagggataaagctgtgcttctcaaatttccatataaaacacctggtgacctcactaaatgagattctgtttgacacagcattcctgtttaaataatgctaatttttattcttatacttttgaccatccccgacccccagtaaaagtggaagtttccacctcaacttcactgtgttcagacacaccgcctcatcagaaccatggagagtttgcttctttccatttcccaagcttgcatgggccacttagaaaggccactatgcctaacttagccccaggcacttccataaaatagaaaaagggtattttgtggctcttctaaaaaacacgtaaacacagtttcactgtggaaaaaaaaaaaaaaggagaggaaacaaaattaaaaaaaaattctataatttatagaaaacgactaatatcctggctgggtgcagtggctcacacctgtaatcccagcactttgagaggccaaggcgggcrtatcaccaggtcaggagattgagacgatcctggctaacatggtgaaacctcgtctctactaaaaatacaaaaaaattagccgggcatggtggcgggcacctgtagtcccagctattcgggaggctgaggcaggagaatggcatgaacccgggaggcggagcttgcagtgagcccagatggcaccactgcactccggcctgggcaacagatcgagattctgtctccaacaaaaaagaaaaaaaaaaaaaagaaagcgactaatatcctatgactgaacccaaacataaggaggagttattctttttttttgtctatgtgttaattagagtcaatgtgattttcattctggatatggacttcatactgtcaaagagcaatactgtaattaggtcactttccatgttttcagagacagtgcctgtatcataaaaactgtactgtttttgataagtttcactgagaaacttcaagatatttatacttcattactatctactaaagtgaaatcttcattcttacacagtatacgctggaaataataacttgtatatccgtaagtacattatgtataagaaagacagacctgattattctaaaagtagcaccaattttcttttctcattgtgagtatgtacttcactgtcggattgggaagtgagaaatcgttactgccaagtgaacattaagaattattctatgagcaagaggcctgggcaggaaaagacactccttaacttagtcttgaccatttgataacttattgtcactggcaaaatcaagtaacagtttgttgcagatattcaaaatgtgttcctcttataggaagtttccttcctttattttactcgtgttctctgaatagtacattgtttccacccactgaaatctgtggctgcccctttctctctcgcatggccattgtatgctctaattgtcttttgattctccgtcttctgccacggatgctgcctttagtgaca

SEQ ID NO: 703081 - DNA, 663 bp, Homo sapiens
tggttctgtgtccccacacaaatctcatgttgaaatgtaattcccaatgttgggaaagggacctgatgagagatgattggatcatgggggtagattctgcccttgctgtctttctgatagtgagtgagttctcaccagatctgatggtttaaaagtgtgtagcacttccccctttacactctctcctgctccaccatggtaagatgtgcttccttccctttcaccttctgccatgattgagcttcccaaggcctcccagccatrcttcctgttaagactcctgaactgtgagttaattaaacctctttttttcctaaattacccagtcgcaggcagttctttatagcagtgtgagataggacaaatacagaagtggtaattaataataacattttgaaaggctaaagagactttaggaccaaatggtatgcaccttcccattaccctagggtggctaatttttctgatacttctataatacttgggtcattttggggaaattttatattttaattgttaaggcttcactggggcaaaaattattgttaacatacatgtattggtttagaaaagacaaacagagaagtttaatttattttgactttttaaatcaaacagtttgtgaatagctatagattcagttgtttagtcattttgagttct

SEQ ID NO: 703082 - DNA, 923 bp, Homo sapiens
agaccatgttttgacagtacaggtgatgatatgtgcataaatcataaaacaaatttaaacagaatattcatagaggccttagtagagtcctatggaaggacagtacaaggagggataattcttactgataggttagtgaaagcttcatggaggaggttatatgtatgtagggccttgacagaaaggtgatattttaattggagacttgagatgagatgcacaggtcaaaagaataattgttgcaaaaacacagaggaagatrtgactgggattggaaataatgagactatgtgaatggagacagttggagataggactgaaattatagactggagtcagattgcagagaattttgaaagcctgacaacgctggtgacatgagaactttttatttgattataccttattttgtaagcaaggagaaaatgcactatttagagcatgagatttgggtttcagtcccaaccctttacttaccagctgtgtaatttgacaatctacttaatatgtatttacctattttcttcattgaaaatacagaaaatgacatcattgggatgatacaagaactaaatgaatattcaataagatgaagattaaaaatatttagcttagagattggcatataaaaccttaataaatattattaatattaataaagtcattttacatcagcatgtggaatatttatatatacagtatagagggcttaaaatcagtaattgaagccactgtagaaaataagaagtgacgagaacttgagtaatggctattggagtataaaggagggcaataatattccatagacgatatgaaggaaaaccaaatgctacttcgtacctattatcactacaagggcactaagctctgagaagtaaaaaatgcctatgtttaagtaactgaagcttaggaacatgttgttt

SEQ ID NO: 703083 - DNA, 633 bp, Homo sapiens
ctttagaaatttgaagtcttaattatatttttgaaataaacccagtattcacagaatttagcatctaaatcaggcttcccttatctctgagatttctgagctttcatcatacaggaatctacttttatttctctgagcccctagttaaggatattgtttaaatgaggaacattgacccttaattgggtgttactgtttartagtcctactttcagctggattatacctggagtatgtaacagaagtacaaatactctgttttcctttcctttcttcttggtcttgataatgactatttggtgaacaattacaattctaagtaatattttgaggcatgtttgttcagtcctttcatcattcaaatatttattaagcatctagtgtatagcaagcagaacactaagtgttggggatatagcagtgaacaaaactaagtacctaccattatggaaagagacacacacacacactagtgaaaagtgctaggaagaccaatgggagaacagagtgagtgacgactagtaagatgctgtttgatacaagattttcagggatggcttctctaaaaagcaatgatttcccttttaggtagaaggcatgagcaactgcaaaggcctcctgaggtgggagtga

SEQ ID NO: 703084 - DNA, 633 bp, Homo sapiens
ctttagaaatttgaagtcttaattatatttttgaaataaacccagtattcacagaatttagcatctaaatcaggcttcccttatctctgagatttctgagctttcatcatacaggaatctacttttatttctctgagcccctagttaaggatattgtttaaatgaggaacattgacccttaattgggtgttactgtttagtagtcctactttcagctggattatacctggagtatgtaacagaagtacaaatactctgttttcctttcctttcttcttggtcttgataatgactatttggtgaacaattacaattctaagtaatattttgaggcatgtttgttcagtcctttcatcattcaaatatttattaagcatctagtgtatagcaagcagaacactaagtgttggggatatagcagtgaacaaaactaagtacctaccattatggraagagacacacacacacactagtgaaaagtgctaggaagaccaatgggagaacagagtgagtgacgactagtaagatgctgtttgatacaagattttcagggatggcttctctaaaaagcaatgatttcccttttaggtagaaggcatgagcaactgcaaaggcctcctgaggtgggagtga

SEQ ID NO: 703085 - DNA, 864 bp, Homo sapiens
ttgcacaactctttgaatatactttgtgtaaccttgaaatgggtgaattttatggtatattaattatatctcagtgaagccatttcccccaaaaatctgtagcacaggcctcaaaatgtgctcagtggaatggttgcttccatggaccatgggttattggtccacaaagcgctaaggagcttgcaccactataaaaatgtaacaagactttcttgaaaagaaagtgtgctgcttatccaagcacaagcttatctcattcatagtctcctgtgagtagcactgatctatcgcactacacacaccaaatagaatggtttttagcgtctctggtgactatggctacagagactaaagtgaggagggaaagcaatcttgtaacagtggctactcccaaatttccatgttagcaggtagagcatgagaccatgactgagagaagagagttgttagcgaagtgccaaagttggaagcaggggtaggrtatggaagatgaagaatagaaacagaaatataaagccaatccagagctggaagttgaacaagagaaccacagctaagaaaatagcagtaacaatgtattcaaatttagcttctttaagaagcatctggagaaaaaaatgtgggtgacaagctgccaccctcactgccctggttgggatatagaaggacttgagaggagggtcaagaatctatacaacaagcagtacagacaatttcaatgcaagtagtccttgaaccccacattaaaacagtgaactagaggaagaagcagaaaataaatgcacacagcagggatggaatcattttatagaagagattttatgggattttatggagctgaatccctggtagtcacaggaggac

SEQ ID NO: 703086 - DNA, 1052 bp, Homo sapiens
gaaaaagtggtacttgagtttgtgctttatcctttgggtaactcctctgccacctggtattttcaggctaatagtattttattttgaaaaataccatattttcctttagtggcaaagatacatggcttgattacatgaccattcagtgctaacactcctcatactgtcagatgatttggatccaagtgaaattaccatcctcatttcctcaaccatgaattttttgaaattcagctacttagtgattcatttcaaaaagctctcctgctatcattccccctcagcatttaatctgtttcaaatttaagtttacaaggagttcaagagctttgatggttccatatttattaagtgaagatcaaagactctctttgcttttttgagttttttttgtctgaaagggatgacataacatttcagatgtctttytgaccaaggaattcagcatgaaaatgccttccttttcaagcatttacttctgtctaagcctaaacattctccaaattataagcacattgccatcaaacataaacttttattcagtgttgtatttcaaagactccaggaatttagcatacctttttttttttttttttttttttttttttttgctaccagaaaccgctgtcccttttcttcccacaaagccctttttctagttagattggcttcagtgcttataaagaggtataagtgaaaggttatctttctaaatagatcttgtagagaatatggctttgttgtgttgtttctaacaaaaaataatcaatgaatttaaaagatggatcatatatggagaaaatattatagaaatatataacagacaaaagattaatgtccagaatacataaggacctcctaaaaaccagcaagaagaaaaggacaaagaagagaaaagaaaagaaagcaaaatatttgatcacagaacagaaagcccaaatgatcaataaatgtgaaaagatactcaaactcatccataatcagaaaaaaaaaaacaaagtaagtaactaaatactattttacacagatcatactggcaaagattataaagt

SEQ ID NO: 703087 - DNA, 608 bp, Homo sapiens
tggcttaatggtaacaaaatgttggcactagattaaatagaactgattttatgtgtctcttatgcgatttaccacagaatgccttcatgaaaataattcagtgaacctgtaaacaggttgccctcctccttcctaaactgcagacaagaaatgcaaatggtgagcagctaattcacggtcaggagaaaagtaagaaaaaactctacgtagagtcactggtataattcccctaagccttgragaaacgaatttccttccataaaaacacaggccatggcttctcgtgttgcttagaaaccaagaatctctaagtccacataccagtagtctctccagccgttccttatttagggcccctactggcttactgagatcccggaaggttcctggatttgacaaatctataaacataaatcaataaataacttcagcttatacttagtaccattaacctcctgaattaattcaaatatacacatttacttccacaaaagtttttttaaaaattgagagcaatccatgagagttatttttgttagttatttatgtagatgtaaagaaaaggttagcaattttgagttttaagttagacacaaccacttaagagc

SEQ ID NO: 703088 - DNA, 1371 bp, Homo sapiens
ttaaaaaacctcaatgccctacttggatcaattccaagtagacattttacacatctatgttctcaatatcttttgcatccttgtcctctctatccttagtataacgtcattagcttggattctcacaatttttcatttgtactgttagtgaatactcttaattgatcccctgttctartttctgtcttctttatttcgtcttattcatggttacctaatggccagctttaaaaatctgttaaacttttgctaaaaaaattttgaaacaaatccctctttgtttatgaattagaacccaaactcctttgactgacatttaaagctctttatgacttgattctagcctattttttcagactgatctttcatttcccctttcgtgaactttaacgttcagccaaatacgcattctttatgttgcctctataggacccacgcttcacagcctcagtgcattaactcacgtcgtatcttctgtctgaagtgaacctgctcacctgacatacatatgtacagcccaaatctaacggttctgcaaggtcctgctgaaacgcctcctccaggatgctcattcattcattcaacaaacatttatttcaggtcttactcatcagcctctttcctaggccctggaaacacagaggagaagaggcagaaaaggtcctcagcctcagaagatttgcaaatctctattgggaagtaatcttgtcccttgatcactcataaaaatccattgattcttttcttgtgctaattttagaggtagtgtaagtagagtaactaaatattaagatcctgaaactgtgaccttgaaaaagttttggaccttctttgggcttcagttttcctttctgtgaagtgggctattaatagtacctatcacacagttgccgtcaaatttaaacacattattaaatacaaaacacttagaatagagtttggtaaacagtaagcactaaataagctttagttattattattattattgttgccactgtcatttttggttgtatattccccccacattagatttatatacttttttgaggctgggtaagatagcttacagttatggtgttttggggttagtgtgaacttttaagtcagatagagctgtttgagtccagctcagcaactcattaactgtgagaccttggccaagttacctttctgtaccttactttttacatatttaaattctgcagagcaatacctaacagagttgtcacagggatttaatgaggtcgtatttgtatatggcctaatttattgtctgatacgtagtatgttcctcccaaacgatgatgaaggtgataatggtgatgatgatgagcagagacagtgataaaattatcattctgacattttcta

SEQ ID NO: 703089 - DNA, 1371 bp, Homo sapiens
ttaaaaaacctcaatgccctacttggatcaattccaagtagacattttacacatctatgttctcaatatcttttgcatccttgtcctctctatccttagtataacgtcattagcttggattctcacaatttttcatttgtactgttagtgaatactcttaattgatcccctgttctaatttctgtcttctttatttcgtcttattcatggttacctaatggccagctttaaaaatctgttaaacttttgctaaaaaaattttgaaacaaatccctctttgtttatgaattagaacccaaactcctttgmctgacatttaaagctctttatgacttgattctagcctattttttcagactgatctttcatttcccctttcgtgaactttaacgttcagccaaatacgcattctttatgttgcctctataggacccacgcttcacagcctcagtgcattaactcacgtcgtatcttctgtctgaagtgaacctgctcacctgacatacatatgtacagcccaaatctaacggttctgcaaggtcctgctgaaacgcctcctccaggatgctcattcattcattcaacaaacatttatttcaggtcttactcatcagcctctttcctaggccctggaaacacagaggagaagaggcagaaaaggtcctcagcctcagaagatttgcaaatctctattgggaagtaatcttgtcccttgatcactcataaaaatccattgattcttttcttgtgctaattttagaggtagtgtaagtagagtaactaaatattaagatcctgaaactgtgaccttgaaaaagttttggaccttctttgggcttcagttttcctttctgtgaagtgggctattaatagtacctatcacacagttgccgtcaaatttaaacacattattaaatacaaaacacttagaatagagtttggtaaacagtaagcactaaataagctttagttattattattattattgttgccactgtcatttttggttgtatattccccccacattagatttatatacttttttgaggctgggtaagatagcttacagttatggtgttttggggttagtgtgaacttttaagtcagatagagctgtttgagtccagctcagcaactcattaactgtgagaccttggccaagttacctttctgtaccttactttttacatatttaaattctgcagagcaatacctaacagagttgtcacagggatttaatgaggtcgtatttgtatatggcctaatttattgtctgatacgtagtatgttcctcccaaacgatgatgaaggtgataatggtgatgatgatgagcagagacagtgataaaattatcattctgacattttcta

SEQ ID NO: 703090 - DNA, 1043 bp, Homo sapiens
ggtggttttttggtgtttttttttttttttggtctgttttaaatacacataccctgttgccgcttgtaggagatataagactctcctgaggaaaagcttggtcaggtgtacctggagaaagctcccaggaggttctaataccttcccactgccacttttacctctttaagaatacaaagtacttcccagccgcttccatgtccccattcctttgacttcggctgaaaacagctactctttccttcaatcagctaatttgacgttttacttcccgaggaatcatttgtgtcctgtcagcctatggcatgagaactactcctgcacttttcttaacccctgcattcagaactaaaatcatacatttgtttcatacttgttacacagtgctcaatacatgttgttattgttaagaaaagcaaaagacctattcattatctagccttctccatctccttgtatttgtgctatgcaatctgtcaatcttcataatttcctctttaggagttggcactttctcagaagataatttccttattgctgaattttgtcaagmaaaccattatgccatgatgtttaagtccccttttcattttactgacatttaaatcacctagaaatcatcttagctcaatcccaacattttactgagaagaaaaccaagaccatgaatggttaagaaataactcagcaaaggtcagactagcagaactttgactagaatcttggtcttactacatagtggtccagcagttttctgctatagcacattaccactccatcgggaattaattatacacatatttaactctcagtgatgagtacctatcctatgccaggccctatgctggatgctttcatacacttatttaactgaggattgacataagaatatcttttaaattaaaataggttatcaattcaaggcaaaaactacaaactcattataatcaattttgggaggactttgtcctaaaaggaatttcaggtaagaacactttgaatcagtgggaccactcaacttaaagactgtctactcttttccc

SEQ ID NO: 703091 - DNA, 1043 bp, Homo sapiens
ggtggttttttggtgtttttttttttttttggtctgttttaaatacacataccctgttgccgcttgtaggagatataagactctcctgaggaaaagcttggtcaggtgtacctggagaaagctcccaggaggttctaataccttcccactgccacttttacctctttaagaatacaaagtacttcccagccgcttccatgtccccattcctttgacttcggctgaaaacagctactctttccttcaatcagctaatttgacgttttacttcccgaggaatcatttgtgtcctgtcagcctatggcatgagaactactcctgcacttttcttaacccctgcattcagaactaaaatcatacatttgtttcatacttgttacacagtgctcaatacatgttgttattgttaagaaaagcaaaagacctattcattatctagccttctccatctccttgtatttgtgctatgcaatctgtcaatcttcataatttcctctttaggagttggcactttctcagaagataatttccttattgctgaattttgtcaagaaaaccattatgccatgatgtttaagtccccttttcattttactgacatttaaatcacctagaaatcatcttagctcaatcccaacattttactgagaagaaaaccaagaccatgaatggttaagaaataactcagcaaaggtcagactagcagaactttgactagaatcttggtcttactacatagtggtccagcagttttctgctatagcacattaccactccatcgggaattaattatacacatatttaactctcagtgatgagtacctatcctatgccaggycctatgctggatgctttcatacacttatttaactgaggattgacataagaatatcttttaaattaaaataggttatcaattcaaggcaaaaactacaaactcattataatcaattttgggaggactttgtcctaaaaggaatttcaggtaagaacactttgaatcagtgggaccactcaacttaaagactgtctactcttttccc

SEQ ID NO: 703092 - DNA, 1043 bp, Homo sapiens
ggtggttttttggtgtttttttttttttttggtctgttttaaatacacataccctgttgccgcttgtaggagatataagactctcctgaggaaaagcttggtcaggtgtacctggagaaagctcccaggaggttctaataccttcccactgccacttttacctctttaagaatacaaagtacttcccagccgcttccatgtccccattcctttgacttcggctgaaaacagctactctttccttcaatcagctaatttgacgttttacttcccgaggaatcatttgtgtcctgtcagcctatggcatgagaactactcctgcacttttcttaacccctgcattcagaactaaaatcatacatttgtttcatacttgttacacagtgctcaatacatgttgttattgttaagaaaagcaaaagacctattcattatctagccttctccatctccttgtatttgtgctatgcaatctgtcaatcttcataatttcctctttaggagttggcactttctcagaagataatttccttattgctgaattttgtcaagaaaaccattatgccatgatgtttaagtccccttttcattttactgacatttaaatcacctagaaatcatcttagctcaatcccaacattttactgagaagaaaaccaagaccatgaatggttaagaaataactcagcaaaggtcagactagcagaactttgactagaatcttggtcttactacatagtggtccagcagttttctgctatagcacattaccactccatcgggaattaattatacacatatttaactctcagtgatgagtacctatcctatgccaggccctatgctggatgctttcatacacttatttaactgaggattgacataagaatatcttttaaattaaaataggttatcaattcaaggcaaaaactacaaactcattataatcaattttgggaggactttgtcctaaaagsaatttcaggtaagaacactttgaatcagtgggaccactcaacttaaagactgtctactcttttccc

SEQ ID NO: 703093 - DNA, 3279 bp, Homo sapiens
tcgggaggctgaagcaggagaatggcgtgaacctgggaggcggagcttgcagtgagctgagattgccccactgtactccagcctgggcgactgagtgagactccgtctccaaaaaaaaaaaaaaaaaaagaaagaaagaaaagtaaagggaaaaaagaatggatactccataggcagagcagccttcctcttcttaatgataattatcatcagatctatagtagcctctggaatgatggagttagaagatttcattctttctttcctggatccctttagaaattgaattcctaattgagtgatgaccagccgcatggcaaatggaaagagcagaggccttggccttagaaaagcctagattcaagtcctaactctataattaaaactaaatgatcaaattacttctctaagtattctcatctgttaaaaggggtaatagtacttacttcttaaggctgtggtagaaaacaaatgaaatttttactggagttaagcacctaccacaaggtaaaagggacattggtttcactcagttccccaaaagtacctgaattgtaattcaggaactaaaaaagtaagaagcacaaatagacacttttagaggaagttctaggcaacatctttctccctgacaggatagtctgcaggagtatatgataggaatttggaatgctagcacctagaatgagatggtatttaatttccacagagctcctgtgtgtacaagggtatacttctgaaaatctgtatctcttttcttagaagctggctctttcctggcctacagttataatctgacctacataatgccttcagggccagacattggagtcagaagggtaccctgtggtaaaactcaggaatattcccccggaatcaggagttcaacctgtgggaactcttttggctctaagatttcctaccgtagcgtttttgaatgaactgtgactcaattctagaagctgtaccttaagggtacagcttgaggccagaaccacactcagaaacagatcctggagttctaagaatttgatcctgtaagagtctcgggagttcacaaagtaggtgagatggggcacttgggtgatcagagagatagggagtttagaagggcagaggtggagagaaggaacagggctcattgcctctgtttataaggaaacacacacaaattcaatatacagaatactggtaggtggtttttgagaattatctggcagaaaacaaagtagtgaacagtgaggaaggacttyatgatggggctagcatcccttctttgtctttggaagatttatatttcttttgggcccctaatcctttgcgagacaggttagtgattctttcctgaggttccatagctcccaatatttatctgcctctttgcttgaagttataaactatggtaggacagcagaggtcacgatagtaaaggatgaaactggaagtagaagccagggcaacaaattcaagtagagattgcaaggtccttcagctaactctctgtactctctatctcaatggatcttaggctttaggccagaatctttcagaaatttctttaatgtcactaacaacgtctgaaaacaggtcttttccctcttccccttcctcttgtttcttagggttatgcaaaatttaactcaatataacaagaagtcttaatcctgaatgctataggaacaagaaatggtcttctggttgcaatctagaaacaggaccaggaagtccttctgatggggttggctggcatcattgagtccacagtagagaaaactgatacctaacctgaagaactgccctaaaaagaggggttacagcatctgcatcccagattgtgggaacagagatggcccaggtaaacgaagggaaatgtttcagtaggttaatcccaatatagatgaatggggcagagaatagtttatcacttctatccctctgcatccacccaaaacttcttaatctcacctgaggcaaattcagattgggacaaccctaagtctcaatgttctcaaggcccaccaagagaagctctcaaaagcaaaatacctttctaactaaattttatggaaaatagatccagatttcaagttaatgatgaaaaaatacattttagctttcatttttctagggttgttagtagtactacctttgggaagatagaatagtagtgaggaaaatcaagatattactagtttttagtgattttcttcttttctggatcatccaccttcctagttttccactcttcccactgacagtaattctagagactggaacatgacatccccagatggcattttcttatagtcaaatcctaagtaagttttaattatctttgtttctattgagaaaaacaataggctataagtttatgattcagaaatcataaggctgaagaatggggactaccatgaaatgtcatgataaaatttgacaaaaagctttgatggtgtgaggctataagaggtgattttctgagagtttggagtgtgtgtttgcttgtaaatgtgtatttctggagtatgatctcaaaaaggtgctaaaagaggagatatgctcagacatatacccatcctgtgatgctgagtttttaagtctcattacactgaaaaggttttacagtaaactttttctttaaaaggccggttagtaaatattcattactttgctggccacctggtcactgtcacaactactcaaacctgccattgtagcacaaaaacagccagagaccaaatgtaaacaattgagcagggatattgaaatatgaatttcatacaattttatgtatcataaaatgttattattttgattttttcaaccattaaaaaatgtaaaactattcttatacaaaaataggctgcaggctgagttagcttaagagtttttctaagtctacaaaatttcattgtgcattttgggaagaaacagggcgtgggttgtagtgtcaactgtgagcgtttacaaggggagagcaagctggatattccaagtgaatatccaacttaaatataggacaaaatcagacattatggcccctcttgattaacagaatatgtgcacactaagaataaagacaaatagtactaaaagacgttgtaaatactaaaagacgtggtaagtatactctatgacatttgcataatgacaacattagctaatgacacatttctcaaaacttttccccattgttaagcaacacatggctatattgtggtgatagtttcctcccacatgatagtctctttggctctttttcttacttcctaggagatatcc

SEQ ID NO: 703094 - DNA, 644 bp, Homo sapiens
ggacacttttgccttggtgggcctcttcctttacaaaaagacattacaagttatctttgtaaagacagctgggtgcagaggctcatacctgtaatcctggcacatcgggaggatgatgtgggaggattgcttgagtcccggagcttgagactagcctgggcaacacagtgaaatcccaactccacgcacatacaaaaataaaattagctgggcatggtggtgcacctgtagtaccagctactctggagactgaggcaggaggatcgcttgagcctgggaagtcaaggttgcagtgagctgtgattgagctactgcactctagcctgggtgacggagcaagaccccacctwtaaaaaaaaaaaaatgactagtagaatccaggctggatcacattcattttttctcccaatttttaaagaaaatattttttaggagttcctgaaattatcttaggctcttggcactgtgtccactgagcgtaatggagaaattggccctgcctgtaaaagaaacttccagacccaccccaggggctccaaaatgtcaaacgctatttataaactcttctcgaaaaacttgaatcttttcgagtggttctggacatataatcatatcatgaattaggaagttgtggtttcatagaa

SEQ ID NO: 703095 - DNA, 644 bp, Homo sapiens
ggacacttttgccttggtgggcctcttcctttacaaaaagacattacaagttatctttgtaaagacagctgggtgcagaggctcatacctgtaatcctggcacatcgggaggatgatgtgggaggattgcttgagtcccggagcttgagactagcctgggcaacacagtgaaatcccaactccacgcacatacaaaaataaaattagctgggcatggtggtgcacctgtagtaccagctactctggagactgaggcaggaggatcgcttgagcctgggaagtcaaggttgcagtgagctgtgattgagctactgcactctagcctgggtgacggagcaagaccccaccttwaaaaaaaaaaaaatgactagtagaatccaggctggatcacattcattttttctcccaatttttaaagaaaatattttttaggagttcctgaaattatcttaggctcttggcactgtgtccactgagcgtaatggagaaattggccctgcctgtaaaagaaacttccagacccaccccaggggctccaaaatgtcaaacgctatttataaactcttctcgaaaaacttgaatcttttcgagtggttctggacatataatcatatcatgaattaggaagttgtggtttcatagaa

SEQ ID NO: 703096 - DNA, 1102 bp, Homo sapiens
atttatagtagtggtcataagcttgctctctgaaatcacttgtagatttgcttcaatatgctgccacttactaatcacctgaggtcacgagttcgagataagcctggccaacatggtgaaaccccatctctactaaaaatacaaaaattagctgggtgtagtggcacgcatcggtaatcccagctactcgggaggctgaggtaagagaattgctcaaacccgggaggtggaggtttcagtgrgctgagttcgtgccactgcactccagcctgggagacagagcaagactccagctcaaaaaaaaagaaaaaagaaaaaagaaagaaaagaaaataccctgccacttagaaagtaataaatactggaattttatttcctcttctgtgaatcattttcctcatctataaaaaggggcaatgccctaccacactcagctatcaagaagcttaaagaaaattttctatgtgataatgaccatattcacactaacgtatgacttttttctgctttcttgactctgatttttatagtccaatttaattgaccttatttttcaaattactcaaggaaatgtgtagggaatgattgaacaggtaaatatgccttcctgtaactgcattttggtagtttttatatgatctagtgactaagaattccaggaaacatcctcagtttctctacttatattatttggtacaagaacaaactttaatgtggctcaaaatgtcccaattgaacaacttaatacccacggccagtatgattgtgaggatccattaggctttacatgactttcagttctttatcttttcactaaacagaaaccctaagtgtctcttccagagtaaacaaaaatagaagggattcattccaaatctcaaatgtaccaccaggttatttttttttctacacctttctaagtcatcatgaaaaaaatgccttttgaaacagcatggtgttcctgctctcaatattgcttttacagaaaggttgaggaccattacctcttgaagtcaaaggaagttgccagagagtgtgtcagggggtaggggagaggagggataggtagaataagataaaactctgatgacctaactcaggg

SEQ ID NO: 703097 - DNA, 1047 bp, Homo sapiens
cattattcatctctaacaaataagaaaaatcaatatataaaatatttgaataaatgacttaataagtttgatttaatagatataatttaaattttgtgtcctacaggatattaacatatgtttgtaaactaccgttcacattttaagaaagctgacatttgaggcagtaaatgaaattttagtaggttaagaatggacactttttggtgattccattgaaaaaatattaaagattaaaaaaaggttgactggccgcgatggctcacacctgtagtyccagcactttgggaggctgaggtgggtggatcacctgaagtcaaaagttcaagaccagcctggctaagatggagaaaccctgtctctattaaaattacaaaaattagatgggcgtggtggctggcacctgtaaccccagctgcttgggaggctgaggcaggagagtcacttgaacccgggaggcggaggttgtagtaagccgagaccatgccactgcactccagcctgggcaccaagagtgaaactccgtctcaaaaacaaaaacaaaaacaaacaaacaaaaggtttacaaagtaatgttatggagaatggtggagtagggagtgctaagtatccctcccttcactgaagctcgattaagctgcccaaaactgtcagaataaactctttcaaaactctagaatctaaaaagaaacttataacaatcagggaagtacttaatgaagagagaagctgctaaattttgatgacagcattttggatttttttgcttatttgcttataattctccattattcagctaagcagtggtcacaggactgacaccagctaacgttcttggtgtcgcttgatgccatcccagggggccgtatggaccttgttctcaaagaattgtggctggagttttgatctgtctggtgccaaccgagggatgaattctatgtcttgtctttgtttcagccctttggaacactgtcaggactggaatggcctcctggattgtggctgtcaaaagcatttaatagcatatacaggcacctgccaacatac

SEQ ID NO: 703098 - DNA, 927 bp, Homo sapiens
ttattaaatgcaagcagtctttgcttttccaggcaccacgataactgaaatttgtgcatattagaacaatgtcttcactttacacagttctaataagcacaagttacagttagatcactactatgcacaacataaactgcctgtagttgagacttttttccttcttttcctcatggtattttagtaaggggctaaccttaactaaattgccaaataataatttttgatttgaatttatcttgttggtattccactatagaccagagagtccttgtcttaaacacaatgtactcaatgattcaacagctgtgttgtttttaaagtttttttcatatmctaatatttcataattctctgtactttctgtctctgaaggaatttcttgccattttttggttggtttgggacctttccaggattatagaaagaatggatttcaaaaaccaagtttctgctttttctgttgcaagcaatgtccaggaagctaatgtttataatatttccctctcttgatcttttcattcctcaaacctgggttagatttgaggtcaggaccattgtcctattggggaaaaggctgtttctaagggtgtcacctctgctgccagcctcagggctttgcaaccaggtccacaggtgttcccacacccatgttacaagctgaaatgtgagtttgacaactttggttgctatgtctgtcatggtgagcacaaaatacatagtatttggtgagattacttggccaaatgaccaccaaatttcctgtacaccaaggaatacttctcctttcactttcttcattttgaacagctctggttccctagactcatccccactgatatttttgcttgtttttttaatatggcattggtagaatatctattttacatgagtgaatttctcggtaaaccaattcactcccttaaa

SEQ ID NO: 703099 - DNA, 927 bp, Homo sapiens
ttattaaatgcaagcagtctttgcttttccaggcaccacgataactgaaatttgtgcatattagaacaatgtcttcactttacacagttctaataagcacaagttacagttagatcactactatgcacaacataaactgcctgtagttgagacttttttccttcttttcctcatggtattttagtaaggggctaaccttaactaaattgccaaataataatttttgatttgaatttatcttgttggtattccactatagaccagagagtccttgtcttaaacacaatgtactcaatgattcaacagctgtgttgtttttaaagtttttttcatatcctaatatttcataattctctgtactttctgtctctgaaggaatttcttgccattttttggttggtttgggacctttccaggattatagaaagaatggatttcaaaaaccaagtttctgctttttctsttgcaagcaatgtccaggaagctaatgtttataatatttccctctcttgatcttttcattcctcaaacctgggttagatttgaggtcaggaccattgtcctattggggaaaaggctgtttctaagggtgtcacctctgctgccagcctcagggctttgcaaccaggtccacaggtgttcccacacccatgttacaagctgaaatgtgagtttgacaactttggttgctatgtctgtcatggtgagcacaaaatacatagtatttggtgagattacttggccaaatgaccaccaaatttcctgtacaccaaggaatacttctcctttcactttcttcattttgaacagctctggttccctagactcatccccactgatatttttgcttgtttttttaatatggcattggtagaatatctattttacatgagtgaatttctcggtaaaccaattcactcccttaaa

SEQ ID NO: 703100 - DNA, 1154 bp, Homo sapiens
ggatgagagagaagcctaattctaaaagaatataaatgaagagttatgcataagctatttgttattaatgatttctaatgctaggagacatcttacatcagcagacatattttcttaacatgttttctgaagttttatgacaaatatgatcagtaataagaaagttgaatttatgccctggagatctgtggaactttgaacttgagagagataatttataggatacattttaaataatcacgctgattaatccttcaatttgttcctatattccatggtttctgatcccatgaaaacttgacagaattactaccgttttttgaaggaaataaaatagctatttcccttcaataaatgaaaggccgacaaaagaatatatggcaaatcataatataataaacactataagattatatttgattcattatattttaaagtgcagaagatgcaataaagtaataagtaaataaaatagcatattgctatttttatagaactttcttaagtttccccaacaactacatgtttgatttttagtcctatttatatttcctattgcattagtataacataagttgagcttcactagtggatatggattgatgagaccctgtcatcaagcagggtctcatcactggaccattgattttggtccagaattttccttttgtatctgatagatgattttaacaatttcagaaaataatattgatagatgatatcgatatagacatatagatacacatctatgaacactctcttgattcatgttggtaaaaattaacattctgtgtctatttctctctaaatgattttggaatttacattaaaacattgaaaaacttagctatgcttttataataaagtctcaagtgtcctcaacttttctttaagtcaaatgtgawccccagggaaaattgttgcagagatttgcttaaacatctcaagccaataataattaattctttgcaattttgatctttgtatggcccagaggccacatttcaaagttcaggaagattgcaagtgtactggcccattctcacgctgctatgaaggaataccacagactggacaatttattaaaaaagaggtttcattgactcacagttccacatggctgaggaagcctcaggaaacttacaatcagagca

SEQ ID NO: 703101 - DNA, 611 bp, Homo sapiens
aggtgacagggaatgagtcagctacttggtgctgtgatgaactcattgcatacacctgtcccgctgaaaactgcatgcacatgcctggagaacatgttgtctggggacacagcccagactgactgtgagactgtgcccacatgcagggaaagtgagaggggacagcagaaaggaaaagctaagacaactgaacaccatttggtctttgaatatgctaccctaaactcaaatgcatcagccacaaagatagaagaattaccagctcagatgtctgagtacagcttctgaccacaaagctatgcagacacaagagtggtcttcaagaggtcatgatttaaattaataataagaatttttttaaaaaaaatttaactgaggcacacaaaatcatatgccgagataagcatacattttataggttttgtccaggcatgttamtaagtaaacaagcaaccaaacaaacacacagcaaaataacaataattaagaaggaaaaaaaatgaatccagatacacaatcatatagtatttaaaatgtccagttttctaccaaaaattacattctaacaaaaaacatgaagatgaaaatattatggtaaaataatatcaaga

SEQ ID NO: 703102 - DNA, 964 bp, Homo sapiens
tttcttttaagtttatatgtagatatatctgtgtgtgtatgtgtgtgtgtgtgtgtgtgtgtgtgtatatatatatataaaaaatttccctttagttatatatatatataaaatttccctttagttatataatgtggttcagaaggtaatacaaacaataagtttaatatctttcagtggagtttgtaatgccccttgcagcaattgatagccaattgcaaaatactttgttccatctcaaaaactcctgtgggtttcttatatttaatcctcttccaatatttcacatctctttatccatcaaaccagccagtctgtaaattgttcaagatacaatttcaggacctcagataaatgaggaattaagccatctattaattcatttattcaaaaatcatttcctgtgttagatgttggaaaagctaggagatttaaatataaaagaaagaacacacatattactgaccatattgacatatgaattgttacaaacataaggtgaattkcagacattaaaatcaatttaagctgcttgagtaatctagcattctgtgagataccaaggcttacaaactactctttttttctctctcaaccagccatatgcacactgacaattaatatttgccatgattctttacttttaaaactttttatttgcacaaaaatatttaaagagcttgaccaagagttcaccttttctttcatagacaatttgaaaaagtatatagaggttttcttataattggtaaaatttgaattaatttaattttcttgcaaatccaactgctttgatgtatttggttagaattataatgatccagccagaactgcggaaatgctaaaaagagttagatgctaatgattgtccagtgcatcctgccacactgataagagagggatatttggggggaaaaacaattcttcaaggattagacaaactcttctgtttgaaaaaaaaaaa

SEQ ID NO: 703103 - DNA, 964 bp, Homo sapiens
tttcttttaagtttatatgtagatatatctgtgtgtgtatgtgtgtgtgtgtgtgtgtgtgtgtgtatatatatatataaaaaatttccctttagttatatatatatataaaatttccctttagttatataatgtggttcagaaggtaatacaaacaataagtttaatatctttcagtggagtttgtaatgccccttgcagcaattgatagccaattgcaaaatactttgttccatctcaaaaactcctgtgggtttcttatatttaatcctcttccaatatttcacatctctttatccatcaaaccagccagtctgtaaattgttcaagatacaatttcaggacctcagataaatgaggaattaagccatctattaattcatttattcaaaaatcatttcctgtgttagatgttggaaaagctaggagatttaaatataaaagaaagaacacacatattactgaccatattgacatatgaattgttacaaacataaggtgaattgcagacattaaaatcaatttaagctgcttgagtaatctagcattctgtgagataccaaggcttacaaactactctttttttctctctcaaccagccatatgcacactgacaattaatatttgccatgattctttacttttaaaactttttatttgcacaaaaatatttaaagagcttgaccaagagttcaccttttctttcatagrcaatttgaaaaagtatatagaggttttcttataattggtaaaatttgaattaatttaattttcttgcaaatccaactgctttgatgtatttggttagaattataatgatccagccagaactgcggaaatgctaaaaagagttagatgctaatgattgtccagtgcatcctgccacactgataagagagggatatttggggggaaaaacaattcttcaaggattagacaaactcttctgtttgaaaaaaaaaaa

SEQ ID NO: 703104 - DNA, 1474 bp, Homo sapiens
gtggccattttactaggctaaaatttaattttatcctgttagtggcacaaaagttatgttcacaaaaggttaccttcccaagctcataatctcctaaccactcaattctcagtaaatgatctcatttcctactttatcctttgaagaaaaaattataagaacaaaatttatttaattattgcaccaaaattacctcagctccagtcatcctttctttcttctctaaatggaatagataattgctcctgttcccatttcttccggccttctcaggtagagtgatcatctctttcacctttatctttacggaatcagctctaatgctactttgataccaaataaaacaaaaatttacccatattgrtagccccagtgtctagtatcaattccattcagttgcctcctattcttggctgctttgagtctctggtctgctaatgttgtctgctttcactgtcagttcaataaacaaaccacagtgacttatccaatgttgcaaaagtgctccaaatattatccaagaatccccacaatctctcctctgccaccctgcttctaataaacaaaacaaaaaactccattatagttctcagtgagcctagattagttttacaatagccataccacaatttcactaggtaaatggaaagatataaacattatagtaacattttattttacccaaacatgtcccagactgataatatgtacaataacgcaaatatattttcaagttcaaaattgaaaacaaatatgtcacttttttaacttctaagatttgtaacggaaaactcagcccctttcttctgtaataatatattgaatttgagttcccatatctaatgatgcattccccattatgcaatttagattttaaatcttgcatattgtcattaaactatgatgtatcttatcatgccaatatcaatagaaaacatgcactgttcgaagatggttttataaataaagtgctgaaatatatgttctttgttgtttactaatcaaattttattttggaataattttaaatttacagaaatgttgcaaatgtaatacaaatatttttagtacacctcacaaagttttagtttctcctaatggcatcttatatgacaaaaacatgttttttttcttaatctaagaagcccacattgttaactctagactttgttcagatttggcccagtttttccacaaacataatttttctattgtgggatccaatccaggatactgcattgcatatagtgattatgtctacttagcctattctggtttctcagtttttcttcattgttattagtttaacaattttgataagtacttcagaagtattttgtagaatgtctcccaatttcattcagtttgaatttctccggattcctaactcataatcagactgggttacaggtctctgcaaggaataccacagaagtgatgtgcccttttcttcgcatcatattaggggttcata

SEQ ID NO: 703105 - DNA, 631 bp, Homo sapiens
ttaaactataaaattcaggtaattaatactagttgttttaacaaactaatcacaaaatcttgatgcctccacataataaaggtctgcttatttatcactattcactcaggcawtcatccaggctgtctctgacacaaagagtaacctcatttcagtcagctataatgtcgttctagatattgttctgtgtgtatgtgaataataaagtcacatcattaatgtattgtggggacagggaagaatgatgaaagccaagactataccaataagttacatgaggtggagtaagcaatatacttttttgtaattaccactatgtccacagatctatgaagcaaatattattcatttacacaatcatatatctgttcaacaagcaattattaagcactgaggcagtagagttaaaagcgagggctatagattcagagaagcaagttgtttacattctgagcctgtttctccacctgtaaaatgcaaataataggacctacatcatgtgattattgtactaagcactcaagaaatgttatttattattactactgctgctgctattactaaaacaaacacaactacaaagatgagggtatagcagttgctgtcttacacactgagactacaagaaaaa

SEQ ID NO: 703106 - DNA, 631 bp, Homo sapiens
ttaaactataaaattcaggtaattaatactagttgttttaacaaactaatcacaaaatcttgatgcctccacataataaaggtctgcttatttatcactattcactcaggcattcatccaggctgtctctgacacaaagagtaacctcatttcagtcagctataatgtcgttctagatattgttctgtgtgtatgtgaataataaagtcacatcattaatgtattgtggggacagggaagaatgatgaaagccaagactataccaataagttacatgaggtggagtaagcaatatacttttttgtaattaccactatgtccacagatctatgaagcaaatattattcatttacacaatcatatatytgttcaacaagcaattattaagcactgaggcagtagagttaaaagcgagggctatagattcagagaagcaagttgtttacattctgagcctgtttctccacctgtaaaatgcaaataataggacctacatcatgtgattattgtactaagcactcaagaaatgttatttattattactactgctgctgctattactaaaacaaacacaactacaaagatgagggtatagcagttgctgtcttacacactgagactacaagaaaaa

SEQ ID NO: 703107 - DNA, 631 bp, Homo sapiens
ttaaactataaaattcaggtaattaatactagttgttttaacaaactaatcacaaaatcttgatgcctccacataataaaggtctgcttatttatcactattcactcaggcattcatccaggctgtctctgacacaaagagtaacctcatttcagtcagctataatgtcgttctagatattgttctgtgtgtatgtgaataataaagtcacatcattaatgtattgtggggacagggaagaatgatgaaagccaagactataccaataagttacatgaggtggagtaagcaatatacttttttgtaattaccactatgtccacagatctatgaagcaaatattattcatttacacaatcatatatctgttcaacaagcaattattaagcactgaggcagtagagttaaaagcgagggctatagattcagagaagcaagttgkttacattctgagcctgtttctccacctgtaaaatgcaaataataggacctacatcatgtgattattgtactaagcactcaagaaatgttatttattattactactgctgctgctattactaaaacaaacacaactacaaagatgagggtatagcagttgctgtcttacacactgagactacaagaaaaa

SEQ ID NO: 703108 - DNA, 631 bp, Homo sapiens
ttaaactataaaattcaggtaattaatactagttgttttaacaaactaatcacaaaatcttgatgcctccacataataaaggtctgcttatttatcactattcactcaggcattcatccaggctgtctctgacacaaagagtaacctcatttcagtcagctataatgtcgttctagatattgttctgtgtgtatgtgaataataaagtcacatcattaatgtattgtggggacagggaagaatgatgaaagccaagactataccaataagttacatgaggtggagtaagcaatatacttttttgtaattaccactatgtccacagatctatgaagcaaatattattcatttacacaatcatatatctgttcaacaagcaattattaagcactgaggcagtagagttaaaagcgagggctatagattcagagaagcaagttgtttacattctgagcctgtttctccacctgtaaaatgcaaataataggacctacatcatrtgattattgtactaagcactcaagaaatgttatttattattactactgctgctgctattactaaaacaaacacaactacaaagatgagggtatagcagttgctgtcttacacactgagactacaagaaaaa

SEQ ID NO: 703109 - DNA, 640 bp, Homo sapiens
ggtgcatctgccatcctgggtcatcccaagggtatgcttaagtcactgttatcagrtgcatttaccctacaggaacaccttcacatcatgttagcccaattcctttctttctttgtatcattgcttccctttaaatctaaaaagaagattaagtcttccatgccaagccaagcccaattactacaatcagtctttatatggcagtaccccacccatctagactgccgactaacttctctcctcctgatagtctctgctttatgtattttccttaaaaaccacaggaaccagctggatccaggactccagccacaatccaagggccagagtagagggttctaaaatttctccataaaatttacttctcgatacaagaaagcaatataagccataatggctgacattccagaaaaacactcttaccaagccccggctctcagtaaactcaaacgcatctctctgctcaaacgttttgtggttccaagagaaaacaaatacaccgtgcacatttttctttctttaaagattggaaagaaatgaagaaaagacttgtcttgtccatgtttttatagaaaaatataaagcatgtctcctctgtgacagatttcttttcctgtaaatctagcaagcccatgagaga

SEQ ID NO: 703110 - DNA, 635 bp, Homo sapiens
agttgcctgttacaacaagtatcacccagagactacggccaagtaaaagaaatttatgaaaactgcataaacaaaggtgacactgtctaagggtctcttaaaagtctcccagcctgtaggggtttggagaaactgcagcagcctcctcagtgtgtaatgcacacattgtattttgcactatccaagaatctcatacatttcaaatatgagatgtgctttgatgggtcagtcccatcccccaccgcaggaaagaagaaatcatgcctacgtgttgcaaacaatgcattttattcaaccccagtctttatgggggcctattttgtggcaggccctgtgctagtgctgtggatgccagactgaaaaggcctcatgtggaccttccactggccacattttgctgggagacaragatgcttacacacagaattttcttgcagcatgaagatgcaatagacaaaaacccatgatcaaggttgccctgaaagcatctggtatcaggaaatgtggctcaccgtggatgtaaggtgactcttgaatagctttagttattccccgctgagatatagggtggggccagcctcaatatgtttttcctgtatgaatgactgtggaaggcctgctcgacccccgaccta

SEQ ID NO: 703111 - DNA, 1262 bp, Homo sapiens
tctgttccaccaaaggacatcctcatcctatataaacatatggatacatgcgcagtaaacaattccattggatcaccccctttcactatatctcctctgttcaagacccacaatgattccccactaccaatcacatcaagcctaccatcctttcttgagttaaggtaccatgttgaattgaaaagaggttggttttagacagacctgggtgtgcatactacccatacattttctttaaaatggagccaataatactaaatggatagggtttttaacaaaatatatgtgaattacctacttaaaattccctttgcctcctctccataatctgaccctactaatgccatcctattccatcactactgtaacctcaaatctgcatcacggccaagccaatcccctcattgtcaccctcttcccttgccaaagtacttccgtgcttccttagtgctggctactatcccctcttactacaccatgtgtccccaccctgcacacactaagatttctatgtatctgttcctgccccatttcttcaccccatccctacctcctctcaatgaagccaaccttaattttcatgaaccccaaaccactgcttttgtctctgaaatatcattatacttttaacccatgccacataattatcaacttcattgaacattatcatctgtggtttacatattttagtcttttcttctgaacactagaagttcccctaaggcagagatcagttcttatacttttcttaaggatcccacagcaccttcaaaattgtaaatggtgcaaatgatggcgttttgtaaaatgtcaagcagtaaggccgggcgcggtggctcacgcctgtaatcccagcactttgggaggccgaggcgggtggatcatgaggtcaggagatcgagaccatcctggctaacaaggtgaaaccccgtctctactaaaaatacaaaaaattagccgggcgcggtggcgggcgcctgtagtcccagctactcaggaggctgaggcaggagaatggcgtgaacccgggaagcggagcttgcagwgagccgagattgtgccactgcagtccgcagtccggcctgggcgacagagcgagactccgtctaaaaaaaaaaaaaaaaaaatgtcaagcagtatatgcaaagaagatgctcttatttgtcataaaccatggggacttgcctggaatcatgttgaaaccttagaattaccttccagttgggaaaaaaaaaggtagaaactaggccaagaatcctacc

SEQ ID NO: 703112 - DNA, 1262 bp, Homo sapiens
tctgttccaccaaaggacatcctcatcctatataaacatatggatacatgcgcagtaaacaattccattggatcaccccctttcactatatctcctctgttcaagacccacaatgattccccactaccaatcacatcaagcctaccatcctttcttgagttaaggtaccatgttgaattgaaaagaggttggttttagacagacctgggtgtgcatactacccatacattttctttaaaatggagccaataatactaaatggatagggtttttaacaaaatatatgtgaattacctacttaaaattccctttgcctcctctccataatctgaccctactaatgccatcctattccatcactactgtaacctcaaatctgcatcacggccaagccaatcccctcattgtcaccctcttcccttgccaaagtacttccgtgcttccttagtgctggctactatcccctcttactacaccatgtgtccccaccctgcacacactaagatttctatgtatctgttcctgccccatttcttcaccccatccctacctcctctcaatgaagccaaccttaattttcatgaaccccaaaccactgcttttgtctctgaaatatcattatacttttaacccatgccacataattatcaacttcattgaacattatcatctgtggtttacatattttagtcttttcttctgaacactagaagttcccctaaggcagagatcagttcttatacttttcttaaggatcccacagcaccttcaaaattgtaaatggtgcaaatgatggcgttttgtaaaatgtcaagcagtaaggccgggcgcggtggctcacgcctgtaatcccagcactttgggaggccgaggcgggtggatcatgaggtcaggagatcgagaccatcctggctaacaaggtgaaaccccgtctctactaaaaatacaaaaaattagccgggcgcggtggcgggcgcctgtagtcccagctactcaggaggctgaggcaggagaatggcgtgaacccgggaagcggagcttgcagagagccgagattgtgccactgcagtccgcagtccggcctgggcgacagagcgagactccgtytaaaaaaaaaaaaaaaaaaatgtcaagcagtatatgcaaagaagatgctcttatttgtcataaaccatggggacttgcctggaatcatgttgaaaccttagaattaccttccagttgggaaaaaaaaaggtagaaactaggccaagaatcctacc

SEQ ID NO: 703113 - DNA, 2268 bp, Homo sapiens
cctctactgctacccgagggaccgtggtatttcttttttctatctcaggtgtggcagaatggaaaaaaaacatactgaggtcccaaccctcttaacaatcggtgccctgggagatacaggcactttaatttcccagacccgcttctcccttcctaaaaaagagaagagcccgacactagaaaatccaagtcgcttaccacaaagcttcagaataatgcctgcattccaaccaaaggggtaagtgagacaaaaagttaagaccaactgggatctagcatgtctgatacctggaggcaaggaggaactggttcctgatacgtctcttcttgtctagttcaattccaaatatcacaaacaatctaacccactgaggcaaagatcacttctgcttttatgacttttctttggtcgggggaggtgatgtgaagaccacaatcaggctaagtgatattatatccttattttaaaggataatatttcattactgctattcgtagtactctgtgacagtttaattttcctattttgatgatggaaaagtaaaggtgacctcaaggcaccaagtggctaaagatgtccccctagggaaggcatgagcctttcaaataatttctttgcaacaaattaacattgagacttcctgtgtataaaggaattgaatgcaaaaatacataggtaaacacagtttttgtttttaaaagtttataatttagtgaagagaaggggacgtataaaaatgattaaaattaagggttgaataaagggttgacataggatagaaaagggctaattaaagtttcaggaattttgttataggagcatggtagaagaggtgattaatctgaaagagggtcttactagagatttcacattttcatagaaagggtgacatttgggaagctgccatgctttcagttattaaaggctcagattctgcagtcattcaacccaggttctaatccctgctctgccaattcctagtcaggtaacagggcaaattatttaatccctctactggtcagtgtaacagggacaatgaaaatacatactttatagattttgcagggaggattaaacgagataatgaatgtaaaatagcagtgcttagtaactaatccctaaattaatattagctattattattttaatctttcaccaaaccccatgaagtaggtgatattatccccacttgcagtattgagaagatggacatatgaaaattaggtaacctgctaatgtcacaaaatagacaaaggatatagaacacaaatttgggtcagtctgactccaaaacccaaattcttttccactataattttgttctggtccactgtcactcaataaactctgacctcctaccagaaagaggtcactggaactagtgagctcagcctagggacagcctgaaaacagagtatgattctaacagatacagcgctatcctatgaaagtcagagacaaagccaaaaggaaagtcaacaattatacagaagttatcacaacattcagtgaaactcaaaagatctaccacaatctgaaatgaagaaaactctacctggcatccaaatcccctcccttccctgatttccttattcctattaattaatgccaaacccattctctcaggtaacaaatcagagaacttacaaagataaacacatagacagacatgggagatatcttagagtctagtccaaacttgcatacgatgcagcaaactctacgacaatcctggcaaagccttatttccgagttacatgacaaagccagcatctgtgaccacaccctccagccatatgcctaacagttttcrttgtactgagtcatatcccacctcaaactttctgtggaatccaaattaataaatgaattaaatgattccatcatcttcaattcatacctttccttcaacttccatatctaggtggttaccaggctctgtcattctttttttcaaaaactttttgaaaaaagtgtgatctttttcattcccaagatagcagatcccagatccttttgtctcctggctgaaatctgtttcttcactctctctacactctagtacatccggcacatttttaccagatgagaagtccttcaatctaatttcagaacatgtcatctatgctcaaataacgactgggtctccatttattactcccagctagacattcaatgacagactatcaatggcaagcacatgggcctcactttgcctactctatcctacttcctgtattttccaatcaatgcacaccttccaacttg

SEQ ID NO: 703114 - DNA, 2268 bp, Homo sapiens
cctctactgctacccgagggaccgtggtatttcttttttctatctcaggtgtggcagaatggaaaaaaaacatactgaggtcccaaccctcttaacaatcggtgccctgggagatacaggcactttaatttcccagacccgcttctcccttcctaaaaaagagaagagcccgacactagaaaatccaagtcgcttaccacaaagcttcagaataatgcctgcattccaaccaaaggggtaagtgagacaaaaagttaagaccaactgggatctagcatgtctgatacctggaggcaaggaggaactggttcctgatacgtctcttcttgtctagttcaattccaaatatcacaaacaatctaacccactgaggcaaagatcacttctgcttttatgacttttctttggtcgggggaggtgatgtgaagaccacaatcaggctaagtgatattatatccttattttaaaggataatatttcattactgctattcgtagtactctgtgacagtttaattttcctattttgatgatggaaaagtaaaggtgacctcaaggcaccaagtggctaaagatgtccccctagggaaggcatgagcctttcaaataatttctttgcaacaaattaacattgagacttcctgtgtataaaggaattgaatgcaaaaatacataggtaaacacagtttttgtttttaaaagtttataatttagtgaagagaaggggacgtataaaaatgattaaaattaagggttgaataaagggttgacataggatagaaaagggctaattaaagtttcaggaattttgttataggagcatggtagaagaggtgattaatctgaaagagggtcttactagagatttcacattttcatagaaagggtgacatttgggaagctgccatgctttcagttattaaaggctcagattctgcagtcattcaacccaggttctaatccctgctctgccaattcctagtcaggtaacagggcaaattatttaatccctctactggtcagtgtaacagggacaatgaaaatacatactttatagattttgcagggaggattaaacgagataatgaatgtaaaatagcagtgcttagtaactaatccctaaattaatattagctattattattttaatctttcaccaaaccccatgaagtaggtgatattatccccacttgcagtattgagaagatggacatatgaaaattaggtaacctgctaatgtcacaaaatagacaaaggatatagaacacaaatttgggtcagtctgactccaaaacccaaattcttttccactataattttgttctggtccactgtcactcaataaactctgacctcctaccagaaagaggtcactggaactagtgagctcagcctagggacagcctgaaaacagagtatgattctaacagatacagcgctatcctatgaaagtcagagacaaagccaaaaggaaagtcaacaattatacagaagttatcacaacattcagtgaaactcaaaagatctaccacaatctgaaatgaagaaaactctacctggcatccaaatcccctcccttccctgatttccttattcctattaattaatgccaaacccattctctcaggtaacaaatcagagaacttacaaagataaacacatagacagacatgggagatatcttagagtctagtccaaacttgcatacgatgcagcaaactctacgacaatcctggcaaagccttatttccgagttacatgacaaagccagcatctgtgaccacaccctccagccatatgcctaacagttttcattgtactgagtcatatcccacctcaaactttctgtggaatccaaatwaataaatgaattaaatgattccatcatcttcaattcatacctttccttcaacttccatatctaggtggttaccaggctctgtcattctttttttcaaaaactttttgaaaaaagtgtgatctttttcattcccaagatagcagatcccagatccttttgtctcctggctgaaatctgtttcttcactctctctacactctagtacatccggcacatttttaccagatgagaagtccttcaatctaatttcagaacatgtcatctatgctcaaataacgactgggtctccatttattactcccagctagacattcaatgacagactatcaatggcaagcacatgggcctcactttgcctactctatcctacttcctgtattttccaatcaatgcacaccttccaacttg

SEQ ID NO: 703115 - DNA, 615 bp, Homo sapiens
tttgctgagtgtgtggggtttttcactatgcacttttcaccgttctcgtatgtattgttcagaggctaaaatcactgtaccagaagtagcaagcttttcacgggttgtttctattattacacgatggccagtttgggaagttttttagatgatataggttgaggtgtttccttttacctggtactcataatggaactctccaactgattctcttccctgatctcagtttaacttcaaacggaacaagaacaaacttttacctcaaagagagcatcarttcatgtcatggaaataaggaatgtttagtacaagcactgtctgtacagggaagaagcgagttctttccagctgaatcaaaagagctaaagagatgtaagtttcagaatatctgcgagtcagttcagaagaaacgccctggagaattatgaaatttctctactggtaaatttggtgatgcgacagattttgtcaacaaattgtgatttggtagtagcatagtatttgaactctatttgtctaattagaccatgatttaagaaatagttgaaaccaatttctgtttcattgaggtttacaattgtgttgaccatataaatcatttggcaacccaaatga

SEQ ID NO: 703116 - DNA, 635 bp, Homo sapiens
tttaaccagaatgataaggggagtcctctataaggtagtatttgagcagaaatttgaatgagaaggactgagccatgcaaatgtaggggaacatggcattccaagagggggagaaaaatgagtcccaagacttggaggcaagtccaggccaggaggaaggattttatgggtagagcatactgagcaagaagcagagtcatggtagctgggactgcaaggaaggtgagggacaggccttttacaccaaatgaaataagggccttttacaccaaatgyagtaagaagactcataagattttaaccaagggaggacaataagaagtatacctttcaaaagatccttctggctgctctgtgaaatatagatctagaaggtgcaatattagacgtaagtcacttaggaggctggaatatttcagttattttgcataatttcaccagcttaaaaatgttgtaaaagaaaactgatttttggaagtggaagatctgagttcaaatcctggtagtgatttctaccatatgctcttgggtccattgtttcctagctgagatcaatgaagtcttcacttatgaaatgattataattcagttttaacaggaataaatgattaagttaaaaaaatgcattaaaaact

SEQ ID NO: 703117 - DNA, 610 bp, Homo sapiens
aggcagtctttgagttctaggaggttgctataaccttctttttgattagattaccagcaatctgctacttctctgcacaacgcatttctaaaacactaatgatagaaaaatgagccaaacactgccttttcctatggttggagtggggtgggagacagatcattgttctgttcttagagagagagagagagagagagagagcatatactcatttttacttcaatgttattttggaatatcatatatgtktttagcttttcttcttctttttcctttttactctaagacacacagtggactagcttaaaaggagagctaaattaagactaaaagattgcccaaatcattaaagttcattacttatattttctgacaaatctttttagtttgtggatttactctagtatttttgtcatcactgcttaaacttttcgaattttttttactacttagtaacagttaaagaacaaaatgcagtaaaatacacaaagaatttcatagtaactcactactctaccaacaatgtcaaaacacatacgttactgacttgcagtaccataaagataatacgcaaaatgtttttcagttgattccataataatcattgtgt

SEQ ID NO: 703118 - DNA, 531 bp, Homo sapiens
tgcaaactcttgcatgcacctctgctggggactgatgctcctgccggagtccacactttgagacgtccggtactaaagcatgaacttcagataaccaaaaatgactggacaaacatcaccataaggactggtggaaagcattaattatgtatttgcttctaggactaagactgaatgagggttataagagagactgtagtatgtgtgactaaatgttctaacaaggtacagtgtatctaggaaataacagggagatgtggtgagaacatattaaaggaatattatgcttgctgattatagttattaactgggagtaaaggacagtatttcaaattagatatakagggagagagagggcagggagaagataggtcctagttaatttctagttttatcctttgaaccacattaagtattttacatactcaacaaaattgcatcggcaaggatggaggaaccctaaatctgaatacacacagacaaatgaacctgtttataaaattgatacccacacagaaaaaaaaattcaag

SEQ ID NO: 703119 - DNA, 531 bp, Homo sapiens
tgcaaactcttgcatgcacctctgctggggactgatgctcctgccggagtccacactttgagacgtccggtactaaagcatgaacttcagataaccaaaaatgactggacaaacatcaccataaggactggtggaaagcattaattatgtatttgcttctaggactaagactgaatgagggttataagagagactgtagtatgtgtgactaaatgttctaacaaggtacagtgtatctaggaaataacagggagatgtggtgagaacatattaaaggaatattatgcttgctgattatagttattaactgggagtaaaggacagtatttcaaattagatatatagggagagagagggcagggagaagataggtcctagttaatttctagttttatcctttgaaccacattaagtattttacatactcaacaaaattgcatcggcaaggatggaggaaccctaaatctgaatacamacagacaaatgaacctgtttataaaattgatacccacacagaaaaaaaaattcaag

SEQ ID NO: 703120 - DNA, 633 bp, Homo sapiens
ctgaccaccttttccaactttcctgtataaatcagtaatttaacacctggaaggagttaactcaagtttctgatttcacttaaatccacagaatacataatgcattgaaaacactccaattgtgagcatatcctgctgtaaagacaagttaatgtttgcagaccatgccaaatatctggttcctccttcccagctatcactttcagggtttaaaggtgagaaagaacagaaactttatgcaaatacagaacaactttagattctaaaataactatgtaaggcatggctcagcatmtttaagaacttcaaatcagtaaattcaaatggccacaaataatctaccactttaaggtactatataaacttttttcctcttgcctttccttcttttcattgatggtgggttatttctctaaggtacaccaaaagataagcacgtattgagatataaaggggatatgaatacacagtattagtcacttatattcaaaatgaaaaataatgtttctcacaaaatacttatttgttcagaattcagtcagctcttcttattctaaatcaaaagaccactattcatcatgggtagatgtgaagcatggcccactttgatttcaggtatggaaaactgcagga

SEQ ID NO: 703121 - DNA, 1305 bp, Homo sapiens
tactaagaatgaaacaaatttcaaaagttattgaaaaataaacaaaacaaaaacaaaccaacatcactccatgaaataaaaataagtttcctaaaaaaaaaaaaaatacatggttatgttcggatccctagtttttgaaaaaatgttattaaaattatatcaattataaatgyaaccctgtttccacaaaaaaacctgaaatgtctatacattttctatatcagtcaatattatgaagcttttaaaaatggaatttactgtaaaactttaaataatcaaaacaaggaagaactatgtcccaagactatttttgttattttagtgcaaaataaaaagtaaggaaatcatagtacaataaaagaatgtgagcattttccttggaggtaatataattgtattaatcagtgtggactgatataacaaagatatcatagacttggcagctgtaacaagcatatctcacatttctggaggctgctaactacaagaccagcgcactggcagttctgatgattgatgagggctccatttcctggttcatagatgacaatttctagcagtatcttcacttagctgaactggccgggggctttctgggatctcttttataaggtcactaattacctcctaaaagtgtcacttccaaataccatcatattgggtattaggtttcaaaatatgaattttgcaggaacgaaaacattcagtttctggcaatattgaaacttttaatgataaaggaaaaagctcaaggaggcctgagatttagttctgcttggcctgacctatgactaatttagtctaggagtaaacagttaggaatatatacaagtttatcataccatgatatatggtcggaatgattgacaggtggtttccagaagagttaggaagtgccaggacagtaaaaatagctattgagaaaagaggaccaaagcttctcaaaagttctgataatactttataacctctggccatattttcagcactgtggagcaatgtagaaattttagagctagtaaagctgtgtctctgcctaaaaactacatttaatctctattctttgaagctgccttggagcagataagcttctatgtcctttaaattaaagaaacttaagttattccttatttgtgtcaactatctttcaactcaccaccattatcctatcacagtcatacatattctacagtagatatgtaattttatcacactgctactgtatctttattgttatatatcatctcatcacattctattttatgctttttgaatttttgtcttttaatactcttttgactagca

SEQ ID NO: 703122 - DNA, 604 bp, Homo sapiens
tgatcaatgtacttygtaatctccccaacccttaagaaggttctttgtaattctccccacccttgagaatgtactcgtgagatccaccccctgcccacaaaacattgctcctaactccactgtctatcccaaaacctgtaagaactaatgataatcccatcaccctttgctgactctctttttggactcagcctgcctgcacctaggtaaaataaacagctttattactcacacgaagcctgtttggtggtctcttcacacgaacgcgtgagacaaaaagtggtttattttggttcatggttctgcaggctatacaagatgcatggtgctggcatctgctgctggtgagggctttgggaagcttctaatcatggtggaaggtgaaggaggaacaggcgcatcatgtagtaagagcagaacaagggctgggggcggcagggtgggtttcatgttcctttaaacaaccagatctcacatgaactatctgagcaagagctcacctatcatcaagaggatgtcactaaaccattcatgaggaatccacccccatgacctaattaccttacaccaggctccacctctaacattggagattacgttgcaa

SEQ ID NO: 703123 - DNA, 604 bp, Homo sapiens
tgatcaatgtacttcgtaatctccccaacccttaagaaggttctttgtaattctccccacccttgagaatgtactcgtgagatccaccccctgcccacaaaacattgctcctaactccactgtctatcccaaaacctgtaagaactaatgataatcccatcaccctttgctgactctctttttggactcagcctgcctgcacctaggtaaaataaacagctttattactcacacgaagcctgtttggtggtctcttcacacgaacgcrtgagacaaaaagtggtttattttggttcatggttctgcaggctatacaagatgcatggtgctggcatctgctgctggtgagggctttgggaagcttctaatcatggtggaaggtgaaggaggaacaggcgcatcatgtagtaagagcagaacaagggctgggggcggcagggtgggtttcatgttcctttaaacaaccagatctcacatgaactatctgagcaagagctcacctatcatcaagaggatgtcactaaaccattcatgaggaatccacccccatgacctaattaccttacaccaggctccacctctaacattggagattacgttgcaa

SEQ ID NO: 703124 - DNA, 723 bp, Homo sapiens
tctccttcctcctaagtctgggtgggctttgtgactgactgctttcacaaaagtaagtgatatgacttctgaggttaggtaataagaaggttttcagtctctactagaaccttttgtaatgcttgctttcaggatgctccctcaagaatcccagaatctatgctgtgtgaaacccaaataacatggagagaccataaatgggtgtttggtgggcagccgctgtcaagattacagtcgacagccatgtcagatcactgtagcctcagttaatatctgaccacagctgcatgagaaactctgggtgatmactacactgctgaggccaatcaaccaacagaaatgtgagaaacaataatgaatcactgttttaaggcacttgattcaggagtggttttgttacacagcaacagataacaggacagaacttaagtgaataaagcactcatattttattaaagtttttacctccattttatgacagtacccttgtttttcctttgactctactctcttgttttatatttgtattatccagtttatattttatccatctttgtaaagcaccttaaattcattttgtaaaatgaccatatgtacataattctttatgtaaggaattcacatcatgtccaagtcaaaaatatacatattaatccatttaccttttctgagtctcacaaagaaaatgggaggatactaagaagtaatattacacttctgctt

SEQ ID NO: 703125 - DNA, 723 bp, Homo sapiens
tctccttcctcctaagtctgggtgggctttgtgactgactgctttcacaaaagtaagtgatatgacttctgaggttaggtaataagaaggttttcagtctctactagaaccttttgtaatgcttgctttcaggatgctccctcaagaatcccagaatctatgctgtgtgaaacccaaataacatggagagaccataaatgggtgtttggtgggcagccgctgtcaagattacagtcgacagccatgtcagatcactgtagcctcagttaatatctgaccacagctgcatgagaaactctgggtgatcactacactgctgaggccaatcaaccaacagaaatgtgagaaacaataatgaatcactgttttaaggcacttgattcaggagtggttttgttacacagcaacagataacaggacagaacttaagtgaataaagcactcatattttattaaagtttttacctccattttatgacagtacccttgtttttcctttgactctactctcttgttttatatttgtattatccagtttatattttatccatctttgtaaagcaccttaaattcattttgtaaaatgaccatatgtacataattmtttatgtaaggaattcacatcatgtccaagtcaaaaatatacatattaatccatttaccttttctgagtctcacaaagaaaatgggaggatactaagaagtaatattacacttctgctt

SEQ ID NO: 703126 - DNA, 723 bp, Homo sapiens
tctccttcctcctaagtctgggtgggctttgtgactgactgctttcacaaaagtaagtgatatgacttctgaggttaggtaataagaaggttttcagtctctactagaaccttttgtaatgcttgctttcaggatgctccctcaagaatcccagaatctatgctgtgtgaaacccaaataacatggagagaccataaatgggtgtttggtgggcagccgctgtcaagattacagtcgacagccatgtcagatcactgtagcctcagttaatatctgaccacagctgcatgagaaactctgggtgatcactacactgctgaggccaatcaaccaacagaaatgtgagaaacaataatgaatcactgttttaaggcacttgattcaggagtggttttgttacacagcaacagataacaggacagaacttaagtgaataaagcactcatattttattaaagtttttacctccattttatgacagtacccttgtttttcctttgactctactctcttgttttatatttgtattatccagtttatattttatccatctttgtaaagcaccttaaattcattttgtaaaatgaccatatgtacataattctttatgtaagraattcacatcatgtccaagtcaaaaatatacatattaatccatttaccttttctgagtctcacaaagaaaatgggaggatactaagaagtaatattacacttctgctt

SEQ ID NO: 703127 - DNA, 592 bp, Homo sapiens
ttatttacttttcagatgttggcttagcaccgaaaacaactttatttggagttttataggaccagcatgcctaatcattcttgtatgtatatataaaattgttattacaattcaaaaaagtgatgatcatagggtgcttaaaatttccagcaataaggtgttattctaaaaaagaagaatttgaatattttacagtatatcacttatcagcattttacatatactataattaaaaaatacatgtatatcttttaaatcatgtatagcttttatacattttttaatatatactttttaaatataaaatataataatactttttaaatataaaaaaaatcatgtatagcttttaaattcaaagctattacaattcatttgcccctcttgatggagtatagatgtctgcataacatagaggaaaaagcattttttgcttatcagtaatacctcggcatgcttcaacacasagagtgtgccaaccagctgataatttggcattttagatgtttacattatttaatcttttatcgatgatcggtcatctttgaagattagactgtcatctttatagttttatcatctttatgtaccc

SEQ ID NO: 703128 - DNA, 657 bp, Homo sapiens
tgatttgtgtgacagcagcgtctgatcactatctggacctcaccttaggaagtatctacctgtttgctgtctgtcgctccactagagtatacctgcaggaaggcaaactttgtctgttgactgctgtcctctgaggatatgcagyaatgaatacctgcagagcttagtgtgaggttgaatgaattctgctgcttgtttattccttttttttttttttttttttttgagacagggtctcattctgttgcctgggctgggaatgcagtggcaccatcacggctcactgcagcctccaactcctgggcttaagcgatcctcccacctcagcctccctaggagctgggtctacaggtgtgtgctaccgcacctggctaattttggtatttttttgtagaaatgaggtctcactatgttacccaagctggtcttgaactcttggactcaagcaatcctcttgccttggcctcccaaagtcctgggattataggtgtgagccatcgcgcctggccttgtccatttattcttaaaaagagaccagcaccccagccactcgcatacagaaactatcacttggaaatctgtgcctggtctctgctcatgtggcctcaacttgggatatgaacccttttttcttacattgaagaagaactgaactgc

SEQ ID NO: 703129 - DNA, 635 bp, Homo sapiens
atatctgagggtttcctctccagcttattgggaaaatccagcagatctggcagagctacagtgtgctcacctggcaacactgtggggtgccctttatttattttttcatttttccataagttattggcgtacaggtggtatttggttacatgagtaagttctttamtggtgatttgtgaggtttttggtgcaaccatcacccgagcagtatacactgcaccatatttgtagtcttttatcccttgcctcccgcccccaaaattccccccaaggccccaaagtccattgtatcattctaatgcatttgcatcctcagagcttagctcccaccggcaccttctgatttatcacagttgccttatgtttggtccacttccattatctgcttggcccgtgtaagcacttgaatgtgtgtagatgggacagtacccaatgtgtaaatgtggaggctgagattcagcaggaggacttgggttttatgattttgcttcctcacttttcctttttctttccttcattctttccttctttgttttctttcttcctcttttcctcctcaatttcattcagccaacatttattaaccaactaccacatttaaggttctgtgattttggtaaggaaaaagcagatga

SEQ ID NO: 703130 - DNA, 635 bp, Homo sapiens
atatctgagggtttcctctccagcttattgggaaaatccagcagatctggcagagctacagtgtgctcacctggcaacactgtggggtgccctttatttattttttcatttttccataagttattggcgtacaggtggtatttggttacatgagtaagttctttactggtgatttgtgaggtttttggtgcaaccatcacccgagcagtatacactgcaccatatttgtagtcttttatcccttgcctcccgcccccaaaattccccccaaggccccaaagtccattgtatcattctaatgcatttgcatcctcagagcttagctcccaccggcaccttctgatttatcacagttgccttatgtttggtccacttccattatctgcttggcccgtgtaagcacttgaatgtgtgtagatgggacagtacccaatgtgtaaatgtggaggctgagattcagcaggaggacttgggttttatgattttgcttyctcacttttcctttttctttccttcattctttccttctttgttttctttcttcctcttttcctcctcaatttcattcagccaacatttattaaccaactaccacatttaaggttctgtgattttggtaaggaaaaagcagatga

SEQ ID NO: 703131 - DNA, 603 bp, Homo sapiens
tcagaattgtcagataaatttttaccaaaccacaaatacagttctaagtataattgtgtgcgttaagagattaaaatatattgtagtgctgtgccaatatttatagagttcatttctgtccaagcaagcatttgttaatgatctggagtacttactgtgtactgtgtcctgcatgttgatagattyattacagacaatttaaataggagaaatgccctcctgcctcccccccacaacctgcctggccatccctgtctcagggagcaggtcacaggtcaccacgggtaattctagcctccactggggaaatgttccaacaccatgctggttattttggtagctgtagttgtagggtgtgtgtgtgcatgtgtgtgtgtgtgtgtgtaagagtgtgtgtgtgcgtgtgtgtgtgctgtgaccacccagtcttcatggtatgtcccaccctgtccccagatctcctattacctccacaataacagaaacactcccagggattctgggcagagggtgagaacaaataactgctgtcaccccagaggacaatttttagtaataaaattgagtgtcaagtattttttaaaaattataataaatttaata

SEQ ID NO: 703132 - DNA, 603 bp, Homo sapiens
tcagaattgtcagataaatttttaccaaaccacaaatacagttctaagtataattgtgtgcgttaagagattaaaatatattgtagtgctgtgccaatatttatagagttcatttctgtccaagcaagcatttgttaatgatctggagtacttactgtgtactgtgtcctgcatgttgatagatttattacagacaatttaaataggagaaatgccctcctgcctcccccccacaacctgcctggccatccctgtctcagggagcaggtcacaggtcaccacgggtaattctagcctccactggggaaatgttccaacaccatgctggttattttggtagctgtagttgtagggtgtrtgtgtgcatgtgtgtgtgtgtgtgtgtaagagtgtgtgtgtgcgtgtgtgtgtgctgtgaccacccagtcttcatggtatgtcccaccctgtccccagatctcctattacctccacaataacagaaacactcccagggattctgggcagagggtgagaacaaataactgctgtcaccccagaggacaatttttagtaataaaattgagtgtcaagtattttttaaaaattataataaatttaata

SEQ ID NO: 703133 - DNA, 1431 bp, Homo sapiens
aaaaaaaaaaaaaaaaaaaaaaaaaaaaattggcctggcatggtggcgcatgcctatagtcccagctactagggaggctgaggcaraagaattgcttgaacccgggaggcagagtttgcagtgggccaagatcgcaccattgcactccagcctgggtgacagagcaaggctctgtctcaaaaaaaaaaaaaaaaaaaaagaaagaagaaagaaagaaaactatctttaaaagagagcaagactttatatcatctagaaatcacacacaatacaattggataatttagctctatgaaaacaaatttagctctatgttacccaaaattggataacattagctctataaaacccaactgtcaaacagcttccatcaggtaacattggtcagtgagaatttcctgtggttatcctaggaatggcctgcaaaaaaatactgctgacaaatagcatatctttttaatatatcttgaataatttttattatttttggtaggcatagtaagagcttattgttcttaaaatccttcttttattcagttgatttgttgatgataaaatactagtgaagtaaatagagatgaaggtatgggaaatatttttaggtaattcccatagtctggtcagttgtttgtttgtttgttttttaccatagcctcctgattagcaggaactaccaggctcatgccaccaacctgactaattttttcaattttttttgtagagacggggtctcgtcatgttgcccaggctggtcttgaagtcctgggctcaagctatcctcctgtctcagcctcccaaagtgctggaattacaggtgtgagccactgcgccaggcctctagtcaaattattgaagctccttttataatcaattttttctttttattttgtgaagcattttttaatggacaaaagtgtattattagattaaatagggagcttctaaattctaccatatttcaacagaagcttttgcaggtctatcccaaaaaattattacctttagaaactttatccttctgccctatgtgagctctccaattaattgctgatatctgagaaggcgattgtaaaaccgctgacaattcaactatcactttttcaggaaatatcttagttatcattgaagtaaaaaaagtcatattaaaaatgtggttctgttgcatgacagacactatatgtgtgtgtgtgtgtgtgtgtgtgtgtatataaaatccagaaccaagaattacaactctagtaactgctattcactcatctttttgtgtagacttaattccagacaaaacatataatttatttatttttatcaaatatgtatttttattagaagtatggggatattatagggtaagcactggctttataaattattctttggtttcataagtttttataaccactttattctctttaagctctcagcaaaaga

SEQ ID NO: 703134 - DNA, 1431 bp, Homo sapiens
aaaaaaaaaaaaaaaaaaaaaaaaaaaaattggcctggcatggtggcgcatgcctatagtcccagctactagggaggctgaggcagaaraattgcttgaacccgggaggcagagtttgcagtgggccaagatcgcaccattgcactccagcctgggtgacagagcaaggctctgtctcaaaaaaaaaaaaaaaaaaaaagaaagaagaaagaaagaaaactatctttaaaagagagcaagactttatatcatctagaaatcacacacaatacaattggataatttagctctatgaaaacaaatttagctctatgttacccaaaattggataacattagctctataaaacccaactgtcaaacagcttccatcaggtaacattggtcagtgagaatttcctgtggttatcctaggaatggcctgcaaaaaaatactgctgacaaatagcatatctttttaatatatcttgaataatttttattatttttggtaggcatagtaagagcttattgttcttaaaatccttcttttattcagttgatttgttgatgataaaatactagtgaagtaaatagagatgaaggtatgggaaatatttttaggtaattcccatagtctggtcagttgtttgtttgtttgttttttaccatagcctcctgattagcaggaactaccaggctcatgccaccaacctgactaattttttcaattttttttgtagagacggggtctcgtcatgttgcccaggctggtcttgaagtcctgggctcaagctatcctcctgtctcagcctcccaaagtgctggaattacaggtgtgagccactgcgccaggcctctagtcaaattattgaagctccttttataatcaattttttctttttattttgtgaagcattttttaatggacaaaagtgtattattagattaaatagggagcttctaaattctaccatatttcaacagaagcttttgcaggtctatcccaaaaaattattacctttagaaactttatccttctgccctatgtgagctctccaattaattgctgatatctgagaaggcgattgtaaaaccgctgacaattcaactatcactttttcaggaaatatcttagttatcattgaagtaaaaaaagtcatattaaaaatgtggttctgttgcatgacagacactatatgtgtgtgtgtgtgtgtgtgtgtgtgtatataaaatccagaaccaagaattacaactctagtaactgctattcactcatctttttgtgtagacttaattccagacaaaacatataatttatttatttttatcaaatatgtatttttattagaagtatggggatattatagggtaagcactggctttataaattattctttggtttcataagtttttataaccactttattctctttaagctctcagcaaaaga

SEQ ID NO: 703135 - DNA, 1323 bp, Homo sapiens
ctgcctgtgacgtttacaaaatccactgctgcatcagctgcttctgatttcaggaaagcacagagacctggtgtatcagtctctcgtggaggaggtggactggggcatgcctggattgtggggtaagctaggcatgttccatctggaaaagtaagtttaatattagagtcatatttggaaaacaagactaatattatttccaattttcttaactattgtaagtaagcaaagacagattgaattctttgttttatgttttgcaagaagggctggaaaactttagtgctggaagtgtgagaggagaagaccatccttgcacatatcaagagaaacagaatttaaaattccaatgagataccatttccacctattataccgacacataataacggcaatgacaacaactaacatttctgaatgcttactaagagctgggttctattctaactcagcgtatcctcacaacaaagttattggtaggtatttaaattatccccagtgtacagatgagtaagctgaggcacagaggggctaagtaacttgcccaaggtcactcagctactaartggtagagatgggatgcataccatgacataaatggatcatcttcaagaaataatattaagtgaattaagcaaggaacaagagtgtgtttagtatgttaccactgggttgaaaaaatatgtgtgtatttatgtgcatgtctatccacatgcatacatatgtacttttacatctgtatatttatgtatagctgcatctatagatctatatccatatctctctgcggtctctgatagaatccttaaggaactgttaactggttgtctcctctgaggaattaagtgactggggaaatgggggtattagaagctcagttttctctctctgctctttggtgtcatttgatttgaatcacatgctttaaatgagctattcaaaaagataaataaaaaatttatttactttattgactgaaagaaaaaattgcaaacgtatataatccaacctgagacaaggaaacagttctctccatgagcgtcttggtccgcttaaagcccgggtcactttctgcaaggacattcatggttttcttgccgatgaattccaacgcatcaaggcctccagttaagacacttttaccctgcagatgagataactgcatgagattagatgtttaggttttgctgtttcgcagcagtcagcaactcctaggtaactggcactatcttcaaatattaaaatcaatataaagtcacaattttttctcatcaggagatttatcatccatttaatcctattctcgtttccttggaaaagcat

SEQ ID NO: 703136 - DNA, 873 bp, Homo sapiens
tttgtttttgtttttaaactagtgtgggatttttagaaggttgtcacatgttccttgggcctgtaggtttctttgtgaaaaatataccacgtcctgggagttgtggctccagtccagaggctgctctaatgcacacattgaggaggtgttcattgcagagcttcccaaagagaaaaatggtgcaggtcatgttaactcagttatcgactttctcaatttctgatttcaactttattgctataaacacattattcacttttagtcaaaccaaaaagtcaagtttgcatagggctttttttttttaaatgatggattttctttacttttcttgtcctagttttctacccactacctgtgtgatgttgtcccagggattcagcctctgggtgctttgcttgtcaaagaacagggaagaaggacggagccacctaagcctgtgcaggctggaagcgctggtaacgtgggccaggctgggtcccaagctctggggccccttgcagtgcccttgggtgttgctagggtcttggaaagagattgagttttaggagagagcaaagcgatgactgccaccaactcacctctgcttgkcaatgaccagccagtccctgaagaggaagaggtgcctcctggtggtctcagggccctgggtcagcaccatggggctgtgaaggacaggctcagcgtgcttgaggggcaggcccagctgcagggacagctgctcgagggtcactgcggatgccaggctcttcctgagggcgggggagagtgggatcagtcctgagggaagagggttccccagggagctggcgtgcaatgcctgtgatgtctccaaacaccaagtcaccactagtgtggcttagtcagagtggaaat

SEQ ID NO: 703137 - DNA, 1070 bp, Homo sapiens
ctataagtgtatttcatctttatgtcaaaaaattattcgagatagggttggagtgaacagaacagaggattgactacaaagatgaaacagaacctgacttcaaaaagcagcttcagaggagcaggacagagagataagagaggaaaaggaactgtaagacgaagtaattaattcccaagaacaggatatgtgtgtaggtatgtctacatacatacacatatagatatacatacatattcatactcatacactgcctaatgcacaggagacatagggcagacaggagacacgttctggtgaggagatcaatgacaggagttttggaagagtcagtgtttgagccagaccttgcaggaaagataataaccaggggaaacggagatgacaagacagtttcatcactgagaccaatgcaaggaaggtaaaggagagagttaagaagtggagttggctggactggaggatgcatgaaagggattagcaggggacagggttttaaagatgggatagagctcataatagaaaaacttaaaggcaggactggggagtttgggtttactctgaaggcaagaggaagccactgaacagaaaagtatatcaactatttctcacaaaggagcagtgaggtattagtgagacaacctaatggcagtatcttcaaaaagatgacaaaccatacaaacctaaggkatttacactataaaaatcagacttgtgctccagaaagattaattaagcagctagctgcaggattggttggcaggaggaaagaatcaagggagagaaggagttaagaggccattaaaataatcccagtgagaggtcaaaaaaacctgattgagggcttcatcaaagaaacaagttcttagacaagatactgtggaggtagaattaacagaatgtgatatatgtgtgatggggcattgaggggtctttgggcttaccacagacagagactaaatctcagcacctctgacccccacatcaatctgtgctcctgccggacgtggtggctaacatctgtaatcccagcactttggaaggcagaatgggcagatcacctgaggtca

SEQ ID NO: 703138 - DNA, 1070 bp, Homo sapiens
ctataagtgtatttcatctttatgtcaaaaaattattcgagatagggttggagtgaacagaacagaggattgactacaaagatgaaacagaacctgacttcaaaaagcagcttcagaggagcaggacagagagataagagaggaaaaggaactgtaagacgaagtaattaattcccaagaacaggatatgtgtgtaggtatgtctacatacatacacatatagatatacatacatattcatactcatacactgcctaatgcacaggagacatagggcagacaggagacacgttctggtgaggagatcaatgacaggagttttggaagagtcagtgtttgagccagaccttgcaggaaagataataaccaggggaaacggagatgacaagacagtttcatcactgagaccaatgcaaggaaggtaaaggagagagttaagaagtggagttggctggactggaggatgcatgaaagggattagcaggggacagggttttaaagatgggatagagctcataatagaaaaacttaaaggcaggactggggagtttgggtttactctgaaggcaagaggaagccactgaacagaaaagtatatcaactatttctcacaaaggagcagtgaggtattagtgagacaacctaatggcagtatcttcaaaaagatgacaaaccatacaaacctaaggtatttacactataaaaatcagacttgygctccagaaagattaattaagcagctagctgcaggattggttggcaggaggaaagaatcaagggagagaaggagttaagaggccattaaaataatcccagtgagaggtcaaaaaaacctgattgagggcttcatcaaagaaacaagttcttagacaagatactgtggaggtagaattaacagaatgtgatatatgtgtgatggggcattgaggggtctttgggcttaccacagacagagactaaatctcagcacctctgacccccacatcaatctgtgctcctgccggacgtggtggctaacatctgtaatcccagcactttggaaggcagaatgggcagatcacctgaggtca

SEQ ID NO: 703139 - DNA, 1070 bp, Homo sapiens
ctataagtgtatttcatctttatgtcaaaaaattattcgagatagggttggagtgaacagaacagaggattgactacaaagatgaaacagaacctgacttcaaaaagcagcttcagaggagcaggacagagagataagagaggaaaaggaactgtaagacgaagtaattaattcccaagaacaggatatgtgtgtaggtatgtctacatacatacacatatagatatacatacatattcatactcatacactgcctaatgcacaggagacatagggcagacaggagacacgttctggtgaggagatcaatgacaggagttttggaagagtcagtgtttgagccagaccttgcaggaaagataataaccaggggaaacggagatgacaagacagtttcatcactgagaccaatgcaaggaaggtaaaggagagagttaagaagtggagttggctggactggaggatgcatgaaagggattagcaggggacagggttttaaagatgggatagagctcataatagaaaaacttaaaggcaggactggggagtttgggtttactctgaaggcaagaggaagccactgaacagaaaagtatatcaactatttctcacaaaggagcagtgaggtattagtgagacaacctaatggcagtatcttcaaaaagatgacaaaccatacaaacctaaggtatttacactataaaaatcagacttgtgctccagaaagmttaattaagcagctagctgcaggattggttggcaggaggaaagaatcaagggagagaaggagttaagaggccattaaaataatcccagtgagaggtcaaaaaaacctgattgagggcttcatcaaagaaacaagttcttagacaagatactgtggaggtagaattaacagaatgtgatatatgtgtgatggggcattgaggggtctttgggcttaccacagacagagactaaatctcagcacctctgacccccacatcaatctgtgctcctgccggacgtggtggctaacatctgtaatcccagcactttggaaggcagaatgggcagatcacctgaggtca

SEQ ID NO: 703140 - DNA, 1070 bp, Homo sapiens
ctataagtgtatttcatctttatgtcaaaaaattattcgagatagggttggagtgaacagaacagaggattgactacaaagatgaaacagaacctgacttcaaaaagcagcttcagaggagcaggacagagagataagagaggaaaaggaactgtaagacgaagtaattaattcccaagaacaggatatgtgtgtaggtatgtctacatacatacacatatagatatacatacatattcatactcatacactgcctaatgcacaggagacatagggcagacaggagacacgttctggtgaggagatcaatgacaggagttttggaagagtcagtgtttgagccagaccttgcaggaaagataataaccaggggaaacggagatgacaagacagtttcatcactgagaccaatgcaaggaaggtaaaggagagagttaagaagtggagttggctggactggaggatgcatgaaagggattagcaggggacagggttttaaagatgggatagagctcataatagaaaaacttaaaggcaggactggggagtttgggtttactctgaaggcaagaggaagccactgaacagaaaagtatatcaactatttctcacaaaggagcagtgaggtattagtgagacaacctaatggcagtatcttcaaaaagatgacaaaccatacaaacctaaggtatttacactataaaaatcagacttgtgctccagaaagattaattaagcagctagctgcaggattggttggcaggaggaaagaatcaagggagagaaggagttaagaggccattaaaataatcccagtgagaggtcaaaaaaacctgattgagggcttcatcaaagaaacaagttcttagacaagatactgtggaggtagaattaacagaatgtgatatatgtgtgatggggcattgaggggtctttgggcttaccrcagacagagactaaatctcagcacctctgacccccacatcaatctgtgctcctgccggacgtggtggctaacatctgtaatcccagcactttggaaggcagaatgggcagatcacctgaggtca

SEQ ID NO: 703141 - DNA, 1412 bp, Homo sapiens
tggacttccaatcctcaataatcatgagtcaaatcaatttctattcattgtaaattacccagtgtcttgtattccattatagcagcactaaatggattaagacataacccattagtttcattcattagttagggaaaagaaatcaaaatttcaggctgggcctggtggctcacacctgtaatcccaacacttcggaaggccaagatagatggatcacttgaggtcaagagctggagaccaacctggccaatatgatgaaactccatctctactaaaaatacaaaaataagctgggcatggtggcaggtgcctataatcccagctactcaggagggtgaggcaggagaatcacttgaaccagggaggcagaggttgcagtgagccaagattgcgcaactgcactccagcctgggtgacagagtgagactccctctcaaaaaagaaaaaaatcaaaatttcagttagacagagggacattgaacattttcacatatatgaaaatacatatatttaaataggctaacttgggaattacttttagctattaaaagtattcgctagtttacatacaaaacatttatctttatttatttacttttttttggcagagtagaggtggcatttatatttggtaatcatgtagttttttaaacgtctaagcaatttttaaaacacttaatgtaaaatatttttagttattcaagtcaagagaacttctaagtttgaaatacattagctaattgcagccaatttttaaatgttagtgtttaataactaattcttgagtatactgggaaaatggtatgaaaaatgtaaaatttaaaaagtcaaaatatcatcttcaacatgtagggaaataaaattgtttctgtagtgttgactatacttaattaaaaatacctaatctaagcaatgtctcctcctcctattccccattgcaaggacaagaacaaagttaaatcagaacatcacatacacaaggtacatctcatgttctaaaaatctaaamacagtagaaccagaactgaagaaagagtatttgcataccatatagtggtcactttaaagaacagcaaaattttttcaaaataatttgtgtttaaacggaaatagtatatacggttatacctgacctaaatataatccacaaaacctgtcatttcacgtcattaaaaaataagaggaagagtggttttatttacttctgacatgtggaaacacctaaaaatgatcatctaatcataattatttcatgcttgtctaatttttaaaatatatcaaatattgggtctttgcagtagcacaccatgtttatcagatatttatttgtgttcttgagttcaaccatggaattaaaatagaatgtccttatgctgaacttaaacaatttaaatgaggcttaatagtagaca

SEQ ID NO: 703142 - DNA, 1412 bp, Homo sapiens
tggacttccaatcctcaataatcatgagtcaaatcaatttctattcattgtaaattacccagtgtcttgtattccattatagcagcactaaatggattaagacataacccattagtttcattcattagttagggaaaagaaatcaaaatttcaggctgggcctggtggctcacacctgtaatcccaacacttcggaaggccaagatagatggatcacttgaggtcaagagctggagaccaacctggccaatatgatgaaactccatctctactaaaaatacaaaaataagctgggcatggtggcaggtgcctataatcccagctactcaggagggtgaggcaggagaatcacttgaaccagggaggcagaggttgcagtgagccaagattgcgcaactgcactccagcctgggtgacagagtgagactccctctcaaaaaagaaaaaaatcaaaatttcagttagacagagggacattgaacattttcacatatatgaaaatacatatatttaaataggctaacttgggaattacttttagctattaaaagtattcgctagtttacatacaaaacatttatctttatttatttacttttttttggcagagtagaggtggcatttatatttggtaatcatgtagttttttaaacgtctaagcaatttttaaaacacttaatgtaaaatatttttagttattcaagtcaagagaacttctaagtttgaaatacattagctaattgcagccaatttttaaatgttagtgtttaataactaattcttgagtatactgggaaaatggtatgaaaaatgtaaaatttaaaaagtcaaaatatcatcttcaacatgtagggaaataaaattgtttctgtagtgttgactatacttaattaaaaatacctaatctaagcaatgtctcctcctcctattccccattgcaaggacaagaacaaagttaaatcagaacatcacatacacaaggtacatctcatgttctaaaaatctaaacacagtagaaccagaactgaagaaagagtatttgcataccatmtagtggtcactttaaagaacagcaaaattttttcaaaataatttgtgtttaaacggaaatagtatatacggttatacctgacctaaatataatccacaaaacctgtcatttcacgtcattaaaaaataagaggaagagtggttttatttacttctgacatgtggaaacacctaaaaatgatcatctaatcataattatttcatgcttgtctaatttttaaaatatatcaaatattgggtctttgcagtagcacaccatgtttatcagatatttatttgtgttcttgagttcaaccatggaattaaaatagaatgtccttatgctgaacttaaacaatttaaatgaggcttaatagtagaca

SEQ ID NO: 703143 - DNA, 295 bp, Homo sapiens
caagacctgaaggggaaatagacattattccagaagaaggggtgagagaggagacctctatgrggcttaaatgactcagaataattggtttttaaagtgtgtttgtggagtccagataaggtgaaaggaatggtgcagcacatagtgagaatgaagctctctaggtaggccaggtttcttgggagcatctaagatttctttcgctagtgttttgttttggtttttctttcactgtttaataatttttttaaattatactttaagttctgggatataggtacagaatgtgcatgtt

SEQ ID NO: 703144 - DNA, 2237 bp, Homo sapiens
  misc_feature 354, 355, 356, 357, 358, 359, 360, 361, 362, 363, 364, 365,366, 367, 368, 369, 370, 371, 372, 373, 374, 375, 376, 377,378, 379, 380, 381, 382, 383, 384, 385, 386, 387, 388, 389,390, 391, 392, 393, 394, 395, 396, 397, 398, 399, 400: n = A,T,C or G
  misc_feature 401, 402, 403, 404, 405, 406, 407, 408, 409, 410, 411, 412,413, 414, 415, 416, 417, 418, 419, 420, 421, 422, 423, 424,425, 426, 427, 428, 429, 430, 431, 432, 433, 434, 435, 436,437, 438, 439, 440, 441, 442, 443, 444, 445, 446, 447: n = A,T,C or G
  misc_feature 448, 449, 450, 451, 452, 453, 1477, 1478, 1479, 1480, 1481,1482, 1483, 1484, 1485, 1486, 1487, 1488, 1489, 1490, 1491,1492, 1493, 1494, 1495, 1496, 1497, 1498, 1499, 1500, 1501,1502, 1503, 1504, 1505, 1506, 1507, 1508, 1509, 1510: n = A,T,C or G
  misc_feature 1511, 1512, 1513, 1514, 1515, 1516, 1517, 1518, 1519, 1520,1521, 1522, 1523, 1524, 1525, 1526, 1527, 1528, 1529, 1530,1531, 1532, 1533, 1534, 1535, 1536, 1537, 1538, 1539, 1540,1541, 1542, 1543, 1544, 1545, 1546, 1547, 1548, 1549: n = A,T,C or G
  misc_feature 1550, 1551, 1552, 1553, 1554, 1555, 1556, 1557, 1558, 1559,1560, 1561, 1562, 1563, 1564, 1565, 1566, 1567, 1568, 1569,1570, 1571, 1572, 1573, 1574, 1575, 1576: n = A,T,C or G
ccattctgacataattaccttgaaagaaggcaaatatccatgctcaaaaatacttattgctgagttatcattaataatgaaaaatttggaaacaatctaaatatccagtaataggtaaatggttaagtagatccaatggaaactgaagtactaattaaaataactcttatggaaatgacatagcaggatgatatatgcccatggcataatgttaagtgaaaataagtagaacaaaatgcagttggcttcctctgattatgagtacgtaaaaataagtctgcatgcaaagaaagaggagatgaaaatatgtaaagagaagacataacaatcaaaattgtcttgcatttcatgttnnnnnnnnnnnnnnnnnnnnnnnnnnnnnnnnnnnnnnnnnnnnnnnnnnnnnnnnnnnnnnnnnnnnnnnnnnnnnnnnnnnnnnnnnnnnnnnnnnnntttttcctgagcagggaactagttcaattacatctctcatattcccttgtgctagaagtgaccatgtgactaagccccagccaataaaagtatgagtgccacttccagctgtggcccattaaaacctctcatttttcttcctccatgccttttaatctttaaagctaattggagtcaccacatccgccccaccatggtaactttgtaagcaccacgttgacggttgcagagctgctatcatcctaaagttcttgaaagaccccatggagcagagtcactttcctcaccactgacatacctgaaaccattaacttatttagaaataaactcctatcatattgaatgatacatatataaactttttttgttactttagcctagtctacgtaaaaagatttatgtatgctttagagcttccttcagataaatgtgtttattattattatttcatctgaaagcttttcagatacactaaagctaatactagctatctagtggtaggctctgatagttggtaaaagagacaccctgggcttgacagtttgtgcccatcaagaagcaagtaaaataccaaccacacagatagcacatctagtgttcaattcacagcaactcataacttccattcatgattgaatcagctgaaaattaggagagttcactaatttgcttcaactgagccatcggaatggcatatggcagttgcttttcaatggctagttattcagcttcaagggaatattccagagaagtattaagtgaaagcccaatatccaaatcatttatcatggatcggttcttgccgaagtattgagaggaattctgcagcttttctagggcaagtgtgcctgacaayccaccaaaacaccctcagagagacctggggatggaaccttgtgggaacagccttgtcatttagaaggaacctaagtttcaaagccagacaaatgttgcttcactcatgctatcagtcagttagtgaaggcatcttgattaaccttggcataagcagaaggagaattcnnnnnnnnnnnnnnnnnnnnnnnnnnnnnnnnnnnnnnnnnnnnnnnnnnnnnnnnnnnnnnnnnnnnnnnnnnnnnnnnnnnnnnnnnnnnnnnnnnnncagggagtccaagaaatgggaaaagactacttgtgaggaacacaccattgcggttggccttggcccagagaagccatcgtgagattgcttgagttcaaaccgttgtaacaagaccctgatggtgtttccccaccccccttttcttctacttgaagttgtcatagttggagctttgcaccagaagctaggaatgatcttgggttgagtcagagttaggcatctttgcagattctttgctgtattacctgggtagttctcaaccagcttctgagattttgctccagtatattaatccagtttcctaggctgggtagaaaagtccattatccacacatagtagagcccagaggaagaggtctgctatactgactatagaataattcctggagttttcagggcttgcagtaatcaacttgtactcatctagttgatagtgaaaagcatgaatttggtgtcatgaagaaacaattcaagatggagtgttcctattaactgtgtgatcttagacaggtaagcagataatagaatcctaagaggtttgtgaagagaaagtggaataaagctcataaagtcaatgagcgcactgtctggcaacaaataagcaattgtgaatagtcgctatttttattattctactttcccaggtaatccttgtgagcca

SEQ ID NO: 703145 - DNA, 2237 bp, Homo sapiens
  misc_feature 354, 355, 356, 357, 358, 359, 360, 361, 362, 363, 364, 365,366, 367, 368, 369, 370, 371, 372, 373, 374, 375, 376, 377,378, 379, 380, 381, 382, 383, 384, 385, 386, 387, 388, 389,390, 391, 392, 393, 394, 395, 396, 397, 398, 399, 400: n = A,T,C or G
  misc_feature 401, 402, 403, 404, 405, 406, 407, 408, 409, 410, 411, 412,413, 414, 415, 416, 417, 418, 419, 420, 421, 422, 423, 424,425, 426, 427, 428, 429, 430, 431, 432, 433, 434, 435, 436,437, 438, 439, 440, 441, 442, 443, 444, 445, 446, 447: n = A,T,C or G
  misc_feature 448, 449, 450, 451, 452, 453, 1477, 1478, 1479, 1480, 1481,1482, 1483, 1484, 1485, 1486, 1487, 1488, 1489, 1490, 1491,1492, 1493, 1494, 1495, 1496, 1497, 1498, 1499, 1500, 1501,1502, 1503, 1504, 1505, 1506, 1507, 1508, 1509, 1510: n = A,T,C or G
  misc_feature 1511, 1512, 1513, 1514, 1515, 1516, 1517, 1518, 1519, 1520,1521, 1522, 1523, 1524, 1525, 1526, 1527, 1528, 1529, 1530,1531, 1532, 1533, 1534, 1535, 1536, 1537, 1538, 1539, 1540,1541, 1542, 1543, 1544, 1545, 1546, 1547, 1548, 1549: n = A,T,C or G
  misc_feature 1550, 1551, 1552, 1553, 1554, 1555, 1556, 1557, 1558, 1559,1560, 1561, 1562, 1563, 1564, 1565, 1566, 1567, 1568, 1569,1570, 1571, 1572, 1573, 1574, 1575, 1576: n = A,T,C or G
ccattctgacataattaccttgaaagaaggcaaatatccatgctcaaaaatacttattgctgagttatcattaataatgaaaaatttggaaacaatctaaatatccagtaataggtaaatggttaagtagatccaatggaaactgaagtactaattaaaataactcttatggaaatgacatagcaggatgatatatgcccatggcataatgttaagtgaaaataagtagaacaaaatgcagttggcttcctctgattatgagtacgtaaaaataagtctgcatgcaaagaaagaggagatgaaaatatgtaaagagaagacataacaatcaaaattgtcttgcatttcatgttnnnnnnnnnnnnnnnnnnnnnnnnnnnnnnnnnnnnnnnnnnnnnnnnnnnnnnnnnnnnnnnnnnnnnnnnnnnnnnnnnnnnnnnnnnnnnnnnnnnntttttcctgagcagggaactagttcaattacatctctcatattcccttgtgctagaagtgaccatgtgactaagccccagccaataaaagtatgagtgccacttccagctgtggcccattaaaacctctcatttttcttcctccatgccttttaatctttaaagctaattggagtcaccacatccgccccaccatggtaactttgtaagcaccacgttgacggttgcagagctgctatcatcctaaagttcttgaaagaccccatggagcagagtcactttcctcaccactgacatacctgaaaccattaacttatttagaaataaactcctatcatattgaatgatacatatataaactttttttgttactttagcctagtctacgtaaaaagatttatgtatgctttagagcttccttcagataaatgtgtttattattattatttcatctgaaagcttttcagatacactaaagctaatactagctatctagtggtaggctctgatagttggtaaaagagacaccctgggcttgacagtttgtgcccatcaagaagcaagtaaaataccaaccacacagatagcacatctagtgttcaattcacagcaactcataacttccattcatgattgaatcagctgaaaattaggagagttcactaatttgcttcaactgagccatcggaatggcatatggcagttgcttttcaatggctagttattcagcttcaagggaatattccagagaagtattaagtgaaagcccaatatccaaatcatttatcatggatcggttcttgccgaagtattgagaggaattctgcagcttttctagggcaagtgtgcctgacaatccaccaaaacaccctyagagagacctggggatggaaccttgtgggaacagccttgtcatttagaaggaacctaagtttcaaagccagacaaatgttgcttcactcatgctatcagtcagttagtgaaggcatcttgattaaccttggcataagcagaaggagaattcnnnnnnnnnnnnnnnnnnnnnnnnnnnnnnnnnnnnnnnnnnnnnnnnnnnnnnnnnnnnnnnnnnnnnnnnnnnnnnnnnnnnnnnnnnnnnnnnnnnncagggagtccaagaaatgggaaaagactacttgtgaggaacacaccattgcggttggccttggcccagagaagccatcgtgagattgcttgagttcaaaccgttgtaacaagaccctgatggtgtttccccaccccccttttcttctacttgaagttgtcatagttggagctttgcaccagaagctaggaatgatcttgggttgagtcagagttaggcatctttgcagattctttgctgtattacctgggtagttctcaaccagcttctgagattttgctccagtatattaatccagtttcctaggctgggtagaaaagtccattatccacacatagtagagcccagaggaagaggtctgctatactgactatagaataattcctggagttttcagggcttgcagtaatcaacttgtactcatctagttgatagtgaaaagcatgaatttggtgtcatgaagaaacaattcaagatggagtgttcctattaactgtgtgatcttagacaggtaagcagataatagaatcctaagaggtttgtgaagagaaagtggaataaagctcataaagtcaatgagcgcactgtctggcaacaaataagcaattgtgaatagtcgctatttttattattctactttcccaggtaatccttgtgagcca

SEQ ID NO: 703146 - DNA, 584 bp, Homo sapiens
agcagaactcagtgataaaacaaaatgagaggagaggaatcttgctgtgctggaagtgagttgccttccactgaggacagggcaagtgtattaggaagacagagatcagaatggcacacagactgatgtgaccctgccagtaaccggccagggatggagaacaagtttcaactcaatgccaaatccaatgacttggtggcgaatgcctgagtattaggattaaagaaggagttgtggtctgaatatggatttagtgagaaagatgctaaaagtggttagtaatatctctcacwgttgcaggataaaggggccattgtagcatatgtcttccatctctgaaatacattaattaagagaagccagataaaagttactaattattctacatagaaagcaaatacgatgtgatttgtaatcctccataccagagacagaagtacattttgaaaagactcctctaatggaaaaccttcagtggctccacaatttagaatgatctattaggtcctgcatgatttatttgattttcctcaagctgccacatgcttcatctccttggcccttctaaactactcagagttccc

SEQ ID NO: 703147 - DNA, 598 bp, Homo sapiens
  misc_feature 490, 491, 492, 493, 494, 495, 496, 497, 498, 499, 500, 501,502, 503, 504, 505, 506, 507, 508, 509, 510, 511, 512, 513,514, 515, 516, 517, 518, 519, 520, 521, 522, 523, 524, 525,526, 527, 528, 529, 530, 531, 532, 533, 534, 535, 536: n = A,T,C or G
  misc_feature 537, 538, 539, 540, 541, 542, 543, 544, 545, 546, 547, 548,549, 550, 551, 552, 553, 554, 555, 556, 557, 558, 559, 560,561, 562, 563, 564, 565, 566, 567, 568, 569, 570, 571, 572,573, 574, 575, 576, 577, 578, 579, 580, 581, 582, 583: n = A,T,C or G
  misc_feature 584, 585, 586, 587, 588, 589: n = A,T,C or G
tgcctctggccagcacctgagtgatttgacctacagtctgggaccagcccacatacaggattgtgacttatttttggacccagcacctaggtgatgtgactctattatcctgccttggtgctgcccacagggcacattgttggaactcacttctcctgcctggttcctgctcacaggggggattgtgacctgtgactaacccagcacctagctgatgtgactcctcttctttttatgttcttccctcaggggagactgtgatgtatcagtgggcccggaagccaggtgatstgtctctccttcatgttccttgctaacagagaacattgtaatttactgctgggcttggcatccaggtgaggtgactttgctgcccgtgtcctgctttcaggaggggattgtaacatttatctctggcccaggtgagattgtgacactcttatgcacacaaaactcatagtaaagattttcattcttgcccatgaattcnnnnnnnnnnnnnnnnnnnnnnnnnnnnnnnnnnnnnnnnnnnnnnnnnnnnnnnnnnnnnnnnnnnnnnnnnnnnnnnnnnnnnnnnnnnnnnnnnnnnacagaatat

SEQ ID NO: 703148 - DNA, 1944 bp, Homo sapiens
tgtcttatggccatatctcaaaaatgatgaagcagagagtgtaggttatttaagactgtgctgcaggccgggcaccgtggctcacacctgtaatcccagcactttgggaggccgaggcgggcagatcacgaggtcaggagtttgagaccagcctgaccaacatggtgaaacctcatctctactaaaaataacaaaaattagcagggtgtggtggcacgtgcctgtaatccagctactcaggaggctgaggcagaagaatcacttgaacccgggaggcagaggttgcagtgagctgagatcatgccattgcactccagtctggtcgacagagcaagattctatctcaaaaaaaaaaaaaaaaagctgctgcaaatgctcattccgtcacaaccatgctagtgaaaaaagaaataatgggttagaaggtaattttagagtatatctcttactcttttgccctgtaaaatttttgtatttattacttgccatatagaagcctgtacttcaacaaaagatgtcattaatttcaagtaaatatgctcccacatatattctccctagaaaggtactggtgtatttccagtcaagttgtagcatttctggccttttttgtgctgctgtgtttgtgtgaaataaggcaggaagtaaagtggagtcaaccatgacatttcttgtttctaaagccacagcctctaaaattgaatgttaagtcaactagaaataatgacaatatttaagaaataaaattctttttattttttatagtttataaaaaattatttttgaattataagttaaacaacttgaacatgcagatacctaaaagtgtcatctaggtgatagtattaatattttaatagcttataattgtgagtcacagttgccccattgggtttactgaaaagcagttatttatcttatatgtgtgaatggagaataggctttttataatcctaagcatacagatcttttaagattagcgctatatttagatctgaataaaattgataggcttgtaataacaaattttaatacttttttctaatagaagtgaaaaacagaagtcatttgttaaaatgagtttaagagaaacttcacatgtatttattaaataacacttaaaccacatggtaagttactaatcagtaatttcaatctattttattttagtcactgaaaaagcataacattctttaattattcaatcagaaacagtattcttattagtgtttctgaaagcaactgtagaccactcagtggatgacaaggttcatgctgacaacaaattttctatataataataggctcattttaactttaaatataaacactcattatttcaaaagtaaaattaatggttcttttaagtcataagaggaataatgttataattcacttactgaagtgtttgtctcagactttgtaatgaatactttaaaccaraaattaagttctacatactatctatggataaaaagaagtggtttgtaaatttatctttatttttactaaattaaaaaatttaaagccaaaatgttaggtcaggatttaaaacaagcattgggtgacagggtgttgggcgtaatggttagattgaaactcggtgtcagctggttactgattgcatccccaactttaggattttggtaaaattaaagcaattaatgcaaataaaggtgcccgaagagcacccagcatatagctctcatttgttgattctgttagatcatgatcaatgttaagcctaaaaacaaggtggccacatcagtggtttgtaacccatgtttattctaatcagtcaatctggggctatatataatagtagttgaatgtttatagtactacccttggaaaattcccatatattcacacccagcatggatataaatacggaaagatttcccattgagtacttctctttatcactccagtaacactagacaa

SEQ ID NO: 703149 - DNA, 1141 bp, Homo sapiens
ggttgcagtgagccgagattgcaccactgtactctaccctcactgacagagtgagattctgtctcaaaaaaaaatcaagtggttttatgattcctccaacaatactataagatttgccctaagggttacaaatgataaagcccagcacatgacagaataacctttgcttgcatatgcttataaaatattgttggcttaatgaaaacagctaaattgtacacttttggtataaacttttttttttttttagaatggtatgaggtcacaggttggtttaagagtgtgccctttcttaaggatgatatgcatggaaaggccaaaagcaatttcaggataccaaaaaaacttcccctaattggcactttaactagtgaggctggggtggaagagcttttcattgacattcccctttatttaacaatttatttagttgaatcaaataaggtactccttttacttttacaaagcccggatggcttctctaccatccaaggaggtaagaagttaaactgagagttttgattgtttttgttttttgagatggaatcttgctctgtcacccaggctggagtgcagttgcttgatctcgccttactgcagcctctgcctcccaggttccagcgattctcttgcttcagcctcctgagtagctgggattacagrtgctcacctccacacccagctaatttgtgtatttttagtagggacggggtttcaccattttggctgggctggtcttgaactcctgaccttaggcgatctgcctcccaaagtgctgggattacagggatgagccaccacgcccagccagctgagagttttaatcctctattacacaattggtttctctggcaatcaatcctggtcctgaggctgtccagaagcctccagccagaaatcatctcattaacatacaaaagatgcttctcttttcagacattctaaagattttaggggctgcatacaaagaaactgagacaaactaaatactgacattgataagagcctccagacctggctcagctctggcagtctctggaaagctttgctttactcacctccttttaattagaacctacccccaataaccctgtggacattctttatagcagcggcatgttctggcatttcacatctttga

SEQ ID NO: 703150 - DNA, 1141 bp, Homo sapiens
ggttgcagtgagccgagattgcaccactgtactctaccctcactgacagagtgagattctgtctcaaaaaaaaatcaagtggttttatgattcctccaacaatactataagatttgccctaagggttacaaatgataaagcccagcacatgacagaataacctttgcttgcatatgcttataaaatattgttggcttaatgaaaacagctaaattgtacacttttggtataaacttttttttttttttagaatggtatgaggtcacaggttggtttaagagtgtgccctttcttaaggatgatatgcatggaaaggccaaaagcaatttcaggataccaaaaaaacttcccctaattggcactttaactagtgaggctggggtggaagagcttttcattgacattcccctttatttaacaatttatttagttgaatcaaataaggtactccttttacttttacaaagcccggatggcttctctaccatccaaggaggtaagaagttaaactgagagttttgattgtttttgttttttgagatggaatcttgctctgtcacccaggctggagtgcagttgcttgatctcgccttactgcagcctctgcctcccaggttccagcgattctcttgcttcagcctcctgagtagctgggattacagatgctcacctccacacccagctaatttgtgtatttttagtagggacggggtttcaccattttggctgggctggtcttgaactcctgaccttaggcgatctgcctcccaaagtgctgggattacagggatgagccaccacgcccagccagctgagagttttaatcctctattacacaattggtttctctggcaatcaatcctggtcctgaggctgtccagaagcctccagccagaartcatctcattaacatacaaaagatgcttctcttttcagacattctaaagattttaggggctgcatacaaagaaactgagacaaactaaatactgacattgataagagcctccagacctggctcagctctggcagtctctggaaagctttgctttactcacctccttttaattagaacctacccccaataaccctgtggacattctttatagcagcggcatgttctggcatttcacatctttga

SEQ ID NO: 703151 - DNA, 539 bp, Homo sapiens
gatatcctttatgtagtcaacctaatcataatgagatgaggctttgcaagtaatatatttggcctgtttcctactgtgagtttcttagtaactgggattttgagtaaataagaggacccaaataagaaaatattgaagcttacacckcattttgtgatccagtagctcttttggagacctctactccacacttagacatagacatgttaaaatgaaagaatattttagagttaatttttttcttcaacatgcttattttacaggtaagcaagcctagagttattgagtgatgtccagtttcatggctagcaaatggcaaaactaagagaaaactgggactcctgacatctacttctcatggagatcctaaatattgaataatagtattatgggttgaattgtgtccctcaaattttcatatgttgaagccattactcctagtgaattagaatgtgatcttaattggaaatagggtcattgaagatgtaattagttcagatgagatcattagagtgggccctaattcattatgactggtg

SEQ ID NO: 703152 - DNA, 612 bp, Homo sapiens
ttaagcactgatcgcaatctctgtatcaaggacctcagagagaaacagaaagtcatcacaagggatttgaaaaccccatgtgcrttccaaatactgtctgtaagtttgaaaatttaagagagtttcagaatatcctcctgtgcataccttttctgctcctctttgaatgtattatgtgattttatgatttaaagaggagaacttagttaaaggcataactgtattcacaaaaacttttgccttgtattttttcagtcagtgcctactcagaagtaaccatttatacatttattaacccagtattcagtgagaatttgctatgtgtcaggaatcttgttgttattgttattgtcgttgccaggttggagtgcagtggcgcaatcttggctctctgcaacctccacctctcaggttcaagcgattctcctgcctcagactcctgagtagctgggactacaggcgcacatcaccacactacaccacatcacagctaatttttgtatttttagtagagacggggtttcaccatgttggccaggatggtctcgatctcttgaccttgtgatccacccgcctcagcctcccaaagtcctgggattacaggtatgagcc

SEQ ID NO: 703153 - DNA, 1411 bp, Homo sapiens
tattctttgaattttcgttatatggatgtatatgtgtctatatggatgtatatgaatatgtgtgtgtgtatggatgtatatatgtatatatgcamacacacaaacacaacacaaacatatacagatttatttcatattaaaattatatttatttagtgagaacaagaaaaatggattttttactgaaatatgttacatgtatacaaattatatacacattttacggctagaataaaggattttttaataaaatccatgccatacattttaacatatttgttatctttaatttcagtctgtcaatcaaaaatattagtgtttcacttgcactcattaagagttgtaaagtctcattcaaaatatatttctatatttctcattggcaactatttgctacttttttttttttttttgcaatttttcgcccttcttggaagacgttctcaatttaatctgagaatattttagggcagtgatcctcaaggtctccaaatcagtagcatcagtatcgcctgggcaattcttagaaatgaaattctaaggtggtaaggcccagaaatgtgtggtaattagccctacaggtgtttctgatgatgtctgagaatcactgctttagagcttcttatatatggattaaccacagacagttacctgactgacctcctccataatctgtgctattactaagaagcaagcaggttttcaaagattgatacctgtgaactaaatgcatatgaaatctaaacctaagtgtctaattactaatgtgtagttgagtctacacagaatttccagtgactattgtatttatagtttttcctcaagtccacccttttcaagttgctaaagacccccaatcaatctgcaggttctttagtgagcatggaagaaaagggaagtgggtcgttttgagccacagttcatctaggtattgtaagttgaatcgagcttatgctgccccgcaacagagcacacacctcttcagtgactgagtattagtggtccattaaagctggtgatgcacaaggtaaacagcaaaattctttctctctggtctctattgttatagtactgtattttattagagcataggcagcttggcttaactgctctgagatacgactattcagtctttaaatggaatagtatttttttttttttttttttttgcttcaataagggggggcaggacagatgattctaaatctttttacatcaaaaaaatctttaaatgttcagattgcaagtctcagccataaaaattatgtaagatttgtatattcaggtaatcttactttgtcactgagaatgttttcttggcttatgtatttaactagacggcaatcttcttggttaaggactgtctctctccatatatattgtagtatgttgttggaaacacaagcacatt

SEQ ID NO: 703154 - DNA, 1411 bp, Homo sapiens
tattctttgaattttcgttatatggatgtatatgtgtctatatggatgtatatgaatatgtgtgtgtgtatggatgtatatatgtatatatgcacacacacaaacacaacacaaacatatacagatttatttcatattaaaattatatttatttagtgagaacaagaaaaatggattttttactgaaatatgttacatgtatacaaattatatacacattttacrgctagaataaaggattttttaataaaatccatgccatacattttaacatatttgttatctttaatttcagtctgtcaatcaaaaatattagtgtttcacttgcactcattaagagttgtaaagtctcattcaaaatatatttctatatttctcattggcaactatttgctacttttttttttttttttgcaatttttcgcccttcttggaagacgttctcaatttaatctgagaatattttagggcagtgatcctcaaggtctccaaatcagtagcatcagtatcgcctgggcaattcttagaaatgaaattctaaggtggtaaggcccagaaatgtgtggtaattagccctacaggtgtttctgatgatgtctgagaatcactgctttagagcttcttatatatggattaaccacagacagttacctgactgacctcctccataatctgtgctattactaagaagcaagcaggttttcaaagattgatacctgtgaactaaatgcatatgaaatctaaacctaagtgtctaattactaatgtgtagttgagtctacacagaatttccagtgactattgtatttatagtttttcctcaagtccacccttttcaagttgctaaagacccccaatcaatctgcaggttctttagtgagcatggaagaaaagggaagtgggtcgttttgagccacagttcatctaggtattgtaagttgaatcgagcttatgctgccccgcaacagagcacacacctcttcagtgactgagtattagtggtccattaaagctggtgatgcacaaggtaaacagcaaaattctttctctctggtctctattgttatagtactgtattttattagagcataggcagcttggcttaactgctctgagatacgactattcagtctttaaatggaatagtatttttttttttttttttttttgcttcaataagggggggcaggacagatgattctaaatctttttacatcaaaaaaatctttaaatgttcagattgcaagtctcagccataaaaattatgtaagatttgtatattcaggtaatcttactttgtcactgagaatgttttcttggcttatgtatttaactagacggcaatcttcttggttaaggactgtctctctccatatatattgtagtatgttgttggaaacacaagcacatt

SEQ ID NO: 703155 - DNA, 663 bp, Homo sapiens
ttcaaattcttcagctttgggattcggactggcttccttgctcctcagcttgcaggtggcctactgtgggaccttgcagttgtgtgagtttaatactcctcaataaactcctacatatatataatatataatacatattatatattatatatatacatactagggttctctagagggacagcactagatatatatatatatatagtttccatagtctgtggtgtaaactatgtgaaatggactttacaacctcctgaagggtaacacccagactgtcacctgaactccctgaaatcctgtgccctggggattggagaaaccttaaaaccaaagccagtgttaagttagctcagtctttgattaaacatggcaatctccctatacttggcttcyaggggtgggtgagggagaattcctgcctggaacaaggtcgcattacaaagaatcttcacaatgctcatgagacatcttggaccttccatcagaagcattcaggatggcaggagactggacatgatgagcaaacatggggagaggaggaaggaaacagagaatggaaggaggtgacagctgacaaggccttgtgttcccagatgctgagtgtgaaatgaagcgtttatgatgaaggaaacagaacagatgtacggtacaatattaaatata

SEQ ID NO: 703156 - DNA, 663 bp, Homo sapiens
ttcaaattcttcagctttgggattcggactggcttccttgctcctcagcttgcaggtggcctactgtgggaccttgcagttgtgtgagtttaatactcctcaataaactcctacatatatataatatataatacatattatatattatatatatacatactagggttctctagagggacagcactagatatatatatatatatagtttccatagtctgtggtgtaaactatgtgaaatggactttacaacctcctgaagggtaacacccagactgtcacctgaactccctgaaatcctgtgccctggggattggagaaaccttaaaaccaaagccagtgttaagttagctcagtctttgattaaacatggcaatctccctatacttggcttccaggggtgggtgarggagaattcctgcctggaacaaggtcgcattacaaagaatcttcacaatgctcatgagacatcttggaccttccatcagaagcattcaggatggcaggagactggacatgatgagcaaacatggggagaggaggaaggaaacagagaatggaaggaggtgacagctgacaaggccttgtgttcccagatgctgagtgtgaaatgaagcgtttatgatgaaggaaacagaacagatgtacggtacaatattaaatata

SEQ ID NO: 703157 - DNA, 595 bp, Homo sapiens
gaccatgagacagggtgctgacacggggatggcagctggcttgcctggttatgcccttaaacaccggtgcagccaatgccttaggctctgcacatagtccctcagagcaggtcttccccctcttcacttgcagagcctcttccaagctcaaagtcaaattgtgggtgtgtgagctaggagaatctcaggttttgactgttctatgagctcatcctctcccagttgccaccaccactaccaccatttctcccgcttagctattgtccagcctcccttacaccttgcaaaaatagatctcattattccagtttcttcctttcttccaacacacacacacacacacayacacacacacacgcacacacacacacaccccttatagagaagatgccttcacacacaccccttatagagaagatgccttcagcacctttgaggcgatggtcttcttacatatgtatattcacacaaatacaaacataatcacccttaccttctttggaaagatctaaatacagacccttagaggtttatgagaaacttttatttcatttttaatctctagtgagtatcctaacatactattattgggtca

SEQ ID NO: 703158 - DNA, 640 bp, Homo sapiens
  misc_feature 14: n = A,T,C or G
ttttttttttttcntgagacagagtcttgctctgttgcccagactggagtacagttgcacaatcccggctccctgcaacctttgcctcctgggttcaagtgatcctcaacctcctgagtatctggaactacaggcatgtgccaccacaccctgctaattcttgtatttctagtaaagatggaatttcaccacgctggccaggctagtcttgaactcctggccttaagtgatccgcctgcctcggcctcccaaagtgctgggatttcagtstgagccgctgtgcccggtctctttttttttttttttttttgagaccttgagaccgggccttgctctgttacccaagctggagtgcagtggcaggatcatagctcactgcagccttgaacttctgggctcaagcaatcctcccacatcagcctcccaagtacctaggactgcagatgcttaccaccatgcccagctaatttttcatgaatttttaattattgaaattcagacatctaagaagatgctgaggactgtctccatattcctgaaattacgactcacctattcacaaaccagcccttctagtggaattaaaatattatttgattttgaataccctactctaaggtaggcacattgccctgcgatt

SEQ ID NO: 703159 - DNA, 677 bp, Homo sapiens
tttaatgaacgttcctttccaatgggaccaggtttgtgttctttgttttctactggactcaaatctggaagctaaagtcaaatgtttatgataaaactatgtttatgatagatgagtatctttcatcattgcaccatgatcaaagatattcattaaaattaagttcacttttaaaagtattatttgctcttcatgtcagtggccttcataaaattttatctggattatraagtatatttaccttctgggctttgataggtcctgctcgtggctgcttctgccgctgttctttaggttcaggtattttgtcagcagatttttccgaaagcacaggaacaacttcattttcatttccatttgaggctggagcaccaaactgaattgtgtcagttccaatttcgagtccactttcttgaccattcttcgctccctagtaaaagaatattttaaaacttgcttgcaaagtatagttcagatgtgactgatttatgaagcactatacagtttaagtacaatagaaggtttaagacaatctacatattaactgagaccgacattaattatattttaggataattttctcttaactgttgtttgtctgtactagaaaacaactgataaaatgaaactagcacaagacttaagtttttaaagtcctggctctcatgagtgtgatc

SEQ ID NO: 703160 - DNA, 677 bp, Homo sapiens
tttaatgaacgttcctttccaatgggaccaggtttgtgttctttgttttctactggactcaaatctggaagctaaagtcaaatgtttatgataaaactatgtttatgatagatgagtatctttcatcattgcaccatgatcaaagatattcattaaaattaagttcacttttaaaagtattatttgctcttcatgtcagtggccttcataaaattttatctggattataaagtatatttaccttctgggctttgataggtcctgctcgtggctgcttctgccgctgttctttaggttcaggtattttgtcagcagatttttccgaaagcacaggaacaacttcattttcatttccatttgaggctggagcaccaaactgaattgtgtcagttccaatttcgagtccactttcttgaccattcttcgctccctagtaaaagaatattttaaaacttgcttgcaaagtatagttcagatgtgactgatttatgargcactatacagtttaagtacaatagaaggtttaagacaatctacatattaactgagaccgacattaattatattttaggataattttctcttaactgttgtttgtctgtactagaaaacaactgataaaatgaaactagcacaagacttaagtttttaaagtcctggctctcatgagtgtgatc

SEQ ID NO: 703161 - DNA, 941 bp, Homo sapiens
aaattttgtttgtttttgtttttactgagattacaagtatattaggaaaaattatatttaaaaaatttggaggaaagaaaatttgccattaattatattaagagggagagatgggtgggtttaaaactttttcttttctttctttcccaaattttctgagctgggttctggaaggatgaaccaattaaaaaatatatatatatggaaaaagattacaaatcctgggctaagggcaaagtggtttcaaccctgatcatgtatccccaaccctctgatactccaaagtcaggacttcctttttttcagccaggacgtttttattctgtagagttttttgtttgtttgtttttgagacagaatctcactctgttgcccggactggagtgcagtggtgcagtcttggctcactgcaacctccacctcccyggttcaagcaactcttgttcctcagcctcccaagtagctgagaccacaggcacacaccatctcgcatggctaatttttgtattttttgtagagatagggtttcaccatgttggccaggctggtctcaaactcctgacctcaagtgatccacccgccttggcacccccaaagttctgggactgcaggtgtgccaccacgcctcagcttccatagagtttagttttgatctgttttgtttaatttttattttttaattttatttttccataagttattcaggtacaggtggtatttggttacatgagtaagttctttacactagtgatttgtgagatattggtgcacccatcacctgagcattatacactgcaccatatttatagtcttttatcccttatccccctcccattcttccccccaagtccccaaagtccattgtatcattcttatgcctttgcgtcctcatagcttagctctcccatataattgagaacatacaatgtttggttttccat

SEQ ID NO: 703162 - DNA, 574 bp, Homo sapiens
atctatctatctagccatctgcctgtcatctacatctatcaatgtatgttttaacattttgtttgaattatgacagtgtcattattaacttttatatcactgcaaaagaagtaaataatcaggtaaattagttcaataagggccctaactgaagactgaaaggataacaaaaagaaaagaaaagaaaagtatcttactgtcttttagcagaaatttgcactgtatgaaagcaaatatggacatattcaaattggtgctgaataaatatgagaaggctagaatgtcctggctcagaaaaactatctctacagtcacaaccatataatgatatttaaattttatttatttctaagctcccattcacagcacaaagctcctgcttataatgctataccattgagtaagagcaaaatcttcatttcaaaatcgaaaaggtttagcgaggctcaactgaatggatgtgtgcataaaatggtatttttcccsgggaggtgagattttgataatactaaagcctctcccctgactgaattggccacaaggaggaatccatccctgtataatgaggccaggg

SEQ ID NO: 703163 - DNA, 617 bp, Homo sapiens
ggattcatagaacttacttctattcagtacaatttattgagctcctcagttgaccagtctggaaggataatcttacaggtccctttctatatcctgctaaaaggtatcagataaataaacaaattaaaaaataagtgagtacagtaaatcacaggggattacaaagcactcccagacagatgggtcagtgtgtctaaggggttgcccattataatctgctggatcatcattcacggtcccctgttggccataygctgctgtctgaatactctgggacgttcatttttcatttcagggatatgattactcagtttcagtctttgctgatcgcattagtccattctcacactgctataaagaatttcccgagactgcgtaatttacaaaggaaagaggtttaattgactcagagttcaacatggctggggaggcctcaggaaacttaacaatcatggcggaaggggaagaaggcatgtcttacatggcagcaggcaagagagcaagtgtgtgttagcacaggaaaaacgaccacttatcaagctgtcagatctcatgagaattcactcactatcacaatagcagcatgggggaaaccacccccataatccaaccacttc

SEQ ID NO: 703164 - DNA, 617 bp, Homo sapiens
ggattcatagaacttacttctattcagtacaatttattgagctcctcagttgaccagtctggaaggataatcttacaggtccctttctatatcctgctaaaaggtatcagataaataaacaaattaaaaaataagtgagtacagtaaatcacaggggattacaaagcactcccagacagatgggtcagtgtgtctaaggggttgcccattataatctgctggatcatcattcacggtcccctgttggccatatgctgctgtctgaatactctgggacgttcatttttcattycagggatatgattactcagtttcagtctttgctgatcgcattagtccattctcacactgctataaagaatttcccgagactgcgtaatttacaaaggaaagaggtttaattgactcagagttcaacatggctggggaggcctcaggaaacttaacaatcatggcggaaggggaagaaggcatgtcttacatggcagcaggcaagagagcaagtgtgtgttagcacaggaaaaacgaccacttatcaagctgtcagatctcatgagaattcactcactatcacaatagcagcatgggggaaaccacccccataatccaaccacttc

SEQ ID NO: 703165 - DNA, 662 bp, Homo sapiens
atgtgaaaaagtcctcaaagggccaaaacacccctgaagaagtataaagatggcagcacttgtctcaggtaagacaaaactcatagaaaattagacagtgtgtggtcctggtgcagagacagagaagatgactgatggaattgattacaatggtcccccaaaagaagcatacttatgtggaaatgtaattttgcttgaatctagtacagcagctaagtggagaaataaggactttaaaaaattgtgtggaagcaattagaaaccatatgaaagtttaaacacctatgtgaaaggcaaaactataaaattttacaagataacatgggagaatatatttataactscagggtagagaaaagtttcttaaacaggacccaaaaagtacaaatctcaaagggaataatagatgaatttcactacgttaaaaatctgtttatcaacacttgttttaaaacaagaagaaacacaaaccacaatggggaaggaaatatttgcaatatacaaaaccaacaaagaattctaattcaactcaataaatttaataacaaaaagaaaactcagaagaaaaatggataacagacatgcataaatatttgacaaaagaaaaatgcatgacaaacataaaaatgtgctcaatctcattagcaattatggaaatgcaa

SEQ ID NO: 703166 - DNA, 662 bp, Homo sapiens
atgtgaaaaagtcctcaaagggccaaaacacccctgaagaagtataaagatggcagcacttgtctcaggtaagacaaaactcatagaaaattagacagtgtgtggtcctggtgcagagacagagaagatgactgatggaattgattacaatggtcccccaaaagaagcatacttatgtggaaatgtaattttgcttgaatctagtacagcagctaagtggagaaataaggactttaaaaaattgtgtggaagcaattagaaaccatatgaaagtttaaacacctatgtgaaaggcaaaactataaaattttacaagataacatgggagaatatatttataactccagggtagagaaaagtttcttaaacaggacccaaaaagtacaaatctcaaagggaataatagatgaatttcactacgttaaaaatctgtttatcaacacttgttttaaaacaagaagaaacacaaaccacaatrgggaaggaaatatttgcaatatacaaaaccaacaaagaattctaattcaactcaataaatttaataacaaaaagaaaactcagaagaaaaatggataacagacatgcataaatatttgacaaaagaaaaatgcatgacaaacataaaaatgtgctcaatctcattagcaattatggaaatgcaa

SEQ ID NO: 703167 - DNA, 648 bp, Homo sapiens
gcagaagatggcaatgagaacagcagcttaggatggatgggaaagcagaaacccaggcccagaactgcggcttctcagaattctgagaagctgagattaagcctggagactttgttccttcctctgtttctttcattctttaaaaatgtgttactaatttatattttcagaccagaaggcaaccttattttctttaccagtcttgaatccagactggcacagcactgttatatttgggaaaatacaaatggctgtggaattcttggggaagatgtagacaagccttgacgttgtacaattccttttcactatgcacatccctgcttagcctgggcagagcctctgtacatgaggacgaacatgaatacaagatgaacaccaactgaygtactgacctacagacatctcaacattacagccgctgttatgtctgtgaaagagttcacgtgggcttccacttctttactacatgaactcccaaatacccactttcaactatttattcttatcctcatttatagaataaagctgacccaaaacaccaccactaagggagaatgactttgcaactagtggcaagattaaataatgttggaactttgtagcccaagttagcactgaagaaaagatagttcagacaataaacgt

SEQ ID NO: 703168 - DNA, 639 bp, Homo sapiens
tcctaagctgcccattgacaaagtcaattatttcctacaacccctccacccttctattgtatgaaagaataactaggctgacatttgcctctgtgttttaatttttggctccttttacctgaatttcttttttccaaggtctcccaaccactacagccaaaacccaggacaaaaaaaaattgtgtcaggcagagggctagataacaytgtgatcaccaccaactggccttttagagattcaggtaccgtcatgtgttccaagagatttcaactcatggctgcatggcaatgagaagactgtatctatatttcagtacttgcgacatcagcaagtcacattttcttgggtttattttttctgccttgtattgattctaccctgttcctaatataccaatatctgaagtgctaagagatatcagccttccctactcttcttatgtatgttttaaaattttaaatgatatgtcatgttagtatgtattttggggatgtgtgttttattttgatacacatatctaatatttaatgatcaaatcagggtcattaggatatccatcaccttgaacatttatcttttctttgtgttggaaacattgcagttcttctcttctagctattttgagatacacaaaaaat

SEQ ID NO: 703169 - DNA, 639 bp, Homo sapiens
tcctaagctgcccattgacaaagtcaattatttcctacaacccctccacccttctattgtatgaaagaataactaggctgacatttgcctctgtgttttaatttttggctccttttacctgaatttcttttttccaaggtctcccaaccactacagccaaaacccaggacaaaaaaaaattgtgtcaggcagagggctagataacactgtgatcaccaccaactggccttttagagattcaggtacmgtcatgtgttccaagagatttcaactcatggctgcatggcaatgagaagactgtatctatatttcagtacttgcgacatcagcaagtcacattttcttgggtttattttttctgccttgtattgattctaccctgttcctaatataccaatatctgaagtgctaagagatatcagccttccctactcttcttatgtatgttttaaaattttaaatgatatgtcatgttagtatgtattttggggatgtgtgttttattttgatacacatatctaatatttaatgatcaaatcagggtcattaggatatccatcaccttgaacatttatcttttctttgtgttggaaacattgcagttcttctcttctagctattttgagatacacaaaaaat

SEQ ID NO: 703170 - DNA, 639 bp, Homo sapiens
tcctaagctgcccattgacaaagtcaattatttcctacaacccctccacccttctattgtatgaaagaataactaggctgacatttgcctctgtgttttaatttttggctccttttacctgaatttcttttttccaaggtctcccaaccactacagccaaaacccaggacaaaaaaaaattgtgtcaggcagagggctagataacactgtgatcaccaccaactggccttttagagattcaggtaccgtcaygtgttccaagagatttcaactcatggctgcatggcaatgagaagactgtatctatatttcagtacttgcgacatcagcaagtcacattttcttgggtttattttttctgccttgtattgattctaccctgttcctaatataccaatatctgaagtgctaagagatatcagccttccctactcttcttatgtatgttttaaaattttaaatgatatgtcatgttagtatgtattttggggatgtgtgttttattttgatacacatatctaatatttaatgatcaaatcagggtcattaggatatccatcaccttgaacatttatcttttctttgtgttggaaacattgcagttcttctcttctagctattttgagatacacaaaaaat

SEQ ID NO: 703171 - DNA, 639 bp, Homo sapiens
tcctaagctgcccattgacaaagtcaattatttcctacaacccctccacccttctattgtatgaaagaataactaggctgacatttgcctctgtgttttaatttttggctccttttacctgaatttcttttttccaaggtctcccaaccactacagccaaaacccaggacaaaaaaaaattgtgtcaggcagagggctagataacactgtgatcaccaccaactggccttttagagattcaggtaccgtcatgtgttccaagagatttcaactcatggctgcatggcaatgagaagactgtatctatatttcagtacttgcgacatcagcaagtcacattttcttgggtttattttttctgccttgtattgattctaccctgttcctaatataccaatatctgaagtkctaagagatatcagccttccctactcttcttatgtatgttttaaaattttaaatgatatgtcatgttagtatgtattttggggatgtgtgttttattttgatacacatatctaatatttaatgatcaaatcagggtcattaggatatccatcaccttgaacatttatcttttctttgtgttggaaacattgcagttcttctcttctagctattttgagatacacaaaaaat

SEQ ID NO: 703172 - DNA, 1631 bp, Homo sapiens
gggggtagaaattcagattcttgactattcttctgttgtaagttggtggtgaagggctcctcaccaccccagtggcaaaaaagagaggcatctctttatcaccaggtcaggacagggataccattttatctgtggtgtgtggctgaagcagagaagttattgtctaaagggttttttctttttttgttttgcatggcttcccctttcctagtcctttggctggaaagagtgggcttttgttagggcatgttttgtttcaaccattggcatttctggattgctgactccaggcaaaaagaaaacttggaggaactcaccaccatgtcatttttggttccaaggtccctcgctatctgggtttccttctttttttctcaccttttagagtcttcttatgttggtttaactatactatccagggtttttagctgtccttastgagagaaataggaaaaagtacatctatttaatctttctaaaagcagaagctctcatccagcaaacttttagaaaccctgttgttcaagtctgcgttggtcgatttgagtgtgattgatgattcttctatggtctcactggagtgtccactgcccttgctctcagttcctcttcctgccagtggttaaagttattttaccggtacgatgccttgtaataagaaatgttaacctgctgtgtggagagctgaacccagcttttgcctagagatttctgccaaaattagaagctaattacagactttaagaattcctttttgttgttgttattgttgttctcaaactcctacaagcttttgctttacttctcagtttagtcttgagtattttatggctggtcagttattttgtaattcttagagtggcaaaactatgctaatctttcacaaaatctacatggctaatattaccatattcaatgatattaaatataagccatatataacacccaagaagaagcaccacaagtctatgattggttaggcagtgtatcagtagattccgacataaaacagagagcatattcaaattaggatatttagaggagggtttattttacagaaacaacttaccaaaaaaaaaaaataataataaaaagagacagaaaactatttataaaagtgatactgtaaggataagggagaatgtatatacaccaccaaaaaggagagagtcacaccgaaaagtcagttttgagatcagtttagagaaaatgcaggccaaggcagtgtcagagggataaaaaaatatacatctggacctctcttttgtttctccctccagtctcctccaggggctcccaatggttgaactcaaaaggaagccataggatgaggaagcccatgttagcctcttgggacagaaagtcagcttaaaagggggcctgtggaatatattcagcctagatggtttatttgttaatattcaagtgtaaatctgagcagattagttaggtggtgtgctgagggacagttagagtcaagaatttaaactttgaatcttataaaatactcagaccaatattaggaatttgagtaagtggaaagctataacttgcttaaaaattaatgcatgtgaaataccgatgatggcttttagctagagtccctataaccaaaatatggggtaacctgg

SEQ ID NO: 703173 - DNA, 1631 bp, Homo sapiens
gggggtagaaattcagattcttgactattcttctgttgtaagttggtggtgaagggctcctcaccaccccagtggcaaaaaagagaggcatctctttatcaccaggtcaggacagggataccattttatctgtggtgtgtggctgaagcagagaagttattgtctaaagggttttttctttttttgttttgcatggcttcccctttcctagtcctttggctggaaagagtgggcttttgttagggcatgttttgtttcaaccattggcatttctggattgctgactccaggcaaaaagaaaacttggaggaactcaccaccatgtcatttttggttccaaggtccctcgctatctgggtttccttctttttttctcaccttttagagtcttcttatgttggtttaactatactatccagggtttttagctgtccttactgagagaaataggaaaaagtacatctatttaatctttctaaaagcagaagctctcatccagcaaayttttagaaaccctgttgttcaagtctgcgttggtcgatttgagtgtgattgatgattcttctatggtctcactggagtgtccactgcccttgctctcagttcctcttcctgccagtggttaaagttattttaccggtacgatgccttgtaataagaaatgttaacctgctgtgtggagagctgaacccagcttttgcctagagatttctgccaaaattagaagctaattacagactttaagaattcctttttgttgttgttattgttgttctcaaactcctacaagcttttgctttacttctcagtttagtcttgagtattttatggctggtcagttattttgtaattcttagagtggcaaaactatgctaatctttcacaaaatctacatggctaatattaccatattcaatgatattaaatataagccatatataacacccaagaagaagcaccacaagtctatgattggttaggcagtgtatcagtagattccgacataaaacagagagcatattcaaattaggatatttagaggagggtttattttacagaaacaacttaccaaaaaaaaaaaataataataaaaagagacagaaaactatttataaaagtgatactgtaaggataagggagaatgtatatacaccaccaaaaaggagagagtcacaccgaaaagtcagttttgagatcagtttagagaaaatgcaggccaaggcagtgtcagagggataaaaaaatatacatctggacctctcttttgtttctccctccagtctcctccaggggctcccaatggttgaactcaaaaggaagccataggatgaggaagcccatgttagcctcttgggacagaaagtcagcttaaaagggggcctgtggaatatattcagcctagatggtttatttgttaatattcaagtgtaaatctgagcagattagttaggtggtgtgctgagggacagttagagtcaagaatttaaactttgaatcttataaaatactcagaccaatattaggaatttgagtaagtggaaagctataacttgcttaaaaattaatgcatgtgaaataccgatgatggcttttagctagagtccctataaccaaaatatggggtaacctgg

SEQ ID NO: 703174 - DNA, 2722 bp, Homo sapiens
aattaattcaactccttgaaaaagatggttagaagccagttaccaagagatttaaaaaatagttattttattgggttcaactttaaatgaaagtttaatgtttagaattagacaagtgaggatataaatgttttaataataggtttagattattttgataataaattcaaaagacaattaatggtaagtttgcagcaactggtgaaataaacaaggtcaagagaggactcagaacagtatatgtagaggacttttggggaaaatgaagaaagaaaaatatggaaagagagatggtcaagatgcagcaattctttcccttggttttgtgtcaaagttcttttctatttttactagagtgtcatgaaacaggcaaaaggrtttcagaaaacaaaatttcacagtgaacttttagtgagagaagttttttgttttaaaaaactgtttaaaatagaagaggtaaagaatatcagtaccagtggaaagggactagatagaaattcacaaacactagatttgagatttagcgctaccactgtctagataactttggacaagtcttaaccttactctatcccagtttctttcaaaaatgaaggtgatggacttaatcctaaatatctctttgaatcttaaattaagtgattctatgcaatactttaaaaaaaagttaacgtaaattttacagcctccagtaggttcaagtgcaatgctgtggttgaatcttaaattatgtgattctagctaatacttttttttaacttaatgcattaatgcattagaattccaacagaaatcctaaatcagagatcagtagcaattgtaagcactgacatatattcatatgagaaataaaaccaagttagaaacataattgaacattatctcaagctggtttcacgttcttcaacagcctatatagtgagtgatgttatttaataaaaattaaaaggcaataacaaacatttttgagtcatatttatttcctttaataaatataatgagtgtttgaaggcaagaaaatagtatttcaactctgcttcctttcttccttttttcttccactaaaatctattgaattttcctttggctttttagggaggctaaaacaaacaaaatcagtccaatttatatatagcaagcatctttgtttcataggactccttgcctatgcactgattccttccctgtaggttagcagttcagggaatagtatttatttgttaactccaggtgctaaacgggttcagacacaaagcactttattgaagaacctggattccataaaaataatctctgcatttcttttatataaaaggagatctgggactaaattcaaaatgttttaagtctattttaagtagaatgaagtcattgaagattagaaattgatgtttaggtttctggtttgttcaaataaacagagctgccattcttgagctagaggttagagaaggaccagatctgggaggaaagatgatgacttcatcctgtttgtgtgcattggaggtgccttggagagagtcaagcggaactgtcctaggagacagaacgtatgagtctagagactagtaaagaggttggggctggagacatcagcctgggagccaatggcatgtccttctggtttattaaaacaataatcccatgaaaaagagtgcctgagaataaattactaggagacagacacctcccatgctttacctcagacatgcactgcaacaatttcatgggtgaataaagttaacttcattttacaaatgaagaaactgagtctcagaggcaagcagaccagaggttttcccatggtgaaacatcctatactttttctcaggtaaaaataattaaatgtggctcttccccccccagcctccattctaatcagaataagcagttgctggtggaaattggtcaaggaggagattgtgcctatggtttctcaaagaggacctgtgtgatttctactttagaggatgtatgctatcaaataatgagaaaagatcaaattgaagagaagaaaagccacaagcaatcctttttgcacaatcagctacacagtgggacaagtttgatatttgtattgttatttctcatccttatttgagccttgccagcccaagagtttaattttcttgcaatcctttttctattattatctttctattttcattaagtgtctgtcactggacttctctgtggtcagaattccaatatctcatgtcattgtcaatgctaacttggacttcagcattatcccaccatcatgggtttttccttattgacctgtccagctcttttttttcttgtcatttcaaccttggcactggaagccagtcacggacacacacacatacacatacacagctattcctggaaacacagggctgagattggagtctgctgggactagggagggagaaactatgcaaattagataactgtaaagcaaatactgtaataacttgaagtttgtgctaacacacatttccaagacccggacagtccccatggaaacaggactttgctgttgcagttacatcagaattctcttaggtaagtaatcagtaacagcatacactttctttccgcattgtccttgtcacaatggtgaatcctcaaatgcaaagagagaacaaaaggagagagatgcgactgattcccggatgataggtaaaatgccctctagaaaacaccaacaacactggagagaggcaacagtgggagt

SEQ ID NO: 703175 - DNA, 633 bp, Homo sapiens
ggaatgatgggtgtaaggggagaagagatagaagaaaataataaaacaagaaggaaatcaaaggcaatgttatcatagttgcttcagggaaactatgccttgatccagaattgaggtacagctgccctagaagtgatcagctcaataactcttgaacctttgtttcatcttccctaacctctaattctatctctttagaagttaacttccaaaagcgaatgactgcatgcaaacccttctcaagcactgtttgttgaggaattctagcttaagacaagtgctattcagacagtttagctaaggctgggtccacatccactggaccctttscttatttaaacatacagatgtttaactggtaccatgacccacatagctgtctctatgtgatgaggtctagccttctctgaaagtagttataattttattttatcatattttattttattttactgttcagtatggtgcagtagaccaagtcctgagctggcaaatatacagataataaatgttcaatatcattactcattggggaaattcaaattaaaaccccatgatataccactatacaattgctaaaaatgaataaaataaaatttaaaattctgacagtaccaagtgcttttgagaatg

SEQ ID NO: 703176 - DNA, 614 bp, Homo sapiens
tttttaatgaacctttagagagtgaaggggaagttttcccttggcccctacaaggtcaattcttatcagctttctcaagggcagctaacatccagttctctctacaaaccaaacttgccatcttcccaccgtgaaccgtgaaaatctgaaacaggtctgttaattagtaagtttattttgccaaggttgaggacatgtgcccatgacacagcctcaggaggtcctgatgacgtgtgcccaaagtggtcagagcacagtttgggtttatgcattctagggagacatgagacatcagtcaacatatgcaagatgaacattggttccgtctggaaaggygggacaactggaagcagaggtgggaagactggaagcagagaggggcctttcaggtcacaggtagataagagatggttgcactcttttgagtttctgattagcctgtctagaggaggtaatcagatatgcatttttcttagtgagcagaggggtgactttgaatagaatgtgaggcaggttggccctacgtagttcccagcttgacttttccctctagcttagtgatttgggggcccaaagatttattttcctttcacaccaccaacacttgttcccac

SEQ ID NO: 703177 - DNA, 643 bp, Homo sapiens
gctgatctatcaaaaattcctgtgtagtaatgggattataaatattktgtgaacaaaaaacctgtccatcaattactaggctctaagtaatttttcaataacatcagaagctccactgttttctgtgcgtatccataggctaatcacttaaacctaccatggttttaccttaatctcccaggtaatatcagacagaagtatttcctgtctgaaagtgctgaatccttgggttaattatttccagaagcccaaaagtttagtctttttaattttatttttttaattaaatgaaagcattatactcaactaaatataaccatcaaaagaaatcaacacaattggtaaattcacttgtctttgaacttgaagggctctagaggtactgtgggctttattccagaccactgcaataaagccaatactgcaaaaaaaagtgagacacagaaattttttgattttccagtgcataaaaagttatgtttacactatgttgtagcctattcagtgtgcaataacagtaagtctaaagaaaacaatgtatataccttaatttaaaaatattttattggtaaaaaaaaaagtgttaacagtcatttgagattttagtgagtggtaatcttcttgctggtggaggggcttgcct

SEQ ID NO: 703178 - DNA, 643 bp, Homo sapiens
gctgatctatcaaaaattcctgtgtagtaatgggattataaatattgtgtgaacaaaaaacctgtccatcaattactaggctctaagtaatttttcaataacatcagaagctccactgttttctgtgcgtatccataggctaatcacttaaacctaccatggttttaccttaatctcccaggtaatatcagacagaagtatttcctgtctgaaagtgctgaatccttgggttaattatttccagaagcccaaaagtttagtctttttaattttatttttttwattaaatgaaagcattatactcaactaaatataaccatcaaaagaaatcaacacaattggtaaattcacttgtctttgaacttgaagggctctagaggtactgtgggctttattccagaccactgcaataaagccaatactgcaaaaaaaagtgagacacagaaattttttgattttccagtgcataaaaagttatgtttacactatgttgtagcctattcagtgtgcaataacagtaagtctaaagaaaacaatgtatataccttaatttaaaaatattttattggtaaaaaaaaaagtgttaacagtcatttgagattttagtgagtggtaatcttcttgctggtggaggggcttgcct

SEQ ID NO: 703179 - DNA, 1158 bp, Homo sapiens
cattggcttatcctctttagcctggtcctcaaagtgggccaagttgctgtttggtgctatacatcacttgccaatgacaatatccacagatagaaaggacaacatatttacctggcatccatattttagagcaagaaaactcttctcataaattctcaacagtgtttccctcaagtctcaaaactgcatggcctttccaggcctagccaattatttggcaagtcaaattagaccactatgatttgtttataccaattacaattcactccaagtggagggactgagaaagagccaaccagaatgtgcccatttggagaaaggtgaaaaacaacagggactctgtagcaaggacaaaaggcgtgagactgtaggacaggcaactactagatctgccactatcttctggaagctattttgtgttttaaatgagataatctgtgtaaagctcctaacacaatgcttagccactagtgcagagaagtaaaaatatgttagctgtttatatcattaagggcattattaataacatcattaagtatgagtaccacatagtctttccacaacattcataaaccgtttatttaaacactgaacacctgcttggtcacactccacctggagaatctgatgaacttttctgccaacctagcatgcagctacaggtgtgtgcctctgcagtgaccatgcacacacatttttctatactgtttcagctgaaggttcttggccctctgaatgccatctaggakactctggattaaatctttaaaaaatacttccttatacaggtcttcccactgatcctcctatctcctggattgctccgccatcacacttgtgatctgcctcctgccatagcccataagatctacaaggagagagaccatctctgtatccttcaatgctagttcccactgcccagtagggtttttgattcagcacattgaccaaattctatttgtaaaactgagaatttatcaactttaaataatgagttaaagcattttcaaagcacaagcaaattttctttccaatgcaaagtagctataagactattatataaaactcaagggtgggtttcttggaaagccctcaaatatccttagtggagaaaagcaggcaagaaggaaagtagacgaatgaataagaggacaaaga

SEQ ID NO: 703180 - DNA, 1437 bp, Homo sapiens
atatcatcattacactttttaatcatatcattaaaatgtcctgtggcttaattgggcagttggactctaaacatgtagttgaacttcacatgtgcatttcaacattgcaggacagctcctgataattggtatgtcctgcatgagttttgttttctgaattaaaggttcatacttattttaagcatattttaagccatagcaaccacctttcaaaaaatgtcctaagagatgatgaatgagaatatgctagaaatcttaaaatacaccaaaaatctaagattgtttagcaagttcaatttctttttcttttggtcagaattagttcagatgcctcagataattcattctaattgaataaaagatttaatatgtaaggaggattcttttcatggacatacacccatataacttttacatggtatgcatttgaattatatgtggattttaagatagtttaaaatgtttagtataatgtattcattcatttaaaggtccactgatatttctttttaaacttttgctgactcatttgtaagctgtttgttttaatggcaggttctggaaggtcaaccagtaaatatgttggttacaactgtgtttgcaaaggatcctgatgaaggaaataatgcagaagttacatactcagtatcttcaggtaaaacttactgttcatacgggattaagaacttttaggatttctgctttcatttatcaactatccccttctgggaaaagaagttctattttgattactttgaatgctgtagttagttttgaaaaagcaccaagttacaaacaaaatacatttgctattgtcaagaactactttcagtttttgaaaagtaatttaaagtttaataaaaaatcagagtagctttttacgttcttaatagaaaccattcatctttagtgagtaatttgcaataatgtgaagtacaaatttacttttattgataggaaagtgttagttaggggataagaattggtattaagtatgactaagagttccaagcatctataaatctttatgaagactgaatacttgtaaggtcagmgtaaatcatgcctagaaaatgtcacatgtatacatgcgtgtgtgtatggggaaattttattgaagtgggcttactattatgttttctgttggaacatgcaggccccagattttttccagttatttactttaattggcattgtgttttatataattttaaaagacatttggtgctttgtcatgtttgacacaaacataggacataggaaagaagagataacattgccctttcccacagatagtttgattgtctgcatggaaaacccaagagatgctataggcaacccattggaattaataaaatagccaattttctgagaataatgtcaacatacgaaactcactggtatttttaaaacttagcagtttccaaagatctcatt

SEQ ID NO: 703181 - DNA, 1437 bp, Homo sapiens
atatcatcattacactttttaatcatatcattaaaatgtcctgtggcttaattgggcagttggactctaaacatgtagttgaacttcacatgtgcatttcaacattgcaggacagctcctgataattggtatgtcctgcatgagttttgttttctgaattaaaggttcatacttattttaagcatattttaagccatagcaaccacctttcaaaaaatgtcctaagagatgatgaatgagaatatgctagaaatcttaaaatacaccaaaaatctaagattgtttagcaagttcaatttctttttcttttggtcagaattagttcagatgcctcagataattcattctaattgaataaaagatttaatatgtaaggaggattcttttcatggacatacacccatataacttttacatggtatgcatttgaattatatgtggattttaagatagtttaaaatgtttagtataatgtattcattcatttaaaggtccactgatatttctttttaaacttttgctgactcatttgtaagctgtttgttttaatggcaggttctggaaggtcaaccagtaaatatgttggttacaactgtgtttgcaaaggatcctgatgaaggaaataatgcagaagttacatactcagtatcttcaggtaaaacttactgttcatacgggattaagaacttttaggatttctgctttcatttatcaactatccccttctgggaaaagaagttctattttgattactttgaatgctgtagttagttttgaaaaagcaccaagttacaaacaaaatacatttgctattgtcaagaactactttcagtttttgaaaagtaatttaaagtttaataaaaaatcagagtagctttttacgttcttaatagaaaccattcatctttagtgagtaatttgcaataatgtgaagtacaaatttacttttattgataggaaagtgttagttaggggataagaattggtattaagtatgactaagagttccaagcatctataaatctttatgaagactgaatacttgtaaggtcagagtaaatcatgcctagaaaatgtcacatgtatacatgcgtgtgtgtatggggaaattttattgaagtgggcttactattatgttttctgttggaacatgcaggccccagattttttccagttatttactttaattggcattgtgttttatataattttaaaagacatttggtgctttgtcaygtttgacacaaacataggacataggaaagaagagataacattgccctttcccacagatagtttgattgtctgcatggaaaacccaagagatgctataggcaacccattggaattaataaaatagccaattttctgagaataatgtcaacatacgaaactcactggtatttttaaaacttagcagtttccaaagatctcatt

SEQ ID NO: 703182 - DNA, 1206 bp, Homo sapiens
taaaatttcataattaaaacactattgtattgattcactcattaataaatgggccagttaaaaagagtaggggtcacactttacacgtacggaaacttgacatatgagggggtagaaaataaatggggaaaagatggactatcaatacgtgatgctgatatgatcggttacctacaaggaaaaatatctctactctcagcatatcaaagatgagtcttattaaatgtagaaatctttaactcttacaaaagaaaatatgagactggttatatatatggcattgagaataaagaagacggtttaaacaagaagaaatgcagaagctcacaaagaaatagataaataaaactaaatgaaaattgaaaacactacaaaatatgccattgtttacaatgtgactattcaagtcacaagttgggaaaagataattatagtccagtaaccaatacaaaattagtattcagaatttattaagaactcctgcaaaccagtaagaaaaaccagtaaataaataataaaattggacaaagaatgttaacagacaactcaaagaaaagaagcctgaataattaaaaaggtttttaaagcatgcccagactccttgttgtgacgacttcgaagaacaatgaagcaatatctgataagactggagatgtgcttatgctatacccttgcagttctacttctgttaccctagaggaactctatatgtgyagagtgagactgtaacaggatattcattgaagcattgtttcagttgtctgcataatatggtatattcacggaatactatacagcaatgaaaatgaatacaatagaatttcatacatggcagtgtggataaatattgaatccaaagttaagcaaggaaggcaaggattttacagaagataaaaagaatttgacgcaaacagcagctttgagttcattgcattgcttttccttggaaaagttacatatgcagttcttctcaatacctccatggtcagggagccaaattcttctctgatgtttctatgcccatataaaccatccgaacttatttacctataaatgtcttcccaagttctcaggacacttgaatggtggattatacagaggtagtgagcctgcagcagatccacatttggagacagcccttcctctgtgttcctgctgtcccctccttcagagactctttccccattctccccctctttttttgtc

SEQ ID NO: 703183 - DNA, 1072 bp, Homo sapiens
  misc_feature 639: n = A,T,C or G
tgaagccagcttgtgtgctcatgagaggcaactgtgtgcatcgtgttcgggctccacgttcagtgacatcacattggtagtttgacatcagccatgataaaagtatttacaccacaaaaatcagcaaaagctacaaatcagggctttcccccgccacccgccccctccctccagggctgactgttaaacatttcctaccacaccacagcagatatgtacatatatacataygtacatacatacatacataatttcacataaaaggcaccatgtcatacatggtattttccccttcagctgccaaatgttagctgcagacagctcacagctgagtctctctccaggaattgccctaagctgaagggaactgccgcaccccaggtctgcttccctccctagggcaacctccttgcaactactcctcaaggccaagataaaaagtgaaaaggccagactcatcttaatgcagaacaacttcagctccaaagctcctccgggttcagctgggacttctgttgcaattgcattaaagagagagggagtgagagagggagagagagggagagagacagagagagagaaaagagaaaagagaggagagaggaaagaggggaaaggggagaggagagaggagagagncagagagagacagagagaaaagagaggagagaggagagaggagaaaaggggagaggagagaggagagagacagagagagagagagacagagaggagagacccatttgtccacaaccaacttctctcttcatctcccatcttgagttacctatttcagttcatttttgatttgcttaaggttctttctggagtatttttctcagatgggatacctggataatatacttttctcttttcagtgactttattttaatgagttttcagacttacagaaaggtgctcttcagatggggctgtgtcactggtcaaccatcttcactgtggagtcctagtcactacgattttgtgttgcatatcatgaagattcattcaaattgtctcctcttcctttccttcataataggttacatggtctgaaagtacatccctcctt

SEQ ID NO: 703184 - DNA, 621 bp, Homo sapiens
gtattaaccagagatacagaagcactagccactcagaaatgttgtgacaccagagacatgacacagagcaggatctgcaggtcctctgcatctgcttactggattgtggggaggttccagggtgggggccgggcagccagtgcagcagggctgtgcttgagaagctaagagcagcagccagttaccaacyggttcagaaggctttcaacagttgaagagccagagtggccacaccagctagaaatcagcctggctctccaaccacttctgagcaggctgaccttctggcagaggctgcagccccgttcctgcaagccacattttatggagttcttttattagtctctcatgtaacccatagccacatcataaaattaaacaccccattctgtacatcaagtccactgacttcttgagccctgattagcactgggcttttccctctgggagttctattaaagtaacattgtaacggacagaaaaggagtctttgctaggagcagccaaatccgcagactgactgagcttctgctggagtcaccatgtggcacagcgtgtcctcctttatcggaagcgcctttgccagcttcctatccatcgctctctgcctctttcattcct

SEQ ID NO: 703185 - DNA, 2594 bp, Homo sapiens
cagctccatctggcttcaatatctgtacacttcccacccctgacgctgacactgggcctgtgtgacacttggatatcgggtatccatgtggtaactatattttccaagccccaaatagggacacatggtctgacaagtgtgaaggtacttatggggcaagagactagaaggttttaaattaggcctgtcccagcaaatccaggacatctggtcatcatagatatctaggggctgcccacacccctggcacgaggcaggcttttgccttttaatactctttcccatcttgaatgcccaaggtctattttttggtttaagcacatgccacagacaagtgagggacatttaaaaagatcaaacagctggagagagattgcaagggacattctttttagggaagccacagcaggggagagggcaggagagggcaaggaagtggcagagggtcagaagagtaactcacgggttctaaatcccaggaggtgtagggcattgtgagctgaggtcaggttaaggctggggacttttcctcagtatcaggcccatagctacccacttctcctctcccttcctctttctccatctcttctccttggtcttttctcattgtgaactctcactactccctcctgactccggcttagagcagaaggagctgcagctggcctgaggcacctcaaggaggggcggctggtttctgtgcagtgaagacaacttcctgaagagctatgtgactgtgctgaacccgcttctgtaaaatgggttcaccaataacaggttactgtagaattatagaggatagggtgtaaaactgtcctataaacggtgaagaattggacacatgtggtgctcagttttgtattcagtgggagttggggtcaatgttatgttgatattgttagaataactgccagtcttaggagcatttatcagtagaggcctaacagcaataatgtgaggttgtgtgtttgcttcatttgaaatggtacagttgcctgctacttcacaaatacagggagaagaaaggagaagtgaggtacaaggcgggtacgtgtgcatgtttcagtgtgtgtgtgtttgtgtgtgtgtagagagagagagagaaatggaggtacaatctggcatttgttagaaatcgcacaatcatagaacactagggatgggccttaaagaatctatcctcttcactctatggacagggacactaaagctcagacagaaaaaagctaattttccaaggtcaatcactagtcagttgggggccacacggggcatggtctccaggtcttctggtccaagtccaaggcttccattgtcagcccatgctcagccctattgtacaaaccacgatgtgcaaggagcagtggggagtcagagggacagatgtgacctttcgtgtcagggtgtcccagattatttgggaaggccacacctacaaccgtgacccagtcaaagacgagcctgaaacagtactgactgggatgtaagatccagggatacacctcagggacctgtaagaatgtaggtgcaggagcagccatccaggcctgggtggtaggggaagacttgaggaaatagctgaaggagtggacgtggacagttagaataataaaaaacaagcaattaagtaacatttccttcaagtgatgctttttgctccaattcttgcctagaggtggtggtttgggattttaccagcatctctctttggaattcaaatgtaccaccagtacttcgcttttcctgaaaagcctaagttacaaattgatagcttctaaaacctctctgcaaagggttaaatgtctgtgttggaaaagagaaactcatcagttaatatctacttcttaatcagcccaaggtgctgaaaaaaaggccattcaccaagtggttagcaaagctaatttgtcattctggcattttgacctactgtgcttttaaggcattattcttccacacrtttcaaaaccgttattcttccacactgtagtttctgttggagagaaccaattacatctttccctaccatacacaatgggatgtccttgacattacttacggggttttccttcttatctggaaacttggttggaaacctctagaggagcaggggaccctcatttattcatctctacccgctccatagcacctcccatgaatccttgcccagggctggctctgaggaatcttttgttggatttgaaatgatgatcatatcgggttaatttccagcattaaccataaaaattggctagagttcaaagctggtggcatgctcaagttactgccaaacctcctgctcattccctcccacccccccagcctcaagttgtgagcaactgaatttatcagctgtgaaactggttgcactaatacctcagatgaatcttcaatataagctgtatcccctgctggggcttcttgaggaaggtgactggatctcactcatcttggaacctttatgcttagcccagtgactgcctggtacatagaaagtgctcaataaatgtttattgcattagacagtaattttcggccgggcgcggtggctcacgcctgtaatcccagcactttgggaggccgaggcggacggatca

SEQ ID NO: 703186 - DNA, 2594 bp, Homo sapiens
cagctccatctggcttcaatatctgtacacttcccacccctgacgctgacactgggcctgtgtgacacttggatatcgggtatccatgtggtaactatattttccaagccccaaatagggacacatggtctgacaagtgtgaaggtacttatggggcaagagactagaaggttttaaattaggcctgtcccagcaaatccaggacatctggtcatcatagatatctaggggctgcccacacccctggcacgaggcaggcttttgccttttaatactctttcccatcttgaatgcccaaggtctattttttggtttaagcacatgccacagacaagtgagggacatttaaaaagatcaaacagctggagagagattgcaagggacattctttttagggaagccacagcaggggagagggcaggagagggcaaggaagtggcagagggtcagaagagtaactcacgggttctaaatcccaggaggtgtagggcattgtgagctgaggtcaggttaaggctggggacttttcctcagtatcaggcccatagctacccacttctcctctcccttcctctttctccatctcttctccttggtcttttctcattgtgaactctcactactccctcctgactccggcttagagcagaaggagctgcagctggcctgaggcacctcaaggaggggcggctggtttctgtgcagtgaagacaacttcctgaagagctatgtgactgtgctgaacccgcttctgtaaaatgggttcaccaataacaggttactgtagaattatagaggatagggtgtaaaactgtcctataaacggtgaagaattggacacatgtggtgctcagttttgtattcagtgggagttggggtcaatgttatgttgatattgttagaataactgccagtcttaggagcatttatcagtagaggcctaacagcaataatgtgaggttgtgtgtttgcttcatttgaaatggtacagttgcctgctacttcacaaatacagggagaagaaaggagaagtgaggtacaaggcgggtacgtgtgcatgtttcagtgtgtgtgtgtttgtgtgtgtgtagagagagagagagaaatggaggtacaatctggcatttgttagaaatcgcacaatcatagaacactagggatgggccttaaagaatctatcctcttcactctatggacagggacactaaagctcagacagaaaaaagctaattttccaaggtcaatcactagtcagttgggggccacacggggcatggtctccaggtcttctggtccaagtccaaggcttccattgtcagcccatgctcagccctattgtacaaaccacgatgtgcaaggagcagtggggagtcagagggacagatgtgacctttcgtgtcagggtgtcccagattatttgggaaggccacacctacaaccgtgacccagtcaaagacgagcctgaaacagtactgactgggatgtaagatccagggatacacctcagggacctgtaagaatgtaggtgcaggagcagccatccaggcctgggtggtaggggaagacttgaggaaatagctgaaggagtggacgtggacagttagaataataaaaaacaagcaattaagtaacatttccttcaagtgatgctttttgctccaattcttgcctagaggtggtggtttgggattttaccagcatctctctttggaattcaaatgtaccaccagtacttcgcttttcctgaaaagcctaagttacaaattgatagcttctaaaacctctctgcaaagggttaaatgtctgtgttggaaaagagaaactcatcagttaatatctacttcttaatcagcccaaggtgctgaaaaaaaggccattcaccaagtggttagcaaagctaatttgtcattctggcattttgacctactgtgcttttaaggcattattcttccacacatttcaaamccgttattcttccacactgtagtttctgttggagagaaccaattacatctttccctaccatacacaatgggatgtccttgacattacttacggggttttccttcttatctggaaacttggttggaaacctctagaggagcaggggaccctcatttattcatctctacccgctccatagcacctcccatgaatccttgcccagggctggctctgaggaatcttttgttggatttgaaatgatgatcatatcgggttaatttccagcattaaccataaaaattggctagagttcaaagctggtggcatgctcaagttactgccaaacctcctgctcattccctcccacccccccagcctcaagttgtgagcaactgaatttatcagctgtgaaactggttgcactaatacctcagatgaatcttcaatataagctgtatcccctgctggggcttcttgaggaaggtgactggatctcactcatcttggaacctttatgcttagcccagtgactgcctggtacatagaaagtgctcaataaatgtttattgcattagacagtaattttcggccgggcgcggtggctcacgcctgtaatcccagcactttgggaggccgaggcggacggatca

SEQ ID NO: 703187 - DNA, 2594 bp, Homo sapiens
cagctccatctggcttcaatatctgtacacttcccacccctgacgctgacactgggcctgtgtgacacttggatatcgggtatccatgtggtaactatattttccaagccccaaatagggacacatggtctgacaagtgtgaaggtacttatggggcaagagactagaaggttttaaattaggcctgtcccagcaaatccaggacatctggtcatcatagatatctaggggctgcccacacccctggcacgaggcaggcttttgccttttaatactctttcccatcttgaatgcccaaggtctattttttggtttaagcacatgccacagacaagtgagggacatttaaaaagatcaaacagctggagagagattgcaagggacattctttttagggaagccacagcaggggagagggcaggagagggcaaggaagtggcagagggtcagaagagtaactcacgggttctaaatcccaggaggtgtagggcattgtgagctgaggtcaggttaaggctggggacttttcctcagtatcaggcccatagctacccacttctcctctcccttcctctttctccatctcttctccttggtcttttctcattgtgaactctcactactccctcctgactccggcttagagcagaaggagctgcagctggcctgaggcacctcaaggaggggcggctggtttctgtgcagtgaagacaacttcctgaagagctatgtgactgtgctgaacccgcttctgtaaaatgggttcaccaataacaggttactgtagaattatagaggatagggtgtaaaactgtcctataaacggtgaagaattggacacatgtggtgctcagttttgtattcagtgggagttggggtcaatgttatgttgatattgttagaataactgccagtcttaggagcatttatcagtagaggcctaacagcaataatgtgaggttgtgtgtttgcttcatttgaaatggtacagttgcctgctacttcacaaatacagggagaagaaaggagaagtgaggtacaaggcgggtacgtgtgcatgtttcagtgtgtgtgtgtttgtgtgtgtgtagagagagagagagaaatggaggtacaatctggcatttgttagaaatcgcacaatcatagaacactagggatgggccttaaagaatctatcctcttcactctatggacagggacactaaagctcagacagaaaaaagctaattttccaaggtcaatcactagtcagttgggggccacacggggcatggtctccaggtcttctggtccaagtccaaggcttccattgtcagcccatgctcagccctattgtacaaaccacgatgtgcaaggagcagtggggagtcagagggacagatgtgacctttcgtgtcagggtgtcccagattatttgggaaggccacacctacaaccgtgacccagtcaaagacgagcctgaaacagtactgactgggatgtaagatccagggatacacctcagggacctgtaagaatgtaggtgcaggagcagccatccaggcctgggtggtaggggaagacttgaggaaatagctgaaggagtggacgtggacagttagaataataaaaaacaagcaattaagtaacatttccttcaagtgatgctttttgctccaattcttgcctagaggtggtggtttgggattttaccagcatctctctttggaattcaaatgtaccaccagtacttcgcttttcctgaaaagcctaagttacaaattgatagcttctaaaacctctctgcaaagggttaaatgtctgtgttggaaaagagaaactcatcagttaatatctacttcttaatcagcccaaggtgctgaaaaaaaggccattcaccaagtggttagcaaagctaatttgtcattctggcattttgacctactgtgcttttaaggcattattcttccacacatttcaaaaccgttattcttccacactgtagtttctgttggagagaaccaattacatctttccctaccatacacaatgggatgtccttgacattacttacggggttttccttcttatctggaaacttggttggaaacctctagaggagcaggggaccctcatttattcatctctacccgctccatagcacctcccatgaatccttgcccagggctggctctgaggaatcttttgttggatttgaaatgatgatcatatcgggttaatttccagcattaaccataaaaattggctagagttcaaagctggtggcrtgctcaagttactgccaaacctcctgctcattccctcccacccccccagcctcaagttgtgagcaactgaatttatcagctgtgaaactggttgcactaatacctcagatgaatcttcaatataagctgtatcccctgctggggcttcttgaggaaggtgactggatctcactcatcttggaacctttatgcttagcccagtgactgcctggtacatagaaagtgctcaataaatgtttattgcattagacagtaattttcggccgggcgcggtggctcacgcctgtaatcccagcactttgggaggccgaggcggacggatca

SEQ ID NO: 703188 - DNA, 574 bp, Homo sapiens
tttgcactatctatttcccaatgtctgagaacagtagtaattctatcaagactggaagttgaagtcttctcaagttaataaaacttgttttcccaatgtagaggcagaatataatagtattttcctcaaaagttagtcgtgataactcaactatgtaatggatctgaaaacacstataatgatgcatgaaagaagcaattgagcataaaattagaataggtaataaattatagtattatttttcttttcctttgacaccaatagtataaatggatttatcattttcacaaaattgtagacttttagagctgcaagggacttatctcaggaagataaaattgggttgctccaaatacctcattttacagatgagtagactgaagcttagtgagggaaagcaattttcccaatcccccatggcctattagtagaagaatgagactggcactcaggtatcttggctcccagcctatggggcatctattcattcagctcacatttattgagtgtctactaagttcagaacattgaactaattgctatattgcctctctataatatcttagtttgcaga

SEQ ID NO: 703189 - DNA, 1052 bp, Homo sapiens
attctccagcacttgtcagcttaacaacaaaataaagatcatttcatcaagtaaatctatattatacctacagctcatttccacagtaatagcagttcggtgcttatagttttgcatatcacaggctacataatcttcaaatagcactatatattttttcaggaacgatgctactggattattagcttctaggcatcaatactcagatttaccccagcatacagatttattatactaaatcagctcaacagcaattgacaaaatgtaaactccttttatggaacctcagtttttgaggaacaatttccacagcctgcattcatgatggacaattattttctttacatctataagcctaagtgcctacatcttcttttttgaatcctatgacacatggtaaatatttgattgaatgcaggatccaacaaattcttaaatagtatatggcctcaatcacagtaacacaaaaacagattgaagtgataacatttgctgaagccctactatgtgccattcactatgaaaagactttcacataggaatgtttaatataatacgtagtctagtagttttctagcaatctacgacacctataaaagcttggatcaatgaggttaaagtgtacatcaaataaaaaataaacaggatctgcataaaatatagtactgagcttaatttttttwaaaaatgataaatatgtaaacataataaagttgaaaatgacacttgtcaactttctaattaacactaggtggaaaaggagttttaggaatacgttctataagaaaaatggatttaaggtataaacataagaagtacttgcagggggggtcgggcaggaagagggaaagatcaattacaattcaggtaaacacagtggacattaaaaaaaaaaggagcatgaagtagggaaaaaattttgccatttaaaaagatcatgtacagatatatacaagtacatttttgggcaacttactaataatgaaagtttttagtgttaactgttgtttccacatttaacataatatgcttagatatacagtatcaattta

SEQ ID NO: 703190 - DNA, 926 bp, Homo sapiens
ctttgtttaaattagagaaaacaatagtgaagataatttgtttaaaatctctttagaacaccataaattcttttattctcacttaaagtttttgcagtaatttctaatcttcatctacagtactgaatattatcttaaaatgttcagctggtcaaatcagtaaaaagtaagcacctcctgctcatagaggaggaaaaagtaaggattatttttctcattcttctgaaccaggtagaactatggtaggaactaatagcagttgtgtgtctggacacagctcaagccccaaactgaaactaatcctttcagagtcatccaacagattaaagaaagatttgtgcaagagggataagggtaattatgttcacgtaacagactctgaaatggaattgaagagtaataagtaggagaatgtgggcaagatactggaggatgctaacaaagaaaccggagggtgtgayggaaaatgtaaaggagaaagaaatgtatctacatttatagcaacaggttatcaaaataaatatacatgagagaagaataagaaataaagatgtcatggtgatgacagtaattatattacaaaacacaaggaacatatgaaatgttcacatttaagaaggtcaaatcattgagctaccttggccacagaagaatacgtctactggcttggaatgccttaatggaagaaactgtgttgctatcctttgacatgtgttattaataactggaaacaatttaccacaaagatgtcaattattaacttataaattaaatacaatagtaatacaaatcctaatagaatttttataaaattaggtgagtctcatgagaagaaaaaattcataaaaaataaccaaggaaatttgaaaaacaataataaagtaagatttccttgccaggtaacagactactgtaattaaaatacc

SEQ ID NO: 703191 - DNA, 852 bp, Homo sapiens
ttcttatatggattaagtgtgttaatatgcctgttgctgaaaacagtgtctgacttgtggaaagactgaagtagatgatatctaaaatgcatgcatacataaacagccacaaagtcaagcttaatggttaagatatattgggataaggagataagctcggtacttatttgcatattttaacctcaagaaataatttggtaggaaaaggctaccaaagtgcccagagctagctgtgataatgaatccattctgcctcagaagtcaggaccaagcttgttatccacagccccaaatccagctcccctggaaggagctcagtggtcagaacagtgcaggggtccataaatgttgggcaggaaggactgctgtggccacctcctttaccatggctgggctagttctgcttagtaggcagccttagagatggcccaggatacacagtgagagactcgggaaaccagttaacatttttgagttagtacaggttcactaggacaagcygttgaggatttcatgtcactccctctgcatgctgctgagacctctggctgagcagcagatgctccaagtcttgagagatgtgctgagtcccctgggagtcactggctcctctatgggcaattagtgcattactacaattatagctggttttctaggaagccactaaatggcaccctgatgactagaaaaaggtaattttcaaccctatatacctaacttcctattagaaaattacttagacactagacacaatctggcacattaattaataaattcgtttctatgtttcctaatccagactgtaagtagtttaccccatgccctgatccttggatttataaccctttctca

SEQ ID NO: 703192 - DNA, 600 bp, Homo sapiens
atttaagaatattcttaagagttgaaggaaaaataatatctgtacattatgggttacaatctaagtataaataatacataaatatattaaaacttacaaagaatatgttttggaatcgaatataccatgcttctgtgatgacagttatttcatgctggttgtcacaattttacatgaaaaactaatgaaaaaatgtttttaactgtttctaaaaataacagtttccaaaacagttttacattcgaaatatgaaaaagatgtctttgtgttccttaatctgatgagattttcacactctgcacatgataattgttagatttttattgtgttgataaattgtatatcaaataaaaaatgttattacctcttaaattaggatttttaggtgatataggcagaaaggacggcaagtttttataactttstctaaatgaactttctaaatgcctgagtattaaaagatagcatgtctataaatcacaatgtatatattactgtatgacctaggaccaatcaaaaccgttacctctgataacattatattgtgcccagtataaaatagatataataatacctcaaacttaaatccgggcattgtca

SEQ ID NO: 703193 - DNA, 600 bp, Homo sapiens
atttaagaatattcttaagagttgaaggaaaaataatatctgtacattatgggttacaatctaagtataaataatacataaatatattaaaacttacaaagaatatgttttggaatcgaatataccatgcttctgtgatgacagttatttcatgctggttgtcacaattttacatgaaaaactaatgaaaaaatgtttttaactgtttctaaaaataacagtttccaaaacagttttacattcgaaatatgaaaaagatgtctttgtgttccttaatctgatgagattttcacactctgcacatgataattgttagatttttattgtgttgataaattgtatatcaaataaaaaatgttattacctcttaaattaggatttttaggtgatataggcagaaaggacggcaagtttttataactttctctaaatgaactttctaaatgcctgagtattaaaagatagcatgtctataaatcacaatgtatatattactgtatgacytaggaccaatcaaaaccgttacctctgataacattatattgtgcccagtataaaatagatataataatacctcaaacttaaatccgggcattgtca

SEQ ID NO: 703194 - DNA, 435 bp, Homo sapiens
aaaaacaaaacaaaacgaaaccctgcggctgcagccatggtctggacaatcctaagatctctttgtcacaaggcagtggctgcaagagtataggtgggagggtacatgaagagttctgctgccctgcggccatggcagtgcccacaggtggctatagctcagcttccacccaatttctgctgcacagaaaggcatggtcaggagacccatcaagtcacattttccattgctttttttaaaagagaaacggtctctctctattgcccaggccggggtgtagtggtatgaacatggctcattgcagcctcaacctcctgggctcaagcgatcctcccgccttggccccctgagtagctggggctacaggtgtgccccaccatgcccggctaatttttcaattttttcttttgtagaggtgggggtstcgctatgttg

SEQ ID NO: 703195 - DNA, 625 bp, Homo sapiens
atgtctttgataaatcatccctggatgttgacagtgacatttgctcatcagccaccagtgcctttggcaaggaattgcctgcaggtggcggatcaggtgacgcatcatcgcggcactcttgtgggctcctgagacagccatgtaaagagagcctaaggataacatgccaggcgtgtgcagcctgttygggacacttttgtgatgggagtgggtctgatccagataaaaccactgcctcttcctcagggcgtgtgctagggaatcttttgatgtcaggccagctgaacttgttggagccgagccaccttccccatgctgagtggtgtgaaatcagctccaccttcacaaggggctgtttctgtccctccagtggtatttaaggagagaagggaccctctaaaggggccaccaggatcaggcccagctctgctttgtaggcaccagctgtggggcccgtgcttccctccatcatgcagaaggttgcaggaactcaggccaggaggtgtcattaggacacattacaatgtgctggacaggacttttacaaagtgctggtgttcaacagcagcccatgcatgtaagggattggcttatgggtgctcagcctcccctgtgatctttttca

SEQ ID NO: 703196 - DNA, 600 bp, Homo sapiens
caaagtacatatcttctataaacataggttaaaaaaatgaaaaaaaaaatcactgctaaaaaagtttagaaagaagaaataaaagaaacataataaaggcaagaaaatagaaagttcaaactaaaaatgtagaaaaaactttagtaatttactttaaatatacaaaatctaaatccaggtgtaaaagaaagaacttaacatattgtgttaaaatttttaaaaagaaacttctggtttttattttcactagaagtgaatctaaaatatatgttgacaggaagactgaatataaaagtggagctcattgcctggaaaatggatcaagaaattgtggtataatcaggtaacatggtattgtacagcactgaaaataattaagtgcagaaaacagggtgggtgattctcagtaacacgaaattgagtaaaaatagtaactccttcaaaacaacatacaatataataatatatatatrtgtgtgtgtgtgtgtgtgtatatacatatatatatatatattttttttttttgagacggtatcttgctctgctgcccaggctggaatgcaatggtgtgatcttggctcactgtaacctccacctccc

SEQ ID NO: 703197 - DNA, 1157 bp, Homo sapiens
ggactatggtttgtttgaagctttttggggttagtactttttatagcctacagaatgtggccaaaagattctctgatgagtgtctgagacaaaggcagcagaactgtttttgtgttgtcatggtaaatatattacatgctacaggaaaataaagcccaggctcatgcaaaaagtaaaaaaagaagagcaagactagaggcaaaatgatagtctacctgcttctcccacccaagaagcttctggtccagtggataattatagaaggaagcccttttctcatgtacaagtatgggtactggaaaggcaagggacagccaaggagaggctcctgtgacagcagtgtgcatgcttggcttcaagagtctaaagttaaagaatactcaaaagtctgtactgtggcctgaaggaatcggcactgtcaacccagtgcaagtttttgagactggcasgcttgtgttggagctgagctccacctaggatgccagctgatcacccctctggtgctgaagagagaagaggcaagactctagaagagaatataggacagggattgggatggagagaagaggaagtacctcttcccactttgcttggggaacacatgtttcctgaggctgagggggcatggaacttgttcacatctgcatatactaatgacagtgagctgggccccatcttaggaaaagagctatttgcttcgagagtacaagggaagagtaggcatacttgtcattggccacacatgagggagtgggtgaagccagttgcattttagtcttgatgagcgttttggagagctttccaacatctttggttcagcaaaccttaaaacacatgtcaccatggaacttccttatttgcctttattttaaagccctgtgtatttttaggacaattgaatccatatgtttctgtttcatttacactgaactcattaaagtgatgttcagtaagagctgtttgatgtacacagaatcttctgttaccattttacgagcattttgagtcatttgaattcagtattagggagtcaactaaaccagatctgaacaggacacagtttagcttgaagcttaaaactcctgagaccttgctggataccattcttggcgaaatatcttctcccatcccagattcacagccaagaaggctattgt

SEQ ID NO: 703198 - DNA, 1157 bp, Homo sapiens
ggactatggtttgtttgaagctttttggggttagtactttttatagcctacagaatgtggccaaaagattctctgatgagtgtctgagacaaaggcagcagaactgtttttgtgttgtcatggtaaatatattacatgctacaggaaaataaagcccaggctcatgcaaaaagtaaaaaaagaagagcaagactagaggcaaaatgatagtctacctgcttctcccacccaagaagcttctggtccagtggataattatagaaggaagcccttttctcatgtacaagtatgggtactggaaaggcaagggacagccaaggagaggctcctgtgacagcagtgtgcatgcttggcttcaagagtctaaagttaaagaatactcaaaagtctgtactgtggcctgaaggaatcggcactgtcaacccagtgcaagtttttgagactggcaggcttgtgttggagctgagctccacctaggatgccagctgatcacccctctggtgctgaagagagaagaggcaagactctagaagagaatataggacagggattgggatggagagaagaggaagtacctcttcccactttgcttggggaacacatgtttcctgaggctgagggggcatggaacttgttcacatctgcatatactaatgacagtgagctgggccccatcttaggaaaagagctatttgcttcgagagtacaagggaagagtaggcatacttgtcattggccacacatgagggagtgggtgaagccagttgcattttagtcttgatgagcgttttggagagctttccaacatctttggttcagcaaaccttaaaacacatgtcaccatggaacttccttatttgcctttattttaaagccctgtgtatttttaggacaattgaatccatatgtttctgtttcatttacactgaactcattaaagtgatgttcagtaagagctgtttgatgtacacagaatcttctgttaccattttacgagcattttgagtcatttgaattcagtattagggagtcaactaaaccagatctgaacaggacacagtttagcttgaagcttaaaactcctgagaccttgctggataccattcttggcgaaatatcttctcccatcccagattcacagccaagaargctattgt

SEQ ID NO: 703199 - DNA, 1219 bp, Homo sapiens
tttgggagggtgaggtgggtagatcgcctgagctcaggagttcgaaaccagcctggccaatatggcaaaaccccatctctaacgaaaatacaaaaaattagccaggcgtggaggtgcacacctgtggtcccagctactcgggaggctgaggtgggaaaattacttgagtctgggaggtggaggctgctgtgagcygagatcatgccactgcactccaacctggctgacagggtgaaaccccatctcaaaaaaaataaataaataaaaataaagcaatgtaaaagaacaacagatttgacataaaaattgtcaaagtagcccttatttttgtgggtaatgttcactattttctgagattactaacctttctttaaaaatatgtgtttgtggctgggtgtggtggctcacgcctgtaatcccagcacttcaggaggccaaagcgggtggatcacgaggtcaggagttggagaccagcctgatgaacatggtgaaaccccgtctttactaaaaatacaaaaattagccgggcgtggtggcgcgtgcctgtaatccctgctactctggaggctgaggcaggagaattgcttgaacccgggaagcagaggttgcagtgagccgagatcacgccactacactctagcctgggcgacagagcgagactccatctcaaaaaaaaaaaaaaaaaaagaagtgtttgtaaggtttgagatttcagaattattcactttttgctttgcctttttatataggtataaatagaaccgccttaagagagataaaattattacaggagctaagtcatccaaatataattggtgtgagtatgatcaaaactgttactgggatttgggactctgccttttcttaatataatggatgttgattaaaggctcagcaagatgacttgttctggatgagccttgtagaagcttaaaggaaatacattttctaccccggttgttttggtaggcattgtcttcaaaactataccactgattaaataaatgaaatattgacatgtaggctaattttgtcggaaataattttgaagtctagggagctctagcatgtagtggctgagagtgtcaacctgaattcaaaacctttctttctgcctgtgtgagaccttgagtgtgttcactcacaactccccagagtccctgcctcatagggaagttgtgagactagccaattgaatagatgtaaagtatctggaata

SEQ ID NO: 703200 - DNA, 1219 bp, Homo sapiens
tttgggagggtgaggtgggtagatcgcctgagctcaggagttcgaaaccagcctggccaatatggcaaaaccccatctctaacgaaaatacaaaaaattagccaggcgtggaggtgcacacctgtggtcccagctactcgggaggctgaggtgggaaaattacttgagtctgggaggtggaggctgctgtgagctgagatcatgccactgcactccaacctggctgacagggtgaaaccccatctcaaaaaaaataaataaataaaaataaagcaatgtaaaagaacaacagatttgacataaaaattgtcaaagtagcccttatttttgtgggtaatgttcactattttctgagattactaacctttctttaaaaatatgtgtttgtggctgggtgtggtggctcacgcctgtaatcccagcacttcaggaggccaaagcgggtggatcacgaggtcaggagttggagaccagcctgatgaacatggtgaaaccccgtctttactaaaaatacaaaaattagccgggcgtggtggcgcgtgcctgtaatccctgctactctggaggctgaggcaggagaattgcttgaacccgggaagcagaggttgcagtgagccgagatcacgccactacactctagcctgggcgacagagcgagactccatctcaaaaaaaaaaaaaaaaaaagaagtgtttgtaaggtttgagatttcagaattattcactttttgctttgcctttttatataggtataaatagaaccgccttaagagagataaaattattacaggagctaagtcatccaaatataattggtgtgagtatgatcaaaactgttactgggatttgggactctgccttttcttaatataatggatgttgattaaaggctcagcaagatgacttgttctggatgagccttgtagaagcttaaaggaaatacattttctaycccggttgttttggtaggcattgtcttcaaaactataccactgattaaataaatgaaatattgacatgtaggctaattttgtcggaaataattttgaagtctagggagctctagcatgtagtggctgagagtgtcaacctgaattcaaaacctttctttctgcctgtgtgagaccttgagtgtgttcactcacaactccccagagtccctgcctcatagggaagttgtgagactagccaattgaatagatgtaaagtatctggaata

SEQ ID NO: 703201 - DNA, 1219 bp, Homo sapiens
tttgggagggtgaggtgggtagatcgcctgagctcaggagttcgaaaccagcctggccaatatggcaaaaccccatctctaacgaaaatacaaaaaattagccaggcgtggaggtgcacacctgtggtcccagctactcgggaggctgaggtgggaaaattacttgagtctgggaggtggaggctgctgtgagctgagatcatgccactgcactccaacctggctgacagggtgaaaccccatctcaaaaaaaataaataaataaaaataaagcaatgtaaaagaacaacagatttgacataaaaattgtcaaagtagcccttatttttgtgggtaatgttcactattttctgagattactaacctttctttaaaaatatgtgtttgtggctgggtgtggtggctcacgcctgtaatcccagcacttcaggaggccaaagcgggtggatcacgaggtcaggagttggagaccagcctgatgaacatggtgaaaccccgtctttactaaaaatacaaaaattagccgggcgtggtggcgcgtgcctgtaatccctgctactctggaggctgaggcaggagaattgcttgaacccgggaagcagaggttgcagtgagccgagatcacgccactacactctagcctgggcgacagagcgagactccatctcaaaaaaaaaaaaaaaaaaagaagtgtttgtaaggtttgagatttcagaattattcactttttgctttgcctttttatataggtataaatagaaccgccttaagagagataaaattattacaggagctaagtcatccaaatataattggtgtgagtatgatcaaaactgttactgggatttgggactctgccttttcttaatataatggatgttgattaaaggctcagcaagatgacttgttctggatgagccttgtagaagcttaaaggaaatacattttctaccccrgttgttttggtaggcattgtcttcaaaactataccactgattaaataaatgaaatattgacatgtaggctaattttgtcggaaataattttgaagtctagggagctctagcatgtagtggctgagagtgtcaacctgaattcaaaacctttctttctgcctgtgtgagaccttgagtgtgttcactcacaactccccagagtccctgcctcatagggaagttgtgagactagccaattgaatagatgtaaagtatctggaata

SEQ ID NO: 703202 - DNA, 1445 bp, Homo sapiens
tgggtcatgtgcctacctctggaggccttaggttgactcagtcctaccttaaccatgtggactaagctgagaagagatggcttcccaaaggaacactaactgctattgtcagaagatgcaagcagaaacaacaggtgtttgctactttcatgcraaagcagtagaggacaaagcactgctttcttttcaaaccagaaatgctctccctacccatctaactctggagattttgacagggcttcctgaggaaacttagataacctctcttgagagtctcctgtattgatacttacattttaagtctgtaaattgttttatgtggtagagtttatttgaaataataaagggtacctgtatattgtatacttgctttacaggttataataaaggataatagtcttgtgctgacaccatcacacatcaaagcctacatgttgatgactcttcaaggattagaatatttacatcaacattggatcctacatagggtaaggtttttaatattgcttctttatactagtcaagttttatatagccaatttggtacatagtggtctgaatatgtaaattgtttaacaatgaatttatagctgactgttttatcccatctttttgctatatattattcccttcacttgttccagcagttggtgctgtaaggactccatattactttgtgaaatttagaactggaagagatccagtccctcattttttttttttttttttttgagatggaatcttgctctgtcacccaggctggagtgcagtggcgcgatctcttgctcactgcaagctccgtctcctggtttcatgccattctcctgcctcagcctcccgagtagctgggaccacaggtgcccgccaccatgcccagctaattttttgtatttttttagtagagacggggtttcaccgtgttagccagaatggtctcgatctcctggcctcgtgatctgcccatcttggcctcccaaagtgctgggattacaggcgtgagccattgcgcccggcctcctcattttttaatagatgaagagctaagttgctaagtgacctgaccatggttatattttttttcaaggttggctgctgataatggacagagtattaaaacataggttttgacccaggcatggtggctcacttttgtgttgccagcactttgggaggctgaggcaagtagatatctcgagcccaggagttctagaccagcctgggcaatatagtgaaaactcatctctacaaaaaatacagaaattagctgggtgcagtggtgcacacctgtagtcccagctgctcaggaggctgaggttgggggatcacctgagcccaggaggtgggggttgcagtgagctgagacctcaccactgcactctagtctgggtgacagagtgaaaccctgtctcaaaaaaaaaaaaaagaacataggtcttttggcttta

SEQ ID NO: 703203 - DNA, 597 bp, Homo sapiens
tcgccaacttcactgatgccagcaacctgcagaagaactggcacactttgccacagacatacatatgaaccatgcctaggaattgaggaaaataaacaaaggaatgtggtggaagctgaaaggattaaagcccaaatgctgcacagggagatcagcagggtttagaggagctgagtgttctgaagccactagttgccaacagggtgaaccagcgaaagtgtgacaatgagctwgagctgcagcagcacctgatgttgtatcaactttctgtgattcattctgattactaaatcctgtgcaaatgactcttgaagcctaacttagaagagtgccatcattgctcactgccttttatatctaaatgttcccatttgcgattatttttattcatctctcatttggccagggtacagtttgaaaatatttttcagaaaattaatatgagtagtaaactttctacatattggagcatagtttctctttgaaaatctgaacgattgtacaacattttgggttttattaatggtgaccttgtcattgttgctgctatttgctgtgttatattgctattgttattgtttacaggaacggtctaaa

SEQ ID NO: 703204 - DNA, 597 bp, Homo sapiens
tcgccaacttcactgatgccagcaacctgcagaagaactggcacactttgccacagacatacatatgaaccatgcctaggaattgaggaaaataaacaaaggaatgtggtggaagctgaaaggattaaagcccaaatgctgcacagggagatcagcagggtttagaggagctgagtgttctgaagccactagttgccaacagggtgaaccagcgaaagtgtgacaatgagctagagctgcagcagcacctgatgttgtatcaactttctgtgattcattctgattactaaatcctgtgcaaatgactcttgaagcctaacttagaagagtgccatcattgctcactgccttttatatctaaatgttcccatttgcgattatttttattcatctctcatttggccagggtacagtttgaaaatatttttcagaaaattaatatgagtagtaaactttctacatattggagcatagtttctctttgaaaatctgaaygattgtacaacattttgggttttattaatggtgaccttgtcattgttgctgctatttgctgtgttatattgctattgttattgtttacaggaacggtctaaa

SEQ ID NO: 703205 - DNA, 1443 bp, Homo sapiens
acctccttcgtttttcacagtcatgtccaggattttttctaatattttgtacagatgagtaaactgaggtgtaatggctgaacatggatgagattgaatatgaaaaagttattcaaaactcaataacaaaaaggagtgacttaacaaaacaaacatgaattaatttcctttagaggacctgtaaaattgctatggttaggtacaatgcttaaaggaattgagttatttaaattgggatttaaaggaccttgaagactttgatgagccaaggtagctgacagtgcacattttatataactacattatcacacatctttttgcatcctgtaatacttccggaaaaagaaaagtgacttaaaattaataaatgcattttaagtgggtatttattattttctgtaaaaatgtctatgatcaaacaataattttgttttgttttgattcattttttaaaataattaatgttgcctagaattaggaagactgaaattattcatgtttactgtatacatctccgaggagatatttacctcaatttgcttccaataatcaaaaacagtccctgctttgaatcaattaaagaaccagaattgcatttctgtgcatgtaaaaatacactgggtttggtatcaggagagctggcagaattctaattctctgttttctactcattagtgatataactaaggtcaagtattgaaccatttgggcatcagattcgtcagctatgaaaccaggataattttcctgtccaactcataggattgatttcaggtttgataatgtgacattttgaatattccctattaagtatcttttatatttttccaaattgtctttatgactatcaaaaacatttaattcattctttctctttgcttctcaggccatgggcaccatgtacctgttgaattaacacaagattgaatagttatcttagtaaaatcatttgaaaaagtgtaaaatgaaaaaaaaataaccacatgagttattgttgctcaatcaaatagttgatcacttgaaacctaagaaccatctaaatttcattcctgtattatctcaatacgtacttatctcttattatgtggccacactatattagaagactagggatatggcartgagtaagacagacacaagccctacccacaatgccttataatgttgaaaggttttcaagcatttgtgtacacttaaacagaggcagtagcaggctaagtgtgtgtgtgtgcacacgtggggaattacattttcttttaaaaatatactttgtaaacaagtaaattagtctgattattcaggttaacttatcacagttttcaagtaagcacgaatagtcatagaattagagaaactatgtttcaaaacttcgataaaactcattttgttttctgacattggttattgtaacatttcggcaaaaagaaataaaataatgaatta

SEQ ID NO: 703206 - DNA, 613 bp, Homo sapiens
gttcatatttctctaagacaagtactctgaatcaattgctttttatttataaaacctatagtgtttctctctcataggtaatgatcctagaagaagaaaaaatagatttcttatggcatcagtaagcattcaatctaggtactctcttgaaaatattacaattactgttactactcaccgtttataataagagtgaacaagttcaacaaaactgctctgggcagtttgacracagctcaagagactgactctctttgtttccccaaattggatatatagtagattttaccaaatatttgctcaattttaaatcaatgaacgcaattttgcttcgttgaaccacttattttgggaaaatgtcacagttccaagctgagttttactagtgaaatttgcaagtaattatttataatgatatgcaaattatcatcaggcaattcagtaaaaagattaaagatggagtggcaatattaaaactccaggaattaactgctgtgaaaaaagaaatgatttttaaaaataatttgagctatttgtaaaaattgaaatttcttttttggttactgattttgaaaaagttaaaatacgaaatgaatgtaagatacttgaacgc

SEQ ID NO: 703207 - DNA, 1122 bp, Homo sapiens
gcttctgagacaatccaacctattatagcctcttgagggtccagcctcagggaacccagggttgacctgtcacggtcacacttagcatacctggtaggtttgttttttgtaaaagcagataatttgagaggaattgtaaacaattaataagtcttgtgaacacgactatgttaacaaatcatcagaaaaaaacaattagcaaattaagaaaaatagcatccaggtctggcaattttgtgagtgttctattctggagaaaataaaaattagtacaggtcttctaaaaagcaatacgataacatatatcaagaattataaatcattccaaacatggaatttatcctgaagagatcattaaaaagaataaaatgaatctatacaggatgatgttctttgtagcattaactcgaatgagaaaaaaagtgaaacaccccagctatccaacattagggacaataatactgtggaacgatctgcagtgataaccatgaagactaaatgaaaagcacaatgcacttatgatataattataggggaaagaagcaaacattttaaaagttcattatgactacctaaaatctaagtggattcagataaagtaartaaaaggagatgacacaaaatgattttgaatgatttcttttctttttccaaattttagtgtcatcacattcttccctttaaaaaatttaactagcagattatttgcatgatttgacatctagtcttcttgcatgagcaaaagggagagtaaatataaaagaacagaaaatcagacctcaataatatgggcctagaatgtgatatgacctttccctgcccccaactttctgaaagagatcaaggtcttgaagtggatggatataatttgacagctgctctttgagccctacttcaagaaaagaataaagtcataattctcaaggggtatccatgtttttttaaatttaatttttattttattttatttatttatttatttattgagacagagtctcgctctgtcgccaggctagagtgcagtggcgtgatctcagctcactgcaacctctgcctcccgggttcaagtgattctcctgcctcaacctcctgagtagctgggactataggcatgtaccacca

SEQ ID NO: 703208 - DNA, 1122 bp, Homo sapiens
gcttctgagacaatccaacctattatagcctcttgagggtccagcctcagggaacccagggttgacctgtcacggtcacacttagcatacctggtaggtttgttttttgtaaaagcagataatttgagaggaattgtaaacaattaataagtcttgtgaacacgactatgttaacaaatcatcagaaaaaaacaattagcaaattaagaaaaatagcatccaggtctggcaattttgtgagtgttctattctggagaaaataaaaattagtacaggtcttctaaaaagcaatacgataacatatatcaagaattataaatcattccaaacatggaatttatcctgaagagatcattaaaaagaataaaatgaatctatacaggatgatgttctttgtagcattaactcgaatgagaaaaaaagtgaaacaccccagctatccaacattagggacaataatactgtggaacgatctgcagtgataaccatgaagactaaatgaaaagcacaatgcacttatgatataattataggggaaagaagcaaacattttaaaagttcattatgactacctaaaatctaagtggattcagataaagtaagtaaaaggagatgacacaaaatgattttgaatgatttcttttctttttccaaattttagtgtcatcacattcttccctttaaaaaatttaactagcagattatttgcatgatttgacatctagtcttcttgcatgagcaaaagggagagtaaatataaaagaacagaaaatcagacctcaataatatgggcctagaatgtgatatgacctttccctgcccccaactttctgaaagagatcaaggtcttgaagtggatggatataatttgacagctgctctttgagccctacttcaagaaaagaataaagtcataattctcaaggggtatccatgtttttttaaatttaatttttattttattttatttatttatttatttattgagacagagtctcgctctgtcgccaggctagagtgcagtggcgtgatctcagctcactgcaacctctgcctcccgggttcaagtgattctcctgcctcaacctcctgagtagctgggactataggcatgtrccacca

SEQ ID NO: 703209 - DNA, 1506 bp, Homo sapiens
ccaaaacactgggattacaggcatgagtcaccatgccaggcccattggacagtttttcacagaattcatatcatgttctgaccttagtattcaagtttcttatttgtattacaggcaattgagtttccratctctgccttgaaagctgtgagatcttgggcaggttgtatagtcattccgagacttagttttacttatctgtaaaatgaggataattgtattgtgctcacatggagattggatgggtgagacatggtctacatactcacacacgggacaattttctcactttctgtaattgcctagcacacatagtagagatgcaagtcatagctgccgaatagccacttcttagacccacttctaaaaggctatgttaagagacagatgccagcaacttcaattttctcccacaatgatgggaatgttatgtgatgttgccgctcataccaacaggaactctgagcaggggaaataatactcaggagggctttgggttggttcctctaagtcagaaacccaaggaataattgctaaaatgtttttagctctcagtgtgtgctatcttatcccagagctttattttacaggatgtgggctgtgttgggacccaggttaaaaataagactgttattatcttaatattgctcaattcattcatcaaaaaatgtatgaagcactggctgggcctagtggctcacacctgtaatcccagcattttgggaggccgaggcaaacgatcacttgaagtcaggagtttgagaccagcctggccaacatggtgaaaccctgtctctactaaaaatacaaaaattagccgggcgtggtggcacatgcctgtaatcccagctactcggaaggctgaggcaggagaattgcttgaacctcggaggcggaggttgaagtgagctgagatggcaccactgcaccccaacccgggtgatagagcaagactatctcaattaaaaaaaaaatgtatggagctcctacaggtgacaagcagtgttctaggaactgagactataggtgcaaacaaggcaggcaatgtccttaccctccgggagtttccattctggaaggaaactgacattaaaaatagttatcaaaaataaagtcacagacaaggcctatgataagaacaacatagacaaagcatattaccttgaaacctcataacagccatccggcaaagcaggtacagggtgtttcatgttacatggggatgaaccttgagaagccagtaagcccaccagctgctaggagacaggagcagaggtgaagttgtgcttttctacctccacctcaccgcttcagggatcatgtgggggccgtggtgcaaaataaattaatcctcagtttcctcatggtaaaatgggaagagttcctccctgttcgggtcaggaggattaaacaagctaatagaagaaaaacactcaggattgtaccttacactcaaggttcattagaaacacatggtagctgccatcagaaagtccacagaaaaca

SEQ ID NO: 703210 - DNA, 1506 bp, Homo sapiens
ccaaaacactgggattacaggcatgagtcaccatgccaggcccattggacagtttttcacagaattcatatcatgttctgaccttagtattcaagtttcttatttgtattacaggcaattgagtttccgatctctgccttgaaagctgtgagatcttgggcaggttgtatagtcattccgagacttagttttacttatctgtaaaatgaggataattgtattgtgctcacatggagattggatgggtgagacatggtctacatactcacacacgggacaattttctcactttctgtaattgcctagcacacatagtagagatgcaagtcatagctgccgaatagccacttcttagacccacttctaaaaggctatgttaagagacagatgccagcaacttcaattttctcccacaatgatgggaatgttatgtgatgttgccgctcataccaacaggaactctgagcaggggaaataatactcaggagggctttgggttggttcctctaagtcagaaacccaaggaataattgctaaaatgtttttagctctcagtgtgtgctatcttatcccagagctttattttacaggatgtgggctgtgttgggacccaggttaaaaataagactgttattatcttaatattgctcaattcattcatcaaaaaatgtatgaagcactggctgggcctagtggctcacacctgtaatcccagcattttgggaggccgaggcaaacgatcacttgaagtcaggagtttgagaccagcctggccaacatggtgaaaccctgtctctactaaaaatacaaaaattagccgggcgtggtggcacatgcctgtaatcccagctactcggaaggctgaggcaggagaattgcttgaacctcggaggcggaggttgaagtgagctgagatggcaccactgcaccccaacccgggtgatagagcaagactatctcaattaaaaaaaaaatgtatggagctcctacaggtgacaagcagtgttctaggaactgagactataggtgcaaacaaggcaggcaatgtccttaccctccgggagtttccattctggaaggaaactgacattaaaaatagttatcaaaaataaagtcacagacaaggcctatgataagaacaacatagacaaagcatattaccttgaaacctcataacagccatccggcaaagcaggtacagggtgtttcatgttacatggggatgaaccttgagaagccagtaagcccaccagctgctaggagacaggagcagaggtgaagttgtgcttttctacctccacctcaccgcttcagggatcrtgtgggggccgtggtgcaaaataaattaatcctcagtttcctcatggtaaaatgggaagagttcctccctgttcgggtcaggaggattaaacaagctaatagaagaaaaacactcaggattgtaccttacactcaaggttcattagaaacacatggtagctgccatcagaaagtccacagaaaaca

SEQ ID NO: 703211 - DNA, 664 bp, Homo sapiens
tttgtatatctccaccattcaaatgtcttccccttagatatccttcttgaacttgccagctattgaatcttccatgagtgagttatcaacccatctttcaggacagaattaagtcttgtggggagttacttctaatcacccaactgtggcatagttcatacctaaatgtgttttcatatactagagactcctaaatggttattttgagcttacagcctccttcttactatattttatcagtgaatgaatggtatataagtatgtggctgggacatttatgtacctagtgttttggtctttaaacacctaatacaggtaaatgtaggccagggtacataagctatctggccctataatcattctgagatatatttctaatttgtttgtgcaatcatctgtgaaactttccacaagatagttgagtacagaagatttgaatattaaagaagagagttggctaattcaataygtaatttctgataaagatttttttcgtaaattgtttttcaatgttcaatcatccttttttcttccaaacatactggcttgaattatattttgcctctgttattttccattatgcaaatgagtggtatatggttatggggcaagggcatttaaatacctagtatttatgcagaatgaaaaactactaaccagtgat

SEQ ID NO: 703212 - DNA, 1055 bp, Homo sapiens
taaatcatgctgctataaagacacatgcacacgtatgtttattgaatgtttatttcttagcgtctgttggtttatactctccttatagttaaaatttacccagcccccacctctcaataatgtgcttacatatatgtataatttccaatctttgcctttttaatcctcttaaaaagatgtaatgccttgaactcacaactcaaaatggaggaaatgtactttcttctccagaacatgctttctcatttgatcttaaacaagagctcaccagagtgttttgagattcaatttcttctttcaaaaaatgacaacattacaacctagatcttcttcaccgaagtcttaaaattttgaacatttgtaaagaattaagacctggaaaagaccaatctatgttgtcaacatattcaccatgatattaawatgtgttttctacagacaaggtgtcaaagcaaaattgcacttgagaaaattaaacaggcaaggaagaacatttttgaggctactgcaataggtcagagaggccagaactaagtttgaactcaattccattgcaacaaagggcaggaggatttttaaaggctgggctgagagggagctcacaggctgcctgtgtttgcttgctaattggctttagagaaaaaataaatcttaaaatttatgacaggaggtaggttttacaatttggagcaagaagactaccagttggtctccttccctcccacagagactgggtgataagggtgttatcttagatgacattgcagttatgtttcctagatgcttgatacatttctgggatgtggaactggcaaacgactttttaaaaaatacacatctcaaatgagcagaaaaggcctttacaatgacaaggtttctaaaataaatgctctaggaaaaggtaggtcagggtaccagacacaggaaaaagcttttgtaaagtttagtcaaactgagaggatcattacggccatcttggttatggaaatataaacataaaaacatgtaagtcacaaaataaagcagaaaggcttagaaattcaactttcttcacc

SEQ ID NO: 703213 - DNA, 531 bp, Homo sapiens
tccctcctccttcccctgccactatcttcccttatgctattgatgtttgtccaaatcctttcaatcacccttaggaaaccttcccaaattcacttatttctacttctattgagtgagtatcattttttttccttgcataataggtatttatttgtgttttgcctccttggcaactttcctctaaagcctccatatcctgtagcttatgcttgtgtgtagtaggttggtmaaaaaaatagctattgaaaatatgttattactttttactctgctatatgcttgttttacagtttattgtatatgaaccaatacaccttatcatttcctcatctatgcatttcaatactaattaattttttattggggagtgatacttcagaaacctgtaagaaaagactcaaatatatgggtccatcagtcctgacaagtgtgtagcggattacacatcttgtttgcttttagctcatcattattgttttatgcaacttagactagactttttgtttttgacaggaagtaagttagaactag

SEQ ID NO: 703214 - DNA, 579 bp, Homo sapiens
ttgtttcagtttatatttaattaatgcatgaattgcatttaatttcatatgcttctrtttgtaattatcactgtgtattttgttttatttttgtctaatttcctttgggctgtacataatttcctacatgaatattttatatatacaggttattaatcccaatactatttatagactgatatgtcttccttcatcatttatttgaaaggctatcttcattatttattcaatctccatatatttggtgggttatttcagaactcatattgcatcaacaacagtactgttatatagcattacaaaatatttagattttagtaggacacacttaaaaactacttgagttgtttttagttattttggctaattattgcaaatttattattcacttgaactttaaaattggttttcaagacccatgaggaattcagttctaacatttcttggaattaaattgcctttacagattaatgtgaggaatatttaaaatagtgagtcatgctatctgtaatgatagactgcctctctattaatttagaatgttttacagctaccagtaaagctttgcagtgttttcca

SEQ ID NO: 703215 - DNA, 579 bp, Homo sapiens
ttgtttcagtttatatttaattaatgcatgaattgcatttaatttcatatgcttctatttgtaattatcactgtgtattttgttttatttttgtctaatttcctttgggctgtacataatttcctacatgaatattttatatatacaggttattaatcccaatactatttatagactgatatgtcttccttcatcatttatttgaaaggctatcttcattatttattcaatctccatatatttggtgggttatttcagaactcatattgcatcaacaacagtactgttatatagcattacaaaatatttagattttagtaggacacacttaaaaactacttgagttgtttttagttattttggctaattattgcaaatttattattcacttgaactttaaaattggttttcaagacccatgaggaattcagttctaacatttcttggaattaaattgcctttacagattaatgtgaggaatatttaaaatagtgagtcatgctatctgtaawgatagactgcctctctattaatttagaatgttttacagctaccagtaaagctttgcagtgttttcca

SEQ ID NO: 703216 - DNA, 1723 bp, Homo sapiens
tagatacatatttacagaacccctctgatacagtaaaccatgaggaaacaaaaaaaactccagcctaggcaacacagtgagacccaatctctacaaaaagttaaaaaattagctgggcayagtggtacatgcctgtagtcccagctacttgggagtctgaagcaggaggacgagtttaagagcaaatgtttgaggctgcagtgagctatgactgcaccacagcactccatcccgagtgacagggtaagatcccatctctaaaaaagaaaagaaaagaaagctccttcccacaaggaatatgtgtggtctggaagaaacactaatcatgaaaaaaactaacaatataccagatgtatgtcatggaataatggtggcacaaaaaaaatggaatgttccactttgcatcgatcaggaaaagaggattcactgacaagatgatgtctgaaaaaacagtacttacaaaggcacaaaaacatggaatagtcaacatttactgaacacttactactttgtgccacaaacatctagaattactgaagtggcctattgttcacgttataaaaggaaaaataaactattcagaatattctaagaatctatatctatctaaatagctaataaaataaactgagtacttgcaaaagacattatcaatctctatcattattatgcatctgaaaaataagtcaagaaggaagttatcatcagggagcggtggctcacgcctgtaatcctatacttcgggaggccgaggtgggtggatcacgaggtcagaagttcaagaccagcctggccaagatggtgaaaccccatctctactaaaaatacaaaaaattagccaggcatgggtgtgggcacctgtaatcccagctactcgggagactgaggcagagaattgcttgaacccacgaggcagaggttgcagtgagcacagatcacaccactgtactctagcctgggtgacagagtgagacattatctcaaaaaaaaaaaagaaggaagttatcactatttgcaaattatgaaatgaattcatggaaaagtcaagaaaccaactgaaaaattactaccgttaataaggaagtccaataaaggtggcaaggtacaaactacaatacagaaatcaaatttaaagcagtagcaaaaaccaataaaatacctacaagaaacttaagtgttgcaggaagtcagggaccccgaacagagggacgagctggagccaccgcagaggaacataaattatgtagatttcattttaatatggacatatatcagttcccaaaattaatacttttacaagttctttacttcaatctctgaacataaattgtgaagatttcattttaatatggacctttatcattccccaaataatacttttataatttcttatgcctgtctttactctcttaatcctgttatcttcataaactgagaatgtacatcacctcaggaccactatcgtgttaaactgtacaaattgattgtaaaatgtgtgtttgaacaatatgaaatcagtgcaccttgaaaaagaacagaataacagcgattttcagggaacaagggaaaacaaccataaggtctgatggcctttggggtcaggcagaatacagccatatttttcttcttgcagagagcctataaacggacatgcaagtagggaagatattgctaaattcttttcccagcaaggaatattaataattaataccctggggaagga

SEQ ID NO: 703217 - DNA, 651 bp, Homo sapiens
tgataacaatgcttgtagtattgaagagtttcaagaattttccccctgtagttgtgggttttatcttggattgcaaacgtttttaattaaaacactggttcgatgtgtacaagattcctgcataaattcaaaataatggatttattgtcaggttcaaatgaacatttctggttatttaaaatgttgcggtttgttaaaaatgagagacaactttctttttttattacagagatggtttaaagcttgaaactgaattactggatggaaaaaccaagctaatattgtctccatatggtatgttgtgttacagaaatctgaaatgttaacttttaaattcatacataaaatttatattagttcaacagactttttgcttgtaatagagtgatatttaaatgatattttagaaaaagctgtttcctcaaacttctgcagatttccttctagccaaataaaatcasattacaacactgcttactactgtcagtattcagactcataacatttaatgttccagtatattgcgtgttcattatatccatatagcaaatatcctcattgcctgatgaataatacaagtaaaatttatgtaattatgttctttgcatgtaaagaatgtatcatttgagaaaagtttatagtaagaccacc

SEQ ID NO: 703218 - DNA, 651 bp, Homo sapiens
tgataacaatgcttgtagtattgaagagtttcaagaattttccccctgtagttgtgggttttatcttggattgcaaacgtttttaattaaaacactggttcgatgtgtacaagattcctgcataaattcaaaataatggatttattgtcaggttcaaatgaacatttctggttatttaaaatgttgcggtttgttaaaaatgagagacaactttctttttttattacagagatggtttaaagcttgaaactgaattactggatggaaaaaccaagctaatattgtctccatatggtatgttgtgttacagaaatctgaaatgttaacttttaaattcatacataaaatttatattagttcaacagactttttgcttgtaatagagtgatatttaaatgatattttagaaaaagctgtttcctcaaacttctgcagatttccttctagccaaataaaatcagattacaacactgcttactactgtcagtattcagactcataacatttaatgttccagtatattgcrtgttcattatatccatatagcaaatatcctcattgcctgatgaataatacaagtaaaatttatgtaattatgttctttgcatgtaaagaatgtatcatttgagaaaagtttatagtaagaccacc

SEQ ID NO: 703219 - DNA, 598 bp, Homo sapiens
cagtacctgagctttaatcattcgtagaactactctcttaaccatgttaattatccacaagtgtgttgactcaaagcttccrttgttaattctacactaaataaatgcctggagtgcgaaccgttcagggcaacacctgccattctttacaggactcttcttggagtctgtgagtggcctcggaccctcagctggactggcaaagcagaatatctgtgtgtcagtgtatgtttattcatccgtcaccaaatcaggggtctgcaggaacagaccctctgcagctagtgctcccaagaaaggagcgctgcctcacatctccatcacagctcatgggtaaccagatgctttgtgaatgagtggtaatattttgaaaggaatatttttttgtgagcaacaggtctcaagagtgggcttaaaatattcagtaaaccatgttataaacagatatgccttcatccgggctttggttttccatttgtagagcacaggcagagtagatttagcttaattcttaggactttagggttttcagaatggtaaataagcattggcttcaactcaaagtcaccagctgacttagcccctaacaagagagtca

SEQ ID NO: 703220 - DNA, 1247 bp, Homo sapiens
tgactgaggcagggaacgggaagggcaaaggagaactcaatgaggwtgtggatgtcctcattgattcactgaatgttctcacggattcaggaagctgggaggctgggcaagaggtcaatagctctggagcaagcagttcagttgacccacagccactttcctcatatacatatttactgacctaatgaaaagtcagatagcccaagcccacctgaccttgagctgctcataaacagaagggctggcttcatgcccactgttggcaccaccaggaacaaagtcagcccttggtaatacagggaaggccattcagagcttgtcaggaaccctaatctcctttgtggccctctcacaagcctgttccttttgtggcaactgtgaggaaaactggttggaaggtgtttacaaaggctcttgtcaataattccaaggctcccttgcctgcttcttgcacctataaagatatcagaaatcctcattgtcttagccctgaaacagcctttttggtttttaaaggaaccctcaatgctttggtttgatattatccaatagtcacagctgacctaggaattctggagctttgcaaccttgagaaatctataaaaatggagtacatctcattttaagaacaaaagcaggggataattaaaaaaaaaaaaaagcacgtgcatgcctgtaagactgcaaagtaagatctcagaatacgaaagaaggaagtaaatctcttcatggatttccaaaatattcccaatgtatttatatcccttcaccttaaatcatctgaaaattactttcacattaagaatctcccttaaaaatgagttagaactgattattcccaatttaagaagatgaaactgcagttccgagtggttatgtaaccagagtgggagatagggtgatttaagctcaaagaaagaggtactccatgtgacataacttgcagaatttcccagaaatactgagagtgttctgataactgctgtctccaacttgatcataaaagtaagcaacttctcttatgtatctttgcctgcctaacagtgagctcagaaaatggtgactgaatgaatgattttaatgattgtatccttagtcaatctgtgaaagtcattcctttgttttgaggcttttggtcaatcctcccagacaatctcttctcagggcttcactctcaccaaatcatttgctaccggagaggaatccaatgagccctcttctctctttcccacatgtgactcaatcca

SEQ ID NO: 703221 - DNA, 1247 bp, Homo sapiens
tgactgaggcagggaacgggaagggcaaaggagaactcaatgaggttgtggatgtcctcattgattcactgaatgttctcacggattcaggaagctgggaggctgggcaagaggtcaatagctctggagcaagcagttcagttgacccacagccactttcctcatatacatatttactgacctaatgaaaagtcagatagcccaagcccacctgaccttgagctgctcataaacagaagggctggcttcatgcccactgttggcaccaccaggaacaaagtcagcccttggtaatacagggaakgccattcagagcttgtcaggaaccctaatctcctttgtggccctctcacaagcctgttccttttgtggcaactgtgaggaaaactggttggaaggtgtttacaaaggctcttgtcaataattccaaggctcccttgcctgcttcttgcacctataaagatatcagaaatcctcattgtcttagccctgaaacagcctttttggtttttaaaggaaccctcaatgctttggtttgatattatccaatagtcacagctgacctaggaattctggagctttgcaaccttgagaaatctataaaaatggagtacatctcattttaagaacaaaagcaggggataattaaaaaaaaaaaaaagcacgtgcatgcctgtaagactgcaaagtaagatctcagaatacgaaagaaggaagtaaatctcttcatggatttccaaaatattcccaatgtatttatatcccttcaccttaaatcatctgaaaattactttcacattaagaatctcccttaaaaatgagttagaactgattattcccaatttaagaagatgaaactgcagttccgagtggttatgtaaccagagtgggagatagggtgatttaagctcaaagaaagaggtactccatgtgacataacttgcagaatttcccagaaatactgagagtgttctgataactgctgtctccaacttgatcataaaagtaagcaacttctcttatgtatctttgcctgcctaacagtgagctcagaaaatggtgactgaatgaatgattttaatgattgtatccttagtcaatctgtgaaagtcattcctttgttttgaggcttttggtcaatcctcccagacaatctcttctcagggcttcactctcaccaaatcatttgctaccggagaggaatccaatgagccctcttctctctttcccacatgtgactcaatcca

SEQ ID NO: 703222 - DNA, 590 bp, Homo sapiens
tttctgttgcttccttgacctagaatacacaaggatgatttcctaacttcattaaaatcgctcattaaagaaggcttcctgaaccrccctgtctctgctatcaattttctcattggtttatttatttttgttttcagaatactgttttgccctcgcatgtatgtatttgttcatgtctatagttttctcccacaaaagtgaagattccaggaggaatttttgtctgtttagtttactaatatttcatgtgtacattcaactatggcacacattaggtgctcaataaatttgtcaaaagaataattgaataagtatatgttcagacatagaaatgaaaatgggaattttgaatacattttgactatttggtgcttccaattcctcctttatgaatatttttcttctgactttgttgtctattagtttttcatctcttctagttgcttatatttttgttctatcttttcagttatagattttttgatttccttactctctccctccactttctctgaccctttcaatttttctataaagacacggacatttgttcattaaaataaactcaccatctaattataattgactca

SEQ ID NO: 703223 - DNA, 590 bp, Homo sapiens
tttctgttgcttccttgacctagaatacacaaggatgatttcctaacttcattaaaatcgctcattaaagaaggcttcctgaaccgccctgtctctgctatcaattttctcattggtttatttatttttgttttcagaatactgttttgccctygcatgtatgtatttgttcatgtctatagttttctcccacaaaagtgaagattccaggaggaatttttgtctgtttagtttactaatatttcatgtgtacattcaactatggcacacattaggtgctcaataaatttgtcaaaagaataattgaataagtatatgttcagacatagaaatgaaaatgggaattttgaatacattttgactatttggtgcttccaattcctcctttatgaatatttttcttctgactttgttgtctattagtttttcatctcttctagttgcttatatttttgttctatcttttcagttatagattttttgatttccttactctctccctccactttctctgaccctttcaatttttctataaagacacggacatttgttcattaaaataaactcaccatctaattataattgactca

SEQ ID NO: 703224 - DNA, 590 bp, Homo sapiens
tttctgttgcttccttgacctagaatacacaaggatgatttcctaacttcattaaaatcgctcattaaagaaggcttcctgaaccgccctgtctctgctatcaattttctcattggtttatttatttttgttttcagaatactgttttgccctcgcatgtatgtatttgttcatgtctatagttttctcccacaaaagtgmagattccaggaggaatttttgtctgtttagtttactaatatttcatgtgtacattcaactatggcacacattaggtgctcaataaatttgtcaaaagaataattgaataagtatatgttcagacatagaaatgaaaatgggaattttgaatacattttgactatttggtgcttccaattcctcctttatgaatatttttcttctgactttgttgtctattagtttttcatctcttctagttgcttatatttttgttctatcttttcagttatagattttttgatttccttactctctccctccactttctctgaccctttcaatttttctataaagacacggacatttgttcattaaaataaactcaccatctaattataattgactca

SEQ ID NO: 703225 - DNA, 1196 bp, Homo sapiens
tttctgttaatttcaatttttaagtttattaaagagagtatcacatcaagccatattaccactagacaagaccaggtggggaatagtaaggagggatggttacaaagtcatgctaattctcaagtaattattctaagagaaagaaaggggataaagaaaaaacaagtaagtaggggtgggtgggtgtgggtttgtgtatgtgagagagacagaaatctgccacaaataagtacattttaactaatatactcaacaaacactgacacaaataattaacagcacaaaaacctattttccccaggcaactggggagcacaaaaatcaggaagcaataaagtgaatcaacagtgtcagagaacaaagtaataaacggctaaggacccattctctcagtccctgaatcatctggagctaaccgtaaagcaaacaacacacaaactgaaaatcaaatgtgggttgttttattctacaatccagactttggagtataaaagtctcatatataactttaaaagatcatgagcagtactctcagctgtgactgactgtacctgcttaacagatgatataaagattattaggtatcaaaagttttccactttttccagacctcctcataaatatataggaacactattttagtttactattcacagagtgaggaggccgactgcctactttagagaggacttagaggtaacagcaatgacaagaaagggtcaagacttgagagattaacttacttttatattcattattctttcattttgaaaaattcagagaacataaaatggtatcttttaaaactgccaggaatgtaacttacatgctctctatccctcaacaaaatgcctctttgtgtataccattataggaatgaaccattacctattagcaattcctaaattatattcatggtctctgtaataggaggaggattttcataaatggccctggtttgagtaaacccatatactcttttttattataattccagagggcataaaatggtcttttaattgaccatttcattaaaatttttagtttcgttcattttaatttttggtgtttctcatctgacaaactgtaacttcacttttggagagtagttataatccatcttctatgaaattttaaagttccaaagtaattttaaaagacaagaaaatgaccaaaaaaaaaaaraaaagaaagaa

SEQ ID NO: 703226 - DNA, 2655 bp, Homo sapiens
tgcttggaagaaaggatattgttatgagaaagctaacatattacaatggctaaggtatgtgaaaccagcaggtagcataaccatgcaatttttcattcacacttgaggaatgaaggtgcctcaaaatataaccaataggcatttttcgttctacaacattttcaagcaggcaaacagatagtcatgctatcaagaaggctttatcacaagcctcattggttcaaagtgctgaagctactctgtattctttcccaacgtgcagatattttgcttacaaatggaacatatcaaatcaagcttttgtgaacttgagggaagaaacaaagaatatgaagcctaaatggaagtgtcaggaaatggtcgccttgcggacaaggaaacagcagcctggaaggccaggagagggcagactacccacctaaccctctgcagaattttgtgtggaccctggagaccagaaactaacttctcctgcaggtatatgttcccccatgccggccagaaagcacagagaaggaacacttctccctgggtccttaggatcggacagctggctttagtcccaaccagtcatatcaataataaatattgctattttaatactagcaacaatgatataaattatggtcattatcctttcctcacatttcaaaccctaaatcacatcctatgaaacaaattagacaaagataaccaatagagtccactttaatgtggggattttttttcaatgtatttatgttctttatatcctctgttttagaaaatatttcttgaaatataattttgctatgtctrtttccttaatcctagatattgtatagtctttgtatgtcaatttgtggtgtaactaaggcaattgaaaaatacagttgactgagaataactaaaatattgattaaatacaatcggcctcctttttaggaaactggccttttctgagccatccaacagtttctaaatagtacaatagatagaacaatgaaaaaaataaaaaaaaactttaaaaatagcccaaagccatgaatagtaaattattttttaaattctatatatgttggccctagagtaatttttaatctcttattctgagaagacatttttttttctttgaaatcaatgaccttggtacttagagcttgataaattttaagatgtttccctattttacattttaaaaactttacaatcattagtatgtcactcatgaatgctgtaataaaaaaagaggaaataaagccttgttttttgtcaatgcttatgtaggtgtaacatccagaaaacattagtcttttggggaagatttaaatgtttccattttaataggtcaattaatttatttgaacaaaagcatcattttagaaggaaacaacaggatgtgtctgtacttgaccagttgcagctcatttgctgatgttttcgtctaagcataggacatcagtgaacaacagaaatttctagtaaaaatgattgcggaataataataaaaagcacttacatgtctttatgatgcgcttagcactgttttaaccaaggagatggctatttagcttatcttcattttacatgtgagagaatgaggcagcaaataaggaacacagctgagattaaagcccaggctatctggctggataattagcagcacaggtaagggagaacaaaaattaggtatattaatataggaatagggaaagtcgctgaaagttaaagtttcaatgcaatatatatttataagcatattactcatccaatattggtttgaatatccaaaagtcatttcattgattaattcagtaaataaccactgggtctcgtttagtcagtttccaaaaccacactctattttcattttcactttgcatttgactgtcctataccagctcattttccctctactgtgtgtgcgtaagttttatggggtgtgtgtgtgttggtggggggggagagagagagagacagaggagggagagttgggtacagctctttttcagatgtgattaccttcggaaggtttgaaaactatggtttaatgcaaccttttttctctgattctcagtcttgggtatatttggggattttagggtttaggctgccgccaagaagactgctactgttatcatactgaacagatgctgccaactcttaagctccagatatttctgtagaagctcttctaactcttttaagagtttgctcagaaaagcaaaaggtaggatcaggctactgcaaatctgcctgtggtattttatcctgcaaggtgacaggtttatttaagatgaaacttccaagtcatgagccagttcagagagagttcttaattatttttttctaaactttgtttataccaacttttaattcatttggcttaaatggaattttattgaggctataaggagcagtctgcatgctgggatttgcacagaaccaaaaacattatccaagactaagtaacagctggaaagaaactatgggacctcccacataaccaccactgagagctagacaatgggtgagttatttgacagagtaatagcaacagctgccaagtaggtcttttttttaaactcaactttgaaactctcagaattgaaatgagcggacttggtagagctattgggagtggggaaaaacattcttagaatattcctttgccaa

SEQ ID NO: 703227 - DNA, 2655 bp, Homo sapiens
tgcttggaagaaaggatattgttatgagaaagctaacatattacaatggctaaggtatgtgaaaccagcaggtagcataaccatgcaatttttcattcacacttgaggaatgaaggtgcctcaaaatataaccaataggcatttttcgttctacaacattttcaagcaggcaaacagatagtcatgctatcaagaaggctttatcacaagcctcattggttcaaagtgctgaagctactctgtattctttcccaacgtgcagatattttgcttacaaatggaacatatcaaatcaagcttttgtgaacttgagggaagaaacaaagaatatgaagcctaaatggaagtgtcaggaaatggtcgccttgcggacaaggaaacagcagcctggaaggccaggagagggcagactacccacctaaccctctgcagaattttgtgtggaccctggagaccagaaactaacttctcctgcaggtatatgttcccccatgccggccagaaagcacagagaaggaacacttctccctgggtccttaggatcggacagctggctttagtcccaaccagtcatatcaataataaatattgctattttaatactagcaacaatgatataaattatggtcattatcctttcctcacatttcaaaccctaaatcacatcctatgaaacaaattagacaaagataaccaatagagtccactttaatgtggggattttttttcaatgtatttatgttctttatatcctctgttttagaaaatatttcttgaaatataattttgctatgtctgtttccttaatcctagatattgtatagtctttgtatgtcaatttgtggtgtaactaaggcaattgaaaratacagttgactgagaataactaaaatattgattaaatacaatcggcctcctttttaggaaactggccttttctgagccatccaacagtttctaaatagtacaatagatagaacaatgaaaaaaataaaaaaaaactttaaaaatagcccaaagccatgaatagtaaattattttttaaattctatatatgttggccctagagtaatttttaatctcttattctgagaagacatttttttttctttgaaatcaatgaccttggtacttagagcttgataaattttaagatgtttccctattttacattttaaaaactttacaatcattagtatgtcactcatgaatgctgtaataaaaaaagaggaaataaagccttgttttttgtcaatgcttatgtaggtgtaacatccagaaaacattagtcttttggggaagatttaaatgtttccattttaataggtcaattaatttatttgaacaaaagcatcattttagaaggaaacaacaggatgtgtctgtacttgaccagttgcagctcatttgctgatgttttcgtctaagcataggacatcagtgaacaacagaaatttctagtaaaaatgattgcggaataataataaaaagcacttacatgtctttatgatgcgcttagcactgttttaaccaaggagatggctatttagcttatcttcattttacatgtgagagaatgaggcagcaaataaggaacacagctgagattaaagcccaggctatctggctggataattagcagcacaggtaagggagaacaaaaattaggtatattaatataggaatagggaaagtcgctgaaagttaaagtttcaatgcaatatatatttataagcatattactcatccaatattggtttgaatatccaaaagtcatttcattgattaattcagtaaataaccactgggtctcgtttagtcagtttccaaaaccacactctattttcattttcactttgcatttgactgtcctataccagctcattttccctctactgtgtgtgcgtaagttttatggggtgtgtgtgtgttggtggggggggagagagagagagacagaggagggagagttgggtacagctctttttcagatgtgattaccttcggaaggtttgaaaactatggtttaatgcaaccttttttctctgattctcagtcttgggtatatttggggattttagggtttaggctgccgccaagaagactgctactgttatcatactgaacagatgctgccaactcttaagctccagatatttctgtagaagctcttctaactcttttaagagtttgctcagaaaagcaaaaggtaggatcaggctactgcaaatctgcctgtggtattttatcctgcaaggtgacaggtttatttaagatgaaacttccaagtcatgagccagttcagagagagttcttaattatttttttctaaactttgtttataccaacttttaattcatttggcttaaatggaattttattgaggctataaggagcagtctgcatgctgggatttgcacagaaccaaaaacattatccaagactaagtaacagctggaaagaaactatgggacctcccacataaccaccactgagagctagacaatgggtgagttatttgacagagtaatagcaacagctgccaagtaggtcttttttttaaactcaactttgaaactctcagaattgaaatgagcggacttggtagagctattgggagtggggaaaaacattcttagaatattcctttgccaa

SEQ ID NO: 703228 - DNA, 2655 bp, Homo sapiens
tgcttggaagaaaggatattgttatgagaaagctaacatattacaatggctaaggtatgtgaaaccagcaggtagcataaccatgcaatttttcattcacacttgaggaatgaaggtgcctcaaaatataaccaataggcatttttcgttctacaacattttcaagcaggcaaacagatagtcatgctatcaagaaggctttatcacaagcctcattggttcaaagtgctgaagctactctgtattctttcccaacgtgcagatattttgcttacaaatggaacatatcaaatcaagcttttgtgaacttgagggaagaaacaaagaatatgaagcctaaatggaagtgtcaggaaatggtcgccttgcggacaaggaaacagcagcctggaaggccaggagagggcagactacccacctaaccctctgcagaattttgtgtggaccctggagaccagaaactaacttctcctgcaggtatatgttcccccatgccggccagaaagcacagagaaggaacacttctccctgggtccttaggatcggacagctggctttagtcccaaccagtcatatcaataataaatattgctattttaatactagcaacaatgatataaattatggtcattatcctttcctcacatttcaaaccctaaatcacatcctatgaaacaaattagacaaagataaccaatagagtccactttaatgtggggattttttttcaatgtatttatgttctttatatcctctgttttagaaaatatttcttgaaatataattttgctatgtctgtttccttaatcctagatattgtatagtctttgtatgtcaatttgtggtgtaactaaggcaattgaaaaatacagttgactgagaataactaaaatattgattaaatacaatcggcctcctttttaggaaactggccttttctgagccatccaacagtttctaaatagtacaatagatagaacaatgaaaaaaataaaaaaaaactttaaaaatagcccaaagccatgaatagtaaattattttttaaattctatatatgttggccctagagtaatttttaatckcttattctgagaagacatttttttttctttgaaatcaatgaccttggtacttagagcttgataaattttaagatgtttccctattttacattttaaaaactttacaatcattagtatgtcactcatgaatgctgtaataaaaaaagaggaaataaagccttgttttttgtcaatgcttatgtaggtgtaacatccagaaaacattagtcttttggggaagatttaaatgtttccattttaataggtcaattaatttatttgaacaaaagcatcattttagaaggaaacaacaggatgtgtctgtacttgaccagttgcagctcatttgctgatgttttcgtctaagcataggacatcagtgaacaacagaaatttctagtaaaaatgattgcggaataataataaaaagcacttacatgtctttatgatgcgcttagcactgttttaaccaaggagatggctatttagcttatcttcattttacatgtgagagaatgaggcagcaaataaggaacacagctgagattaaagcccaggctatctggctggataattagcagcacaggtaagggagaacaaaaattaggtatattaatataggaatagggaaagtcgctgaaagttaaagtttcaatgcaatatatatttataagcatattactcatccaatattggtttgaatatccaaaagtcatttcattgattaattcagtaaataaccactgggtctcgtttagtcagtttccaaaaccacactctattttcattttcactttgcatttgactgtcctataccagctcattttccctctactgtgtgtgcgtaagttttatggggtgtgtgtgtgttggtggggggggagagagagagagacagaggagggagagttgggtacagctctttttcagatgtgattaccttcggaaggtttgaaaactatggtttaatgcaaccttttttctctgattctcagtcttgggtatatttggggattttagggtttaggctgccgccaagaagactgctactgttatcatactgaacagatgctgccaactcttaagctccagatatttctgtagaagctcttctaactcttttaagagtttgctcagaaaagcaaaaggtaggatcaggctactgcaaatctgcctgtggtattttatcctgcaaggtgacaggtttatttaagatgaaacttccaagtcatgagccagttcagagagagttcttaattatttttttctaaactttgtttataccaacttttaattcatttggcttaaatggaattttattgaggctataaggagcagtctgcatgctgggatttgcacagaaccaaaaacattatccaagactaagtaacagctggaaagaaactatgggacctcccacataaccaccactgagagctagacaatgggtgagttatttgacagagtaatagcaacagctgccaagtaggtcttttttttaaactcaactttgaaactctcagaattgaaatgagcggacttggtagagctattgggagtggggaaaaacattcttagaatattcctttgccaa

SEQ ID NO: 703229 - DNA, 599 bp, Homo sapiens
tgaaagatatgggcaagatgtgaaaacaagataaggtagcaacaaattcagcctaggtggagagaagttgattaaggcttcacttgcatattaatgtttgagctgggctttaaggaaatattatctaacaagtgttggaagtgagaccaggactaagtgaggacttggaaagcacttgctaatggtgaggtcagctctgttcagacaagggggttgggccacacacaagattgcacagctcctaccacctcgtcagagctccaacagacttcaccagaactggagcattaggcttctgacagggcttcttgcttcacccatcatccttctatagaagacttttctccccagagttttaagattcaatactttaatatataaatcatttatttcttaaacacatgtttatagagtgcctactatatgtcaggcactctactagacacttggaatacaccagtraacaaaacagaaaactctgcccttgttgaactaattccctggcagtgggagatagtcttaccatgaaaaaacataatagataaatataaactaaaatttattgtatgttagaaagtagtattattttttaaaaatat

SEQ ID NO: 703230 - DNA, 1906 bp, Homo sapiens
tttttgaaacagtgttgcatatattattttaacaataattgaaattgattttgacagtaaatataaagttattataaagttactactggtttcaatagaggatataaagctagaagcttaaaggcaccacataagacttcagatgttaaaaaaagaaaatagatcaggcctggtggggtggctcatgcctgtaatcccagcactttgggaggccaaggtgggtggatcccttgaggtcaggtgtttgagacaaacctggtcaacatggtgaaaccatatgtctactaaaaatacaaaatatagctgggtatggcagcacctgcctgtagttccagctacggaggtggctgaggcaggagagtcacttgaacccagaaggcagaggttacagtgagccaagatggcgccattacactccagcctgggtgacagagggtgaatcggtctcaaaataactaaataaaataaataaataaatcaagaccctctgctttgtttatctgtagagaaccagtatttatctatatttagataatagttcaagaaaggaacagcttccgaattattgaaaactttctgaaaagggaaagttccctaaagtgttgtgtttaagattatttttatttctatgccatagtccagtctaattagggtggagtcttgaagtccacatcaactttttccctattgcacggcacttgaaaatatgtgattctctttcctaagtatatgatcaccctagatgatcttttatggtaaaatataatatagaaagcctggataagaagtgaaatattggccgggcgcggtggcttacgcctgtaatcccagcactttgggaggccgaggcgggtggatcatgaggtcaggagatcgagcccatcctggctaacaaggtgaaaccccgtctctactaaaaatccaaaaaattasccgggcccggtggcgggcgcctgtagtcccagctactcgggaggctgaggcaggagaatggcgtgaacccgggaagccgagcttgcagtgagccgagattgcgccactgcagtccgcagtccggcctgggcgacagagcgagactccgtctcaaaaaaaaaaaaaaaaaaaaagaagtgaaatattatggtgataatgattctaaaaaatggcaaatgtatgaagtattataaaattcggaaagtgtaaatttatcactgccagctacaagtacttgcaagtgactccaaaggtcactggtatgtgcttattttcaatttttcaggtttctgtatgggagtgagccacttgtctaatgacatggacaacacagtggctaagcagccactttacaatgtgtctcaatgtagttttctccattgtttctgccttagaaaaacatgtcatgattagacaaatgatttccttaggtgaaaatagaactgaaaagaagtcgaagagctattcgtgttggcagataagttttagaaatcagaatttttaaccaaatttcaaaactggataaatttaaatgtgaatgttaaattgtgcagaagtttatgaatgttttattgtgcagcagttcatgaatttatatatatatataatttttagataatacctcagtaagtataaaattcttgccaaactcatacacaaaatagttgtaagatgatttacccattcattcaaagtcagaagagagtaacaggaaacatgagactctcacagaaacaagattatgaataaaaatcaaacattcacatattggttacataaaggagctgatatttggggccaatatactttaagtcactgaaatgaatgtatgcttgttcaggaatatagaaaaaaaagaaaaataaactctttctgtgagtaaagagatgcttaagagaatagaaatcatttctcactcacattttcaagagaa

SEQ ID NO: 703231 - DNA, 1906 bp, Homo sapiens
tttttgaaacagtgttgcatatattattttaacaataattgaaattgattttgacagtaaatataaagttattataaagttactactggtttcaatagaggatataaagctagaagcttaaaggcaccacataagacttcagatgttaaaaaaagaaaatagatcaggcctggtggggtggctcatgcctgtaatcccagcactttgggaggccaaggtgggtggatcccttgaggtcaggtgtttgagacaaacctggtcaacatggtgaaaccatatgtctactaaaaatacaaaatatagctgggtatggcagcacctgcctgtagttccagctacggaggtggctgaggcaggagagtcacttgaacccagaaggcagaggttacagtgagccaagatggcgccattacactccagcctgggtgacagagggtgaatcggtctcaaaataactaaataaaataaataaataaatcaagaccctctgctttgtttatctgtagagaaccagtatttatctatatttagataatagttcaagaaaggaacagcttccgaattattgaaaactttctgaaaagggaaagttccctaaagtgttgtgtttaagattatttttatttctatgccatagtccagtctaattagggtggagtcttgaagtccacatcaactttttccctattgcacggcacttgaaaatatgtgattctctttcctaagtatatgatcaccctagatgatcttttatggtaaaatataatatagaaagcctggataagaagtgaaatattggccgggcgcggtggcttacgcctgtaatcccagcactttgggaggccgaggcgggtggatcatgaggtcaggagatcgagcccatcctggctaacaaggtgaaaccccgtctctactaaaaatccaaaaaattacccgggcscggtggcgggcgcctgtagtcccagctactcgggaggctgaggcaggagaatggcgtgaacccgggaagccgagcttgcagtgagccgagattgcgccactgcagtccgcagtccggcctgggcgacagagcgagactccgtctcaaaaaaaaaaaaaaaaaaaaagaagtgaaatattatggtgataatgattctaaaaaatggcaaatgtatgaagtattataaaattcggaaagtgtaaatttatcactgccagctacaagtacttgcaagtgactccaaaggtcactggtatgtgcttattttcaatttttcaggtttctgtatgggagtgagccacttgtctaatgacatggacaacacagtggctaagcagccactttacaatgtgtctcaatgtagttttctccattgtttctgccttagaaaaacatgtcatgattagacaaatgatttccttaggtgaaaatagaactgaaaagaagtcgaagagctattcgtgttggcagataagttttagaaatcagaatttttaaccaaatttcaaaactggataaatttaaatgtgaatgttaaattgtgcagaagtttatgaatgttttattgtgcagcagttcatgaatttatatatatatataatttttagataatacctcagtaagtataaaattcttgccaaactcatacacaaaatagttgtaagatgatttacccattcattcaaagtcagaagagagtaacaggaaacatgagactctcacagaaacaagattatgaataaaaatcaaacattcacatattggttacataaaggagctgatatttggggccaatatactttaagtcactgaaatgaatgtatgcttgttcaggaatatagaaaaaaaagaaaaataaactctttctgtgagtaaagagatgcttaagagaatagaaatcatttctcactcacattttcaagagaa

SEQ ID NO: 703232 - DNA, 1153 bp, Homo sapiens
gactgccaacctgaacagaactcagaaatgcagagctctgaataaactcttattytcttcaaatggttatgtaaaggctagcaacaattgtaaactaaagatttggagtattgcatacggtgattataaaaagagctttacttttaacaataaaactagagtttactttccatgcttttcaaatggtgttgctaatttagagcggtgaggtcagcattatgtagaaaaggggtcaaataaattggtgtcttaatcccagttttgccatcaatggttgtggagccacaaagaagccacttaacctcctgtgaccaagtttccttacgtgtaaaaagctatcaatattagtgccttccagaactgtttcaattattaaatgggatatagtttataaatcatttagcaggatgcgcctatcctttacaacaaagaaataagcaaaggagaaaacatgagtgatttctagggttgttgatgtaactgaccttgtgtctgttgccaatcttaaatttaagctaagaaatgaccaaagacatccattgggatttttgttctcaataacattttaaacatttctggggcagtgtggtagtcataaatacgcataagtatttagatgtggagagggattgcattctctactttttatagtcctatggggtttcccaaagtagttcttttcctttacattctatggtgaattaaacagggcttttttttctctttgttttcattcatttctttttctaatcaacaccatgattcttccattgagaaatattaatgtgatcctgtgggacaacttggaggaggtcatcttttggccttaagaaagtgacttgagtagggcttaagggtaacccaggggtggacatacgaaccaagccagaccactcagagtcagtgagactcactctggacttcttttaaaatgattaggaaaaaaaaaacggactctttctactgagttgctgagaggctaggatgtagaaataaccttggagctgctagcagctctcttgccaacatgagtggagaccctgcctaacagtgggaacaacagagaaaagcatagtaaagagatagatgaagactgagtactgaggataccatttgatttcctgtggatccatctgtgtctgaaaccagaaca

SEQ ID NO: 703233 - DNA, 1395 bp, Homo sapiens
catgaaataatattttaataagatattagattaagattgctaagttttaatctataatttttgtctacataagtattattgaatagtaggtttttaaatttttttatctatccttttccaatgttggcataagaattataacagctttatagaatgagttgagaagctctgcattttatcctaagaattgggatagtttttatatgaatgaaggacttatttgcttacaacgtataagcgcctcacctataaaactgtcttggtttattgcctctagtgggagcaggggatggggaatggtagaatgtgatctgaatctttcctgtgattttcagcctgttaagattacttttctcctctggaatcaattttggtcacttgtatttttccagaaaaatcatccatttcatcttgattttaaaattccatttttcaggcttttttctccgtagcttatatcaactttctgatttaaagtgagtttgtgatttctctctctatcatcttgactggactgttactgcagcaagcttctcccttgaatgagagggctagcagagtgctgtatctggtaggcagggcctgttagcaagctgacttccttagggtttgtgaattgatcagaaacaggcgtgaaattcactccctcccacaaaatctccaggggaagcttgcctttactctgaataaaacacatcaatgtgtttcacactttcgatactaggtgaagcttccttttcttttttctttattattattattattattaattatctttttggatctattacaaaggttggaaatcataacacactctggtttatcagccctgcctgacacatggctaagagctctcaccagaaatacatcttagttttagctaagggtcctgtgctgcgggcagccactggactgactcttccatagcgaagccccaacacttccctcattatcaccccactgttcatgctgtccctgcctcttcattgtggagctaagcttcctcctagtcctcactggtaaaaactcctcttgcctccaaagttgtgattttctctggtttaatttctgcattaatttgatttcttatgctttgtaacttccagaatttttcaaaatttctattttgcgaatagcattcttttctctgttccaggtctgtgacaaatgygtacaacttttacaatatttacctcacccttgaaatttatcattaatggtcattttgttatcctgttgaattaaggaaactcttgggaagctagagatgacatttgcatcacattcacttcctaaatgcatctattcatgtgggaattataagtaattttgtagttctacttatacaactatgtaatttgtgcataatttataaaatttgtcctagttctttga

SEQ ID NO: 703234 - DNA, 550 bp, Homo sapiens
ataatccccaattctttctaatcacatagggttgtgctattttattaaatttactaagaaataataatgttcagctagtttttaaatgttcaattctactttttttaagagacatagtcacaccgtcatccaggctagcrtgcagtggtgcgatttttctcactgcggcatcaaactcctgggctcatgtgatccttccaccttagcctcctgagtgcctgggactaaaggcacatgccaccactctgggctaattttttttttttttttttgaagagacagggtctcactatgttgcccaggctggcaattctatttttattgattacaaacttacatacattctttgaaacaaattttgaaaatatgaataggcaccaagaaaagaaaaataaattcatatttccaccacgcagatcacagttgacatcttagagtgcactgttccataatttataatttctacatatttgtgtatatacagaaatagaatcagatgttatatacttttcagaaaacttgtttattactcacactgagaatgtatttc

SEQ ID NO: 703235 - DNA, 636 bp, Homo sapiens
tgataataactcctatattgccccaacaaatgtcttccattgttaccttaaattgttatttacaccactttgagagtaggaatcgtatctgcttttatcctgggttactatcaaaactgaacaaagtacctggcacattagcatgttcctcatgaatttattttttaagggattgtcacttcagctttgaagagaacagcagtatagaaaagagcattgtagacatataaaaatgactgctacgacccatctgatgattcttcctttgtttttgcattatgcacaccaytacctagaattttaaatgttctctctcagcatgatgcttattatttaatcatggaagacatagagaaggagaatgggagttgaggaaaattttgccttgaaaatactcagtttgaatcactagtacttaattttcagcttggaggatgggagagcacccagattggaataatatttgagttgggtgtcaggcctgttagacagactggtgtaaatctcatttcacattgaaattcttcaagtacaatttagcagtctaaaaatttaggtacatgcagccaaaaacttcacaaaacctgcaggcttggaatgtcttcaaggaaggataaacaggagtgacaattaatt

SEQ ID NO: 703236 - DNA, 640 bp, Homo sapiens
gatgtatatacatcagatatacatccagaccaccaggtttaatctggatccctcccaccaacaacacaacctggaaattctctcaaagcagttagctgaaataattgcagggctcacttcatttgttttctatctctcaggagatattgccttatgttgtctgatatctactgttttacaaattattgtgtcatgtgttttgtctagttttttagtttctgcagcagaactaatatagtcagatataaaattgataggtattttataattataaagactgtaattcatcattagttctgagctttcagctaaccatagcagcaatggaaatagaacaaatcgcatagcttgcattattctccacagaaaggaatgtttctacaatcccaaattctaaaagaaaccatgacttggaggaagcggkgtgcttgaaaaccacatattttttttaccagcattacaaaattcccaatataagtgccatactttgttcctcattttctgcgcatgtgtttttctcatttaataatcaccactcactactaacatccaatatcttcaaagctagtagaaaatgctgtaaaaattttaagaatatgacttattatatactcggattatacattcttctttcccacct

SEQ ID NO: 703237 - DNA, 816 bp, Homo sapiens
cctctcttggtcaaagagagctgctctgtctaatgctacacccttctcctggggacagtctgaaaggcttcaaagtcttggcattccttcttcaattcagccctccagaaatgcctgggaagtcacctgtaaccagtctgacccagtcttgcttctctgaccccctgacaggtcctggtccagaaaacacccccaataaactttacacaaataaatttccaattccgagtccgcttcctggagtcttggtagttctgtgaaatttacagcttattgcatatagaggtcacatatataattacacatggtggaattgaaattgaaattctgataagaatcctgtgatttcgagtccaggtctcctgttggtctccatsattctatttcattcatgaaataggttggaggaactcacaacacaatagaccccatatttcagctcattaataatcaacatattctggtctcagtggccattatttttaagaagttgtatacaacattataatcagtgtgatctagtcaggtttttctactacagtggggcagcctggaactcagtcagatatacttgtttttctcaagtctttatgagattcattttcatatttttaaaattacattttgaaccgacacagagcgcaattttggagaggtgatcctataaacgaacaaaggtcactgccattcattccttcatttacggttttttatttttttttagacggagtcttgctcggtcgcccaggctggagtgcagttaaatgaaaaaacgtacccagacagaggttctaaaacagcaccaaaatattaatt

SEQ ID NO: 703238 - DNA, 3181 bp, Homo sapiens
  misc_feature 1610, 1611, 1612, 1613, 1614, 1615, 1616, 1617, 1618, 1619,1620, 1621, 1622, 1623, 1624, 1625, 1626, 1627, 1628, 1629,1630, 1631, 1632, 1633, 1634, 1635, 1636, 1637, 1638, 1639,1640, 1641, 1642, 1643, 1644, 1645, 1646, 1647, 1648: n = A,T,C or G
  misc_feature 1649, 1650, 1651, 1652, 1653, 1654, 1655, 1656, 1657, 1658,1659, 1660, 1661, 1662, 1663, 1664, 1665, 1666, 1667, 1668,1669, 1670, 1671, 1672, 1673, 1674, 1675, 1676, 1677, 1678,1679, 1680, 1681, 1682, 1683, 1684, 1685, 1686, 1687: n = A,T,C or G
  misc_feature 1688, 1689, 1690, 1691, 1692, 1693, 1694, 1695, 1696, 1697,1698, 1699, 1700, 1701, 1702, 1703, 1704, 1705, 1706, 1707,1708, 1709: n = A,T,C or G
tttagagatgatagaggcttgaacaaagattgaggagatatcttatggatttttccatctgactctgtctagtaggtttcaaaattatatataacatgataactcactatattatgactctgtgtgtgtaataaattatatatcacattttgctaaaacgtgatataaatatttattgagtgaaagtaaggaaatcataatcataagcataggatttggctggaataatgattaccttaggccaaagttgtaagctactttaaagttctgcattttctatattgttgtgggctcatacttgctaattgcattgacaaaagaaacagagagagaaagaagaaagatagttgtagaccaaagatgagcacatagcataagacaaagcttgctctgaatctctgatccatgaatgaaaaagataatagtagtctgttgtgttaatatctggtgagattgatttgtatgcagcatttcccacatttgcttgctcttgaatcatttgtccacagatacgctttgggtagtactgaagaacttaacatttcattggcagataagaacatttgagttatgagatgtaaaacaaacttgtcctttctgattccatacttcatatttttctttcttttgtttgtttcagtggttttaaaaataattttatcaattagtaagaattcaatttaataaggactggatactttacaaggtccttaatactattaataaaaaatcataaaagccatattctagcatctaaaggtgagctgtctaatatggtgtctacaagccacccagmactattaagcacttgaaatgtggatagcatgaccaagaaactaaattttaattttaattattttccattaaatgtaactttattgctttggtagaagtatatttcacttaaactattgtaaacctagcatctaaattgtgatgtgcaataagcatagaatgctcactggattttgaagacagtatcaaaaaatagtaaaatatctcattaacaatttttatattagatgcagaagtaataatttttgatgtattaggacaaataaaatattaaaactaatctcatctgttcttactatttttaatgtggctgctagaaaatttcaagttccatatttggctcatatttatttctatttgacagcactactctagaatacttttatttcttggttaaaatacaaagctcaaactttgaagtactgtaactgctgtgtgatcatcagaaagaagaaaaccatctatggctttccgacttttaaattgttattggccattgactcttcccaacatgtgaggtcacagccctggaatgtgaggtctgttcacaccactgcaaatgaggttaaggtatggcaggccaaagaggtgccctttctttgtgacagtataatccagatagatcggactcaagaccgatcagaggcgtctgcttgacttgtttcaatgttgaaactacacatttcttgtttggctaaaaagtgatggagattacacagtaatgaaactttctcagttttttccagagaagagcattctcctctagggccacaaaaatgcttgtgtagataggccaattatgagaaaagcatgannnnnnnnnnnnnnnnnnnnnnnnnnnnnnnnnnnnnnnnnnnnnnnnnnnnnnnnnnnnnnnnnnnnnnnnnnnnnnnnnnnnnnnnnnnnnnnnnnnngaccaactagagtagccaacccataaaaaaattacaaaaatattgaacagaacaagatttcctaagaactatttggagaagataggtaccaattaccaatagattcaagacccaaattgtaggaagaaacagagggagggcaaggtattgtgttgtccccaagagtttaagaacccccaaatccccaagaggtactcataggactggaaaaaactatcatctatctatctatctatctatctctctatctatctatctatctatctatctatctatccatccacgtgtattaggctgttcctgcattgctataaataaatacctgagcctgggtaatttataaaaaaaggtttaattggtttacagttctgcaggatttataagaagcatggtgctggcatctgctcagtttctggtgaagtcttatggaactttcaatcatggcagaaggcaaagggggaataggcatgtcacacagtgaaagcaggagcaaacaagagagagagagtccaaggggaggtgccacacattttaaaatgaccagatcttgtgtgaactcaccaccatgaagatagcacgaagtcaggagggatcctcctccatgatccaaacacctcctaccagaccctacctccagcactggggattaaaattcaacctgagatttgggaggggacaaatatcccaactacgtcactatctatctgtctatctctctatctatctattgacatctatctatctatgcaagcatcatatacataattaaaaataaaaaactaaagtagaattaaacataataataggctgagcacttttataaaaagaaaaaaacatgttcacaatgcctaatgggataaatcaaaactatactgagcacagttcagcaacacaacaaaatcaaatagaacgaaaaagtattaaaggtgtacaaggactaaacaacaaaatcagtaaagtagaattacataattatacataaagagatacagttacatcttggagaaattgcaggcttggtttcagaccaccaaataaagcaaatatcataataaggtatgtaactttttttggttttccagtgttcataaaagttatgtgtacactatattgtagtttattaagtgtgcaatagcattgtggctttaaaaagtaaatatctgaattaaaaatattttattgctaaaaaaaaaaagagaaacctaccaatgatcatctaagccttttattctcagcctttagtgagtcaaaatcattttgctggtggagtgtcttgcttcttgtccatggctgctgactgatcagggtggtggttactgagggttggagtggctgtggcaatttctttacatgagacaatgatgaagtttgccacattgattgactcttcctttcatgaaagattttttgtactgtgtaatgctgtttgacaggatttcatctacagtggaacttatttcaaaattataatc

SEQ ID NO: 703239 - DNA, 3181 bp, Homo sapiens
  misc_feature 1610, 1611, 1612, 1613, 1614, 1615, 1616, 1617, 1618, 1619,1620, 1621, 1622, 1623, 1624, 1625, 1626, 1627, 1628, 1629,1630, 1631, 1632, 1633, 1634, 1635, 1636, 1637, 1638, 1639,1640, 1641, 1642, 1643, 1644, 1645, 1646, 1647, 1648: n = A,T,C or G
  misc_feature 1649, 1650, 1651, 1652, 1653, 1654, 1655, 1656, 1657, 1658,1659, 1660, 1661, 1662, 1663, 1664, 1665, 1666, 1667, 1668,1669, 1670, 1671, 1672, 1673, 1674, 1675, 1676, 1677, 1678,1679, 1680, 1681, 1682, 1683, 1684, 1685, 1686, 1687: n = A,T,C or G
  misc_feature 1688, 1689, 1690, 1691, 1692, 1693, 1694, 1695, 1696, 1697,1698, 1699, 1700, 1701, 1702, 1703, 1704, 1705, 1706, 1707,1708, 1709: n = A,T,C or G
tttagagatgatagaggcttgaacaaagattgaggagatatcttatggatttttccatctgactctgtctagtaggtttcaaaattatatataacatgataactcactatattatgactctgtgtgtgtaataaattatatatcacattttgctaaaacgtgatataaatatttattgagtgaaagtaaggaaatcataatcataagcataggatttggctggaataatgattaccttaggccaaagttgtaagctactttaaagttctgcattttctatattgttgtgggctcatacttgctaattgcattgacaaaagaaacagagagagaaagaagaaagatagttgtagaccaaagatgagcacatagcataagacaaagcttgctctgaatctctgatccatgaatgaaaaagataatagtagtctgttgtgttaatatctggtgagattgatttgtatgcagcatttcccacatttgcttgctcttgaatcatttgtccacagatacgctttgggtagtactgaagaacttaacatttcattggcagataagaacatttgagttatgagatgtaaaacaaacttgtcctttctgattccatacttcatatttttctttcttttgtttgtttcagtggttttaaaaataattttatcaattagtaagaattcaatttaataaggactggatactttacaaggtccttaatactattaataaaaaatcataaaagccatattctagcatctaaaggtgagctgtctaatatggtgtctacaagccacccagcactattaagcacttgaaatgtggatagcatgaccaagaaactaaattttaattttaattattttccattaaatgtaactttattgctttggtagaagtatatttcacttaaactattgtaaacctagcatctaaattgtgatgtgcaataagcatagaatgctcactggattttgaagacagtatcaaaaaatagtaaaatatctcattaacaatttttatattagatgcagaagtaataatttttgatgtattaggacaaataaaatattaaaactaatctcatctgttcttactatttttaatgtggctgctagaaaatttcaagttccatatttggctcatatttatttctatttgacagcactactctagaatacttttatttcttggttaaaatacaaagctcaaactttgaagtactgtaactgctgtgtgatcatcagaaagaagaaaaccatctatggctttccgacttttaaattgttattggccattgactcttcccaacatgtgaggtcacagccctggaatgtgaggtctgttcacaccactgcaaatgaggttaaggtatggcaggccaaagaggtgccctttctttgtgacagtataatccagatagatcggactcaagaccgatcagaggcgtctgcttgacttgtttcaatgttgaaactacacatttcttgtttggctaaaaagtgatggagattacacagtaatgaaactttctcagttttttccagagaagagcattctcctctagggccacaaaaatgcttgtgtagataggccaattatgagaaaagcatgannnnnnnnnnnnnnnnnnnnnnnnnnnnnnnnnnnnnnnnnnnnnnnnnnnnnnnnnnnnnnnnnnnnnnnnnnnnnnnnnnnnnnnnnnnnnnnnnnnngaccaactagagtagccaacccataaaaaaattacaaaaatattgaacagaacaagatttcctaagaactatttggagaagataggtaccaattaccaatagattcaagacccaaattgtaggaagaaacagagggagggcaaggtattgtgttgtccccaagagtttaagaacccccaaatccccaagaggtactcataggactggaaaaaactatcatctatctatctatctatctatctctctatctatctatctatctatctatctatctatccatccacgtgtattaggctgttcctgcattgctataaataaatacctgagcctgggtaatttataaaaaaaggtttaattggtttacagttctgcaggatttataagaagcatggtgctggcatctgctcagtttctggtgaagtcttatggaactttcaatcatggcagaaggcaaagggggaataggcatgtcacacagtgaaagcaggagcaaacaagagagagagagtccaaggggaggtgccacacattttaaaatgaccagatcttgtgtgaactcaccaccatgaagatagcacgaagtcaggagggatcctcctccatgatccaaacacctcctaccagaccctacctccagcactggggattaaaattcaacctgagatttgggaggggacaaatatcccaactacgtcactatctatctgtctatctctctatctatctattgacatctatctatctatgcaagcatcatatacataattaaaaataaaaaactaaagtagaattaaacataataataggctgagcacttttataaaaagaaaaaaacatgttcacaatgcctaatgggataaatcaaaactatactgagcacagttcagcaacacaacaaaatcaaatagaacgaaaaagtattaaaggtgtacaaggactaaacaacaaaatcagtaaagtagaattacataattatacataaagagatacagttacatcttggagaaattgcaggcttggtttcagaccaccaaataaagcaaatatcataataaggtatgtaactttttttggttttccagtgttcataaaagttatgtgtacactatattgtagtttattaagtgtgcaatagcattgtggctttaaaaagtaaatatctgaattaaaaatattttattgctaaaaaaaaaaagagaaacctaccaatgatcatctaagccttttattctcagcctttagtgagtcaaaatcattttgctggtggagtgtcttgcttcttgtccatggctgctgactgatcagggtrgtggttactgagggttggagtggctgtggcaatttctttacatgagacaatgatgaagtttgccacattgattgactcttcctttcatgaaagattttttgtactgtgtaatgctgtttgacaggatttcatctacagtggaacttatttcaaaattataatc

SEQ ID NO: 703240 - DNA, 580 bp, Homo sapiens
atttccttattgctggccaacaaggtaaaaccctgtctctaccgaaaattagctgggtgtggtgggggatgcccgtagttccagctacttgggaggctgaggcaggagattccttgaacccgggaggcagaggttgcagtgagctgagatcatgccactgcactccagcctggtgacagagcaagactccgtatccaaggaaaaaaaaaaaaaaaagaatgggcacacagatgcctcaacatttggcaactgagggacttttcctcctgggtcattatccatccattccaattatggaaaaattcctgctttctagagcattaaaggagaatcaccaagaagatatcaagacaggtggtgataaagccttttgggtatagttgttctcactattgggtttatgcaaatggaaatatgataaagacattttttggccactttaggacagattacaaaagaaaccacaaaaaaatgctgtgggacacggaagtctctaaatyccttaccttaagtggtttcagggaaatgtttatgtttatagctaattgctacaagtctaactaagaccaaggttgcagca

SEQ ID NO: 703241 - DNA, 603 bp, Homo sapiens
ggccaaagttactggatttttcccccaagaaaaccagagagtgaattgtgatatcctgtgtgatttttagactgactattgccatagtgcttaggtcgtctccaggtgcccagagactcaatcaccaaccagtgtccacattcttgtcaccgctgcaagaaagagtttaggaagtaggcagaatgaagcaaaaggcaagaagtgtctattgcaaagcaaaggaacacactcaagagagggcttattcaggagagcgagtcaggtacaagagagtttgggtttctaattttataggatctstaaggagaggttgaaataatcattaggattttaagaaaaaatggtgaagttttcttagaactgaggtgtcacttatttatttatttatttatttatttatttatttatttatgttttgagatggagtttcactcttgttgcccaggctggagtgcaatggcgcgatcttggctcactgcaatctccgcctcccgtgttcaagcaatactcctgcctcagcctctggagtagctggggttacagacatgcaccaccacactcggctaattttgtatttttagtagagacgagatttctccatgt

SEQ ID NO: 703242 - DNA, 603 bp, Homo sapiens
ggccaaagttactggatttttcccccaagaaaaccagagagtgaattgtgatatcctgtgtgatttttagactgactattgccatagtgcttaggtcgtctccaggtgcccagagactcaatcaccaaccagtgtccacattcttgtcaccgctgcaagaaagagtttaggaagtaggcagaatgaagcaaaaggcaagaagtgtctattgcaaagcaaaggaacacactcaagagagggcttattcaggagagcgagtcaggtacaagagagtttgggtttctaattttataggatctctaaggagaggttgaaataatcattaggattttaagaaaaaatggtgaagttttcttagaactgaggtgtcayttatttatttatttatttatttatttatttatttatttatgttttgagatggagtttcactcttgttgcccaggctggagtgcaatggcgcgatcttggctcactgcaatctccgcctcccgtgttcaagcaatactcctgcctcagcctctggagtagctggggttacagacatgcaccaccacactcggctaattttgtatttttagtagagacgagatttctccatgt

SEQ ID NO: 703243 - DNA, 603 bp, Homo sapiens
ggccaaagttactggatttttcccccaagaaaaccagagagtgaattgtgatatcctgtgtgatttttagactgactattgccatagtgcttaggtcgtctccaggtgcccagagactcaatcaccaaccagtgtccacattcttgtcaccgctgcaagaaagagtttaggaagtaggcagaatgaagcaaaaggcaagaagtgtctattgcaaagcaaaggaacacactcaagagagggcttattcaggagagcgagtcaggtacaagagagtttgggtttctaattttataggatctctaaggagaggttgaaataatcattaggattttaagaaaaaatggtgaagttttcttagaactgaggtgtcacttatttatttatttatttatttatttatttatttatttatgttttgagatggagtttcrctcttgttgcccaggctggagtgcaatggcgcgatcttggctcactgcaatctccgcctcccgtgttcaagcaatactcctgcctcagcctctggagtagctggggttacagacatgcaccaccacactcggctaattttgtatttttagtagagacgagatttctccatgt

SEQ ID NO: 703244 - DNA, 581 bp, Homo sapiens
tgtctaatgacgcgcatctaccattatagtatcatatagagtggtttcacaggcttaaaagtcctctgtgctctgcctatttcagtgttttatctttactcttattataggaacttgaaatgcaggctcgagctcatggactttcccttattccatccacgggtctctgctctccagatttggtgaatcggatcatcaagcaagaacccgytcttgagaactgcagccaagacctccttcagcatcatgcagacctaacctgtacaacaactctcgatctcacggatggcaccatcaccttcaacaacaacctcggaactgggactgaggccaaccaagcctatagtgtccccacaaaaatgggatccaaactggaagacatcctgatggacgacaccctttctcccgtcggtgtcactgatccactcctttcctcagtgtcccccggagcttccaaaacaagcagccggaggagcagtatgagcatggaagagacggagcacacttgttagcgaatcctccctgcactgcattcgcacaaactgcttcctttcttgattcgtagatttaataacttacct

SEQ ID NO: 703245 - DNA, 592 bp, Homo sapiens
gagcgtctaaatcatgcagcctgcttctacttagaagggaaagaaaagtggcctgtgaaccatttaataaaatttgaagagattatttttcttcctcatttctcagaggatatactggggttggagaagacaatttgtttagaagtggagtaatgggaaaggggtacaggccccttgccttcgtgcctgtccacacttcccatggttccgacccttgtgttgagttgctcagccaggcacttccctgcgttacctccatgacagctttccctccccattaattctatattttcaaattctagagtcataaccatgagactgacattttattacttgcagacaacagcagcaactacaaaaagagacaatatctattcagcacctactgtgttccaggcacactatatgaattactttgtttaatttgcaagcaattttgtgaggyaagtgccactagtatccccaatttgcagatgggaatgggactatagtatggtaaaacaactaattacattgacaaagtaatggactgcaagcttatccctcccagacacaaagtgtacattagaatagcatgtgcttggaaacaaga

SEQ ID NO: 703246 - DNA, 1165 bp, Homo sapiens
gactttgaatgaagcaggttaccctccataatgtgagtgggcctcatccaatcagttgaagaccttaatagaaaaagactagcctcccatcagaaggggaattctgccagcagaccacctttggacttgaactgcaactcttccctgggtctccagcctgctggcctaccctgcagattttggacttgccaatcctccactatcacacgagccaattccttaaaataaatctctctctmtatatatatatacacacatcctgttggttctgtttctctggagaaccctgactaattcagcaccaaagtaagagatgcctcagggaagctcactctgtctttggcaggctctattgttatagcagcaaagtgctacaggttggatgagcccacggtgccctgataaaactgcatttatagaaacagacagcccgcccgtggccacagttggccaatatgtttttttaaaactattgcacaaaaatgttatttatcttgactactgagtttcttggtgtccccttccatttttcactccagatgatgcctctcttgccccaacacagtccccacctggctcctcaagcaacgtgatctgaatggtgtccatggggatagagttcaactagcaggaccagaaagcagcatggacatgctggaaagatggccctaccattctgtacaaccttgaatagctcttaaacttcattgggccttgtttcttcttctaaaactaagtgttgtaaaaaaaaaatatgaatatagcaagtcttcacacaggtagcatcctgggtggagtgatctccatgaaaaggcccagtgaatccctgagatgctgggtcgctgcgcagtttcccaaggttctggccatgatccctgctccagccagcccaaggagaaagcctgggtggcctaagaggaagtgccatccctggtagggtgggctgaggggccctgggagtgcctgcctcttgggctggatgaaagtggacacctgccttcaagcatgtgtctcagtccacaagttataggagaaagaaggagaggagaaagcagaggtagaaaacaaaagaatcactcaccctacagactgcctgccaagttcctctgctgcctggaaagcccaaggagaattcagagatcccattaggttggagcacagggca

SEQ ID NO: 703247 - DNA, 1165 bp, Homo sapiens
gactttgaatgaagcaggttaccctccataatgtgagtgggcctcatccaatcagttgaagaccttaatagaaaaagactagcctcccatcagaaggggaattctgccagcagaccacctttggacttgaactgcaactcttccctgggtctccagcctgctggcctaccctgcagattttggacttgccaatcctccactatcacacgagccaattccttaaaataaatctctctctatatatatatayacacacatcctgttggttctgtttctctggagaaccctgactaattcagcaccaaagtaagagatgcctcagggaagctcactctgtctttggcaggctctattgttatagcagcaaagtgctacaggttggatgagcccacggtgccctgataaaactgcatttatagaaacagacagcccgcccgtggccacagttggccaatatgtttttttaaaactattgcacaaaaatgttatttatcttgactactgagtttcttggtgtccccttccatttttcactccagatgatgcctctcttgccccaacacagtccccacctggctcctcaagcaacgtgatctgaatggtgtccatggggatagagttcaactagcaggaccagaaagcagcatggacatgctggaaagatggccctaccattctgtacaaccttgaatagctcttaaacttcattgggccttgtttcttcttctaaaactaagtgttgtaaaaaaaaaatatgaatatagcaagtcttcacacaggtagcatcctgggtggagtgatctccatgaaaaggcccagtgaatccctgagatgctgggtcgctgcgcagtttcccaaggttctggccatgatccctgctccagccagcccaaggagaaagcctgggtggcctaagaggaagtgccatccctggtagggtgggctgaggggccctgggagtgcctgcctcttgggctggatgaaagtggacacctgccttcaagcatgtgtctcagtccacaagttataggagaaagaaggagaggagaaagcagaggtagaaaacaaaagaatcactcaccctacagactgcctgccaagttcctctgctgcctggaaagcccaaggagaattcagagatcccattaggttggagcacagggca

SEQ ID NO: 703248 - DNA, 1165 bp, Homo sapiens
gactttgaatgaagcaggttaccctccataatgtgagtgggcctcatccaatcagttgaagaccttaatagaaaaagactagcctcccatcagaaggggaattctgccagcagaccacctttggacttgaactgcaactcttccctgggtctccagcctgctggcctaccctgcagattttggacttgccaatcctccactatcacacgagccaattccttaaaataaatctctctctatatatatatatacacacatcctgttggttctgtttctctggagaaccctgactaattcagcaccaaagtaagagatgcctcagggaagctcactctgtctttggcaggctctattgttatagcagcaaagtgctacaggttggatgagcccacggtgccctgataaaactgcatttatagaaacagacagcccgccygtggccacagttggccaatatgtttttttaaaactattgcacaaaaatgttatttatcttgactactgagtttcttggtgtccccttccatttttcactccagatgatgcctctcttgccccaacacagtccccacctggctcctcaagcaacgtgatctgaatggtgtccatggggatagagttcaactagcaggaccagaaagcagcatggacatgctggaaagatggccctaccattctgtacaaccttgaatagctcttaaacttcattgggccttgtttcttcttctaaaactaagtgttgtaaaaaaaaaatatgaatatagcaagtcttcacacaggtagcatcctgggtggagtgatctccatgaaaaggcccagtgaatccctgagatgctgggtcgctgcgcagtttcccaaggttctggccatgatccctgctccagccagcccaaggagaaagcctgggtggcctaagaggaagtgccatccctggtagggtgggctgaggggccctgggagtgcctgcctcttgggctggatgaaagtggacacctgccttcaagcatgtgtctcagtccacaagttataggagaaagaaggagaggagaaagcagaggtagaaaacaaaagaatcactcaccctacagactgcctgccaagttcctctgctgcctggaaagcccaaggagaattcagagatcccattaggttggagcacagggca

SEQ ID NO: 703249 - DNA, 1165 bp, Homo sapiens
gactttgaatgaagcaggttaccctccataatgtgagtgggcctcatccaatcagttgaagaccttaatagaaaaagactagcctcccatcagaaggggaattctgccagcagaccacctttggacttgaactgcaactcttccctgggtctccagcctgctggcctaccctgcagattttggacttgccaatcctccactatcacacgagccaattccttaaaataaatctctctctatatatatatatacacacatcctgttggttctgtttctctggagaaccctgactaattcagcaccaaagtaagagatgcctcagggaagctcactctgtctttggcaggctctattgttatagcagcaaagtgctacaggttggatgagcccacggtgccctgataaaactgcatttatagaaacagacagcccgcccgtggccacagttggccaatatgttttttwaaaactattgcacaaaaatgttatttatcttgactactgagtttcttggtgtccccttccatttttcactccagatgatgcctctcttgccccaacacagtccccacctggctcctcaagcaacgtgatctgaatggtgtccatggggatagagttcaactagcaggaccagaaagcagcatggacatgctggaaagatggccctaccattctgtacaaccttgaatagctcttaaacttcattgggccttgtttcttcttctaaaactaagtgttgtaaaaaaaaaatatgaatatagcaagtcttcacacaggtagcatcctgggtggagtgatctccatgaaaaggcccagtgaatccctgagatgctgggtcgctgcgcagtttcccaaggttctggccatgatccctgctccagccagcccaaggagaaagcctgggtggcctaagaggaagtgccatccctggtagggtgggctgaggggccctgggagtgcctgcctcttgggctggatgaaagtggacacctgccttcaagcatgtgtctcagtccacaagttataggagaaagaaggagaggagaaagcagaggtagaaaacaaaagaatcactcaccctacagactgcctgccaagttcctctgctgcctggaaagcccaaggagaattcagagatcccattaggttggagcacagggca

SEQ ID NO: 703250 - DNA, 2830 bp, Homo sapiens
gaaatactttttcttttttgagacagagtcttgctctgtcccccaggctggagtgcagtggtgtgatcttcgctcactgcaacctctgcctccaaggttcaagagattcttctgtctcagcctcctgagtagctgggattacaggcatgcaccaccatgcccagctaatttttgtatttttagtagaaatggggtttcaccatgttggccaggctggtcttgaagtcctgagctcaagtaatccacctgcctcggcctcccaaaatgctgggattacaggcatgagcgcccggcccctgactattaccatctttaagggaccttatagcagccaactcctgggctcaggcaattctccctccttggcctcccaaagtgctggaattacagatatgagccactgtgcctggccacagagaaagacttttaacacgtgtctaaacttggttgggcaagacatgtaacttctccaaaactgggtctcctaataaagtggatacaactgcaatgacgtcttaggattgtgagaattaagtaacatacttgactctccggcttccttgagtgaagtatgtgtcttcctaagggtatagatgattttgagaggaataaaacgtcaagggcacaaacccagcaaatcttatagaagcattaattttacttaaggattgagctttaaataatttaatgagtatgttaaaatactatttttatgtcaaaataattatggagcttgaagcaaaatatgtatgctttctttaaagatatctataatataagatcagagaaaatttgtacttgtatatgtaattttagcttatggccccaggcccaggaaattaggaaattagcctcctctgccattaggcctagtttggtttaaaatttaagtatgtaaaattcttttgtatttataaattgcacagtaaggttttggcacaattttagtgtacatgcagctgtgggaaaaaaactctgtctttgggaatggatagcgctgaaatgcatgggaacttcttttaaggtggaaatatatcttttatgaatgatattaatggaagagagaagaaagtgattattcatattttgggccttttcaggaaaccttggagatttcagttggctgtttcctttaaaatggcagactattgtcctcctgtggttttcattgcttcaaagtccagatggagactgaagtgggctgacagagctaataaaacttagaaagcaaggtgggaggaggtgatggggatggatgaaggtagggagagaaggacatggtcaggaaaagagaatgggagatcaatgatggcttcctgttagccaaatacttagcaagcacgcagcacacagcatgcagcttcctgaaaagccctagcattttaaatttcagacttgttttattattatatgccattttcaccaaatgactcttagaaaagccaaagctgaaaaagaaaggtcttgagtacttggttcttacatatttacaatttcatttatttattaacttccctctttctttctctccaacatcaaaggaaatattaattaaagacaccccagaggagatggccatactaacagctaatttattgagcctttactatggcacacaggcttattaaatcttacaactaagctattgaagtaggggctatgattatccccattttatgggcatgaccaagaggggtaataataatagcagctaatgttacagagggtttcccatgtgccaggcaatgctctcattgcttttgtatattagactacatccacctcataataatcccaggaagcaggccatatttatcccctattcgagagaaaaagatactcaagtaaagacagagtaattgacttgacataacacagttggcaagaggtagatcggcgatttcaaccctgacagtccagccttgaagcccattctgtaatatagtctgtgtggcccccaatgtatatgaaaagtggaaacgtctactctgttctgctggaggagatattagggctagaccatgcccagcgcctccttagcaccttctctctttgtcccattgggaagagggagtctatctgactgcagaccaggggagaaggaggtaagcaggagcactgctttggctccctctggggtgcagcctattctcagggtgcatgctttctcaaattcctgccttgtttcacaatctagagtttgagatgagaataagaagaatctttggaacatggttttcatcaggaaactggctacagaggtgacagaagagctttgaagccaaagaagagatgggtattagcagtaacagggagccacctctggccctgggtcacagggagagcccaggcaggtaagtttactgggactaagtaccagagtccaacagtagaaggtgggatcatgacaggcctttctgccaggatcgggaaccaaggaggagataggcttgctgcagataacatgacagagagggaaaaacacccctgagtctcctttcccagtaccttcccgtctcccatcagtgaagcccattggctagatccagctggcacaagagcctggaaagtacagtctgcagtgggcagcctctccttgcccagagcagagcagggcaatgatgatgagtatatctgaaagcatgaagactcagaacacacccctgcatccattcaacttggaggggaagatacaaggaagccaggttgtggccayaaactaaagccttgttctcaaactgctttaccagtaagaaagccaaaatgttattttaatcttcatttttaaaacatacaccatctctcaatcgacttggattttactgggaaa

SEQ ID NO: 703251 - DNA, 1057 bp, Homo sapiens
tttgaataaagtcatcccattttcatttagcactgggcctgtgaatgatgtagctggtcctgtaatcaataattattaagcatctggcatattccagggaccatgataggtacaggggacctgacaggaggcaaaacagagcacactttagcctgcagggagttttcaatgatttcactttctttgaccaatgggatgtgggtggaagtgttgtgtgtcacttccttataggcattttaagagccagcccatagctcaccaggtctctttaccttctgttgcagtggctggcaatgttctatatgaaagttggttctttagccttagatttaggaaggaaggcaacatggagaaaagctacagctgacatatggcctaagtaagatggttgtggcaacttggttgtggcaagtgactgagataggagttgtctgttaatgcagcatactaccaacagttgataacctttcacttgaagaaaggggtctctgtaaaatcttcggaaaggcaggacctataaacacataatatccatcattatatccagaaaacaacaatcttttaaatgacgcattggaactctttttcctaatactcaattaccattcccttccacaactcattgccaaattattgacccttcaattaatatgtatttagtttgacttactttttgtcttatcctgtaccagctattctaaatattaagttgcttctgagtcactcatatactgctatcaaaaaaatgaatgaatgcaattcattgcattgaaaaaaatagagtcagaaataatggaggcattgggctatttttgtcattaaccaaaacactttagaaatatttattcattatgctgtctctactttttcttcatatattagaaaagtagaccaagaagtaaccaaatccactgaattcaaatattaacacacagttcaacttcaccaactcattcaacacctattcattgagacctactatgtggcagacactgttktatgtctggcatgaatcccctggtacctagtatagcatcaggcatgtacaaagtggtca

SEQ ID NO: 703252 - DNA, 591 bp, Homo sapiens
ctggaaacttggtagtcctactgtttctatggctcatcaccttcaaaatagagtctccattctctctgcttgttcaagtcatttattattcatgcagccccatggtgattagatcccatagtccaaacctrcatcatatattctcattctcactgggagaaaagctaagctactaagcatctgattttcagattctgtggcgagatgaagggatgctctaccctctaccataacttttgaggtgggcaattcccaaatattaaggagattgagatgattttcatgaaaaagaaaaataaataatataattcatccctacaactgcacaagattcacatataactttatttaaattgttaaggcttaaaaaactgctgctacataattaatgcaaaagctgtatgctgaaaatacgtttatccttccttacaaaaaggtgacccaaattttagtcaacattctgctataagttctggatctcttatagctgtcagtctgtcataatcctatttcaatattctgtgatatgtgaattacattataaatttaaccaccaccacactacatgatacaaaatagtgcgagaaagaa

SEQ ID NO: 703253 - DNA, 591 bp, Homo sapiens
ctggaaacttggtagtcctactgtttctatggctcatcaccttcaaaatagagtctccattctctctgcttgttcaagtcatttattattcatgcagccccatggtgattagatcccatagtccaaacctacatcatatattctcattctcactgggagaaaagctaagctactaagcatctgattttcagattctgtggcgagatgaagggatgctctaccctctaccataacttttgaggtgggcaattcccaaatattaaggagattgagatgattttcatgaaaaagaaaaataaataatataattcatccctacaactgcacaagattcacatataactttatttaaattgttaaggcttaaaaaactgctgctacataattaatgcaaaagctgtatgctgaaaatacgtttatccttccttacaaaaaggtgayccaaattttagtcaacattctgctataagttctggatctcttatagctgtcagtctgtcataatcctatttcaatattctgtgatatgtgaattacattataaatttaaccaccaccacactacatgatacaaaatagtgcgagaaagaa

SEQ ID NO: 703254 - DNA, 591 bp, Homo sapiens
ctggaaacttggtagtcctactgtttctatggctcatcaccttcaaaatagagtctccattctctctgcttgttcaagtcatttattattcatgcagccccatggtgattagatcccatagtccaaacctacatcatatattctcattctcactgggagaaaagctaagctactaagcatctgattttcagattctgtggcgagatgaagggatgctctaccctctaccataacttttgaggtgggcaattcccaaatattaaggagattgagatgattttcatgaaaaagaaaaataaataatataattcatccctacaactgcacaagattcacatataactttatttaaattgttaaggcttaaaaaactgctgctacataattaatgcaaaagctgtatgctgaaaatacgtttatccttccttacaaaaaggtgacccaaattttagtcaacattctgctataagttctggatctcttatarctgtcagtctgtcataatcctatttcaatattctgtgatatgtgaattacattataaatttaaccaccaccacactacatgatacaaaatagtgcgagaaagaa

SEQ ID NO: 703255 - DNA, 1060 bp, Homo sapiens
cgtgtaataccagctacttgggaggctgaggcacaagaattgcttgaacccaggaggcagaggttgcatacgtacccttctatacttctataccatacttctacactttcatgaaacaacacaaccactctatgtgtctgyctgataagaacagagtatcctctgtacaaaagtagacattctcatcctttcttcaaagtgaggagatggaaagaccctaaaatttttgcatctacttctgggaaacaatcacataatctggctctgagatatattaatttctccacaaattcagtcacagtgctgaatattcttttataaaaagataaaattgtaaagttaaccaccaaataaacttgtattaaatagtatgaggaaatataagagaaaggaaaaaatatgaatagctattataatccatgtttctgtaccttgtcatgagaccatagtggaatttttaacttgctctttgccttcacctgtgacctcaactggatggaattctttatctggtagcatgactcaaaccttcatccctgaaaaatctgaagcttaatggtcctaccttttttttttgttgttgttgttactataatttcccattaacttttattttggtggaagtacagtcatgcattgcttaatgatggggatacattctgagaaatgcatcattaggcgattttatcattgtgtaatcatcatagagtgtatttagacaaacctagatggtaaagcctaccacgcacctaggctacatagtacagcttattgctcctaggctccacacctgtacagcatattactgtattgaatacaatgcaggcaattgtaacaaaatggtaagtatttgtgtatctaaacacatccaaccatagaaaaggggtagtaaagatacaatataaccttatggaaccactgtcacatgcatgatctatcattgactgaaatgttgttatgtggtgcataactgtatttaaaaaaggcacaggagaatctccactgttccagatatagtactctctgccttcattatgtagcagcaacccaattccacttg

SEQ ID NO: 703256 - DNA, 1060 bp, Homo sapiens
cgtgtaataccagctacttgggaggctgaggcacaagaattgcttgaacccaggaggcagaggttgcatacgtacccttctatacttctataccatacttctacactttcatgaaacaacacaaccactctatgtgtctgtctgataagaacagagtatcctctgtacaaaagtagacattctcatcctttcttcaaagtgaggagatggaaagaccctaaaatttttgcatctacttctgggaaacaatcacataatctggctctgagatatattaatttctccacaaattcagtcacagtgctgaatattcttttataaaaagataaaattgtaaagttaaccaccaaataaacttgtattaaatagtatgaggaaatataagagaaaggaaaaaatatgaatagctattataatccatgtttctgtaccttgtcatgagaccatagtggaatttttaacttgctctttgccttcacctgtgacctcaactggatggaattctttatctggtagcatgactcaaaccttcatccctgaaaaatctgaagcttaatggtcctrccttttttttttgttgttgttgttactataatttcccattaacttttattttggtggaagtacagtcatgcattgcttaatgatggggatacattctgagaaatgcatcattaggcgattttatcattgtgtaatcatcatagagtgtatttagacaaacctagatggtaaagcctaccacgcacctaggctacatagtacagcttattgctcctaggctccacacctgtacagcatattactgtattgaatacaatgcaggcaattgtaacaaaatggtaagtatttgtgtatctaaacacatccaaccatagaaaaggggtagtaaagatacaatataaccttatggaaccactgtcacatgcatgatctatcattgactgaaatgttgttatgtggtgcataactgtatttaaaaaaggcacaggagaatctccactgttccagatatagtactctctgccttcattatgtagcagcaacccaattccacttg

SEQ ID NO: 703257 - DNA, 611 bp, Homo sapiens
agaagtcccaagaaaataaaattattgtaatttaaataagccccaccataaagaacctttccttcaacagctctcccaaactcttgctatccttctggtagcctgaaagacttaaacacatataacaaaacacttaactttccatctcaggggaatacctacataatggagaatctatttgaacaggccaactgaagagcaattaaaataaaaacataaaaaacctactttctaaatggtatatgaatggaggtaagatggtacttcccagcaaatgaataattttagagtaattgagtccttgtttatttcttttaggaaaatatgttttctgcatttaaaaacatattgaagatagctgtcctcagtggtatccagcattagcagttaaacaatttacaggagataaattttctactttgaytgcatagaatagtaaattagtgaagacctcttgaaattattgagactgtcatacagttagaaattcactgaatgctatttatgtgtctttgtagcttgaaaatttaatgaggctgaaatctgaagaataaaaatatttccactacaaaaatgaaaaaagtgtttgaatgaaatctagtttcattgca

SEQ ID NO: 703258 - DNA, 595 bp, Homo sapiens
ctttgataagctaaatagatttttaagtcatctgaattctatttttctttaatttcctagtgttttaggaggataataaccaatgtgacagaggcttatctttgcttcaacaagctctttaaattgcaatgtttcatttaaattttatttatattaaccagaactttaacagcagggaagagagatgttttattataaattcttatcctttaaagagacaacatattttccttttgcccaaatatctttcctcatattgtattamcatgagtttccaaaatatcttgtggtgttgcttatatttgcacatgcctggaattccttaactctattgtcagagaataaagaataaccactgtttaaacagttcttggttgaccttacatctagcatttctcttctgctgcaactacaccaatcccatttcattcatttataaattataattattttaaatatcaaccttggaaaggtagaagtaaaatcattttaagatggtatggtgtacatattgtaattcaattgctctattcaattaaaaaaatgcagaatgagaaatgactatagcagtcttatttagaagaacagattccac

SEQ ID NO: 703259 - DNA, 2248 bp, Homo sapiens
tcacccaggctggagtgcagtgatgtgatcatagctcactgtagacgtcaatcacctaggcatccaagcctcccagcctcacgagtagctaggactacaggtgtgcactaccatgtctggctattttgttcttctcttctggtagagatgaggtcttgttctgttacccaagctggtcttgaattcctggcctcaagctactctgttctcttagcctcccaaagtgctggtattacaggtgccagctactgtgcctgggcagtggcagtattctgtatcagttaattaagattattagttctgtttatctaaattttagtgatttttttccagataactcagttactgtgaaaaatgttaaaattttcattaaaattctagatttgagtctttgcagttctgttcgtttctgtcttctatattttgagactataatttgtgactgaaaatataaaatgattatatttcctgatgaattcatgataacactttgttttacgatgctttttcccctaaggaagattttgtgtgatatttacataccctgtctcataattagtgggactatctcttcatcacataaatgtgatcacttaacaaaaaaaaagttttgtatgctcagcatctatataggtactcagttgttcaatggccaggtaaacataaggtgaaaattagattcaaattgtttaggagaatgttagatgcagaaggctgagtttgacatacttcctcagttcacgtatatactattatcggcttgtgcagaggcccttggctgacagatgggtgggttggctaatttatctccattagccattctctttcccacctataggcagctgacctaatgtattcgaaataggccatgtaattgcatttttatttgcatcaatggcatgatgctagagacctgattatatttcttgcttattttattttattttttttgagacggagtcttgctctatagctcaggctggaatgcagtggtgcgatctcagctcactgcaacctctgcctcctgggttcaagcaattctcctccctcagcctcccaagcagctgggattacaggcgcttaccactacccccagctaatttttgtatctttagtagagacaaggtttcaccatgttggcctggttggtctcgaactcctaacctcagatgatctgcccacctcagcctcccaaagttctgggattacaggcatgagccaccatgcctggcctattccttgctttttaaacactcactaccaagcttccaatatctagttayagtgatgtatttttagtgatgttcaaggattcaactgcttcatagtattttgtaacgtgcttgcatattttatttattccttaataattacgaatttgtaattcatgattttggaagggataagttcagcctagaaatatctggtaataatgaatattataggtacttatagtccttgaatttatactaactgtgctcattttttaaagtttctggaattatcctccattctgagttcacagatctcttgtgggctttgttgtgtcatcgaataaattcatttttatcttttgtctctcttctctacaggttggaatactgtggtttgacatctctctgctgtcaagatctctcctctgctcttatctgcaacaaaagactgataaaaatgaatctgacacagaataccttaggatatgaaggaattgtgaagttatataaagtcttgaagtctcctaagtgtaaactacaagttctagggtaagtctccattggcttctcagggggagcatttcctataatgagggatttggggagccactcattaatacaggcctcagaatccacctaattgtgtatcattgggtattttctagacacttatttgtttttctgtcatagaacactgaatattgagagatacaatatagcatagtggttaaatattgagcaccctggaaccagcctagatgagcttgaattctgaccctaccacttactaaatgtttaattaaggctagtcccccatcactctttgttttgatttgcttatgagtaaaatgggtgaaatgataaaatctacccataaggttatcatgaggatctgagtcaatataggctaagtacttagaatgcctgccttgcatgcataataaacaataaatatgttctctgtttttattattatcagtagtaatattaattttgcttggatagcaaaaggctcttggaggatcctttttaat

SEQ ID NO: 703260 - DNA, 3655 bp, Homo sapiens
gcagaattaatctctctctgctttcagtccatacttcattcatcctattttatattcatcacagcatgatagagttatttgtttgtaataactctctgtcttctgcactagagtacatgattcgccagagaagaggccacagcttcctgattttctatctctaatacctagcataatgactggtacaaagttagatgaaaaatatatgtatgaggaattgagccaattaatactatcataagtctaagtcaccaaatatccaccttacatacaaaacaatgacgagaaccactagtgtaagagtaactgctctagaatgaggaggccatgacagaggtggagtaaggacggaggcgtaggcatggtgtttcttttttgtcaaattataccttttgtgcctctttatgagattcaattatcgttattttatccttataattgcaaagcaataagatgttacataggggagtgtagagtgcattttaacrctatatggatagggagataaagttgaaaagccatgctcaatgggagttctaagaaacatacaatgtcagattcctaggagaaaatttccaaaaggaaagcttacagcaccaccaattgctagttacttttcatgtgcaatatatctagtgctttgcatttaaaatatgccactcatctcattttcctgtgtacctatgcgattcttcaagctgaaaatattacagaaatggaaaaaaattgcattggtagctaggactaggaagatgattccttttttgttttttttttcaaactgatataacaataacaaattattttttctaactctctcaacaattagataaaatgccagttatttactcatagtatcatagatcagctgattttatatgttgtttacttttgcttgacaataatgcatttttaaaaaggcttttgaagaccatgcgtatgttaaaaatttaaataatgttatggcatcttatggtactgtagattcattaacaattgagctaacaaatctcattactaagtgtaatttatatatgctgtttggttttgaagagtacattaatccctgattgtataaatatcacaaagaatccctacatagtaatagattttaatttctgaaacaaagagtatacacaatgaatgtagtaaatttaatttttctcctatcatcttcttttagttttaaataactagcaatagaaacagtgttctattatttattttatttctatctataatttacttgtatttatgtatgttctgataacaaatagcatacaacatacacatatcttaagacagtcaacatcaatattatggtcataaaatattaatctgtaatctccagtatccacactgcagtctagaaataccatttcccactaaatgaaacccagattctctctgtaaatggctaattccatgtctgtgataggcaatatctgagcccaaaggtcaaagtttattaggaccatgtcaaaatgactcagaagccatcttggagaggctcccactggccaagaataaaacaattggagcattgataaaactaataactgcaaaagattgaagctcatcgactatgcataagttcttgaacttaaaatgatacttaaaaaacaaacagatttggaggtttatttactattctttctactttaacattttctattaacatttacagttcaagaagttttaaaaacatcatgcagctataacgtaaataaaggtctgttgcacctgtctttcatttcatcccttttgggcttctgcagtaatttgtgtttatagaattaatctgatatttcagttgcaggctattagtgattgtgttttcaccatgtttctccaataatcactgggccacaagctccaattctgaaatttttcgctgcaaagtcaggagctgggagcctatgaactcacagcagccaaatgaaggtcttcagtccagatgtagatacactgcctctcatgaagagtgatttttcctttggctcttaagcaataaggtgtgtatggcaagttataagaagaatcaaaaatgattagaaagctgacattaattcctactgccagtttctttcaggaaacatgagtcaaatgcaaatattttagttggaccatatttataatctagaactgtactgctaatatgtagcctctagccacatgtttccattaatattaaaattaattaaaattaaataacattaaaaatttagctcctcatttatactagacacatttcaagttctcagtaaccacatatagctggtgggtactgtgttggatgctgtgggtatagaatatttccaatactgtagaaagttcttttggacagcactatctacgaggttatattaagtgattatgtttcatttggaatgtcttagtttacaccacagcctatctttcacctggaaaaatcacccttctcaggccatggctatggaagagaacaccaaaggtggtgagcagacctccagaccttcctcttgccaataatgtcttcagtgttaaagatattatcttaaagataaagaagacaaccactgtgggacaaaataggaaatctttaaatagttaaaaacaaattccagcataacccaaatgtcacaagaccttaaaaaagaatgcaggcttatattgtagcaggagcctcagtaatcgtcatcagaatcaatggattaaaaagtaggagtttgaatgccatggaaatgccaaagcctcttctggtttttaggttttgttaaaactcatgatatttttaaaaagtacgcaacatgataactacatccttttctttgggattatgagaactgcacacagccctttagcatatcaaggaaatactacacatagagacggtgaggaaatgtaaaagaaattatgtgcattctgcttaaagtagatcagtaactcatttgcatgagaatatgcttagaaaaggtaggtgtttccaaaaagagaaatgataggtacaagaagcaaaactcaaaaaaaaaaacacaacaaaacaacaaaaccaatagacattttatgcattaaaaaatatttacaatgtacgggatgctctgctagatatttggtatggaccatgtgttagccacgttctctgactttaatgaaactgataatcatatgacagttactgcatattagctgtggtagcattccgtgttaatcacagcattgtgctctcagacatcattccaagaaaataaacaattccgttaatgttattaggagctaagattttctgtacaagagaaaagagacccacatttttaatcatggacattcagaccaggtgcagtggttcatgcctatcatcccagcactttgggaggccaaggtaggagaatagcttgagcccaggagtttgagagcctgaaaaattagatgggcaacatagccagactccgtctcttcaaaaaaaataatttaaaagttagctgggtatggtggtatttgcctgtagtcccagatactcaagaggctgaagtggaaggatttcttgagctcaggagtttgaggctgcaatgagctatgattgtgccaccgcactccagcttgggtaacagagtgagaccctgtctttaacaaacaaaaggaaattcagttaaaatttaaaactctgtgatgttga

SEQ ID NO: 703261 - DNA, 2731 bp, Homo sapiens
gttcaggtgcagcaagctactcagcagaatacaggaaccctcttaagcccggggcacagcagctcaggttaaatcagtaatttgcagtgcacaaaacactcacatacttggaactccattctctatctctggctcctggaagaggggctggcatgtcatgggcactccacacacacttgctgagtgaatgactgtgtcacgtgattcccactgctgctctgagacttcggtggagcaggtgttattctggtcatcaacatctataacaaaaagtgaaggaggctcagagccataaatatctcgagtcagggagctgaaaggcagcaaagctaagaagcagaccttaatcttagtctctaaatccatcgtctttctaaaaacccctgcttaactccatgtttattttcccaactgtgtttgaagcccctcagtggcagtctgtctgagaagcccctgtgtggagacagatgctttctccaagtggagctcacactctgatgttcttcatagtgtcttcttgactcaaggtgtgggttttgcttatttcaggctccatccctgcctcagcttcagataccaacctgatctttaatttgccaatatggaagactgccgagctctactcctggcttccaggtccagcacattctcttacccatgcctgactgtgctaggactaccaatccttcggtcaactccagacccagtgctatagtgtcatttcttcatgaagtctgctatagtcagccctttggaatatatatatatatagcataggatttgacagtagttgtccaaagttggggtaagagaggatttcagtttctactttatgtgttagtgaaataaaaaaattttttgacaaaggttattacttttataattagcaaaaacaaagataatttcatagagatttttacaaaaagatttttgtcatcagctcagtgagacttatgaaaatgcctcagcagacaactagaattcacaaattgtcttgaattgtttcaccccattcacttgtccacttcttgctttgctcactgagcggttccttcaagttaccaactctagttttgatctctcagcttgtttatttttgttcttctccctttgctcatacctccttgaggtcctagaactccctttctggtcaacgggccaatgatctttgaaggtgaacttcatcaaatggggaagatccaggcatttaggtcccaaaggaaagatggttggtatataaagctccctgctctgactccataggaattcatattcttgccacacccttaggcattaggttaaatacccaacagttctctcatcggttcttggtatttgccttatttttccaactgcattttaaattcctcaaaggcagatatcttaagtaatagttttctttatcttacctagaaggagctaaatatgttttctatgccctggacccagattctctccctggtaaagggcgtttcccaacagtattttgcaaaagacatttcccagaactctcacttgctgagaatctctatcacaggtttatatgataagtgattaggctcaaactatttatcatggtttacaaagtccttcataattgagtacgaaactatgtcaccaggttcatcttgcatcctgtttgcttctcctacacacgcagcccagtttccagtcataattaatttcttcaccattccacaaataaagcatcaccatcactagtaatcatcattattcattatggttttatatgttgatgactttgcctgttgtgtatagaatgtctttccttcccctacccaacctgacaagctcttctgctgcctccaagacccatttcagatgacttctcttccagaaaaaccttccttagwtcctgagaccgagctagtctgtcctttctgtgtgctcccacaaagctttgttaaacactagtcacctcaactatatgatattctctctctgactacctcaaggtaagacttgggtcttattccttttggggcatccctagcagcaccttttataatatctgacagagttggcattcaataaatatgtgttgaatgaatgcatgggagaaagaagtgttctccaggtagttaccatgatggatttgaatgcagagtgatggtgaacaatgaaagaaaggagggggagtcattttactggaagtcaaagggattagctcttgcatcatgcagtgcagctgaccgctcccagaagggagacgtccaaatgtaagatgcagtgcagaacattaaatattgaaagcaaaagttaaatattaaattttaatatgaaacattaatgccaataaacaaaaccagccagagagggacaaaattaggaccaggccgtggtcaaaaaggaaagagtcatggctcagactgaaagctgaccatggcctggactttcccagcagggctcattggtaatggtcacacccatcgaatttcccgggagaagcagttgaaggggggagaaaaccttttataacccacagccgtaaaactcaagtctttcctacaaaacaaaacacagtaaagtgttttaggaccgccaaggcttcagaactcatggtacagtggaacaaaaatagaggcagcagagaggaaaatatgaggttgctgaacccttggggcaggaatcctatctttgcttgcactgtgtgggactgggctcgtgtgcagccaagttgggcagaaagaaacaacaacaagagtcataa

SEQ ID NO: 703262 - DNA, 2731 bp, Homo sapiens
gttcaggtgcagcaagctactcagcagaatacaggaaccctcttaagcccggggcacagcagctcaggttaaatcagtaatttgcagtgcacaaaacactcacatacttggaactccattctctatctctggctcctggaagaggggctggcatgtcatgggcactccacacacacttgctgagtgaatgactgtgtcacgtgattcccactgctgctctgagacttcggtggagcaggtgttattctggtcatcaacatctataacaaaaagtgaaggaggctcagagccataaatatctcgagtcagggagctgaaaggcagcaaagctaagaagcagaccttaatcttagtctctaaatccatcgtctttctaaaaacccctgcttaactccatgtttattttcccaactgtgtttgaagcccctcagtggcagtctgtctgagaagcccctgtgtggagacagatgctttctccaagtggagctcacactctgatgttcttcatagtgtcttcttgactcaaggtgtgggttttgcttatttcaggctccatccctgcctcagcttcagataccaacctgatctttaatttgccaatatggaagactgccgagctctactcctggcttccaggtccagcacattctcttacccatgcctgactgtgctaggactaccaatccttcggtcaactccagacccagtgctatagtgtcatttcttcatgaagtctgctatagtcagccctttggaatatatatatatatagcataggatttgacagtagttgtccaaagttggggtaagagaggatttcagtttctactttatgtgttagtgaaataaaaaaattttttgacaaaggttattacttttataattagcaaaaacaaagataatttcatagagatttttacaaaaagatttttgtcatcagctcagtgagacttatgaaaatgcctcagcagacaactagaattcacaaattgtcttgaattgtttcaccccattcacttgtccacttcttgctttgctcactgagcggttccttcaagttaccaactctagttttgatctctcagcttgtttatttttgttcttctccctttgctcatacctccttgaggtcctagaactccctttctggtcaacgggccaatgatctttgaaggtgaacttcatcaaatggggaagatccaggcatttaggtcccaaaggaaagatggttggtatataaagctccctgctctgactccataggaattcatattcttgccacacccttaggcattaggttaaatacccaacagttctctcatcggttcttggtatttgccttatttttccaactgcattttaaattcctcaaaggcagatatcttaagtaatagttttctttatcttacctagaaggagctaaatatgttttctatgccctggacccagattctctccctggtaaagggcgtttcccaacagtattttgcaaaagacatttcccagaactctcacttgctgagaatctctatcacaggtttatatgataagtgattaggctcaaactatttatcatggtttacaaagtccttcataattgagtacgaaactatgtcaccaggttcatcttgcatcctgtttgcttctcctacacacgcagcccagtttccagtcataattaatttcttcaccattccacaaataaagcatcaccatcactagtaatcatcattattcattatggttttatatgttgatgactttgcctgttgtgtatagaatgtctttccttcccctacccaacctgacaagctcttctgctgcctccaagacccatttcagatgacttctcttccagaaaaaccttccttagttcctgagaccgagctagtctgtcctttctgtgtgctcccacaaagctttgttaaacactagtcacctcaactatatgatattctctctctgactacctcaaggtaagacttgggtcttattccttttggggcatccctagcagcaccttttataatatctgacagagttggcattcaataaatatgtgttgaatkaatgcatgggagaaagaagtgttctccaggtagttaccatgatggatttgaatgcagagtgatggtgaacaatgaaagaaaggagggggagtcattttactggaagtcaaagggattagctcttgcatcatgcagtgcagctgaccgctcccagaagggagacgtccaaatgtaagatgcagtgcagaacattaaatattgaaagcaaaagttaaatattaaattttaatatgaaacattaatgccaataaacaaaaccagccagagagggacaaaattaggaccaggccgtggtcaaaaaggaaagagtcatggctcagactgaaagctgaccatggcctggactttcccagcagggctcattggtaatggtcacacccatcgaatttcccgggagaagcagttgaaggggggagaaaaccttttataacccacagccgtaaaactcaagtctttcctacaaaacaaaacacagtaaagtgttttaggaccgccaaggcttcagaactcatggtacagtggaacaaaaatagaggcagcagagaggaaaatatgaggttgctgaacccttggggcaggaatcctatctttgcttgcactgtgtgggactgggctcgtgtgcagccaagttgggcagaaagaaacaacaacaagagtcataa

SEQ ID NO: 703263 - DNA, 1225 bp, Homo sapiens
cgagagagagagagaaagagaagacacccaaaactgaagccacagtcttttataagcaaatattggggataacatccattgcttctgccatattctactcattagaaggaagtggataaatttatcctcccatcaaggggagaggattatgtaggacatgaattccaggagatgggaatcactgggggccatcttcaagatgggtcacaccacaagttcaggaaacaaccacttttcacaaaaagaggataaataacaggtaaaaattgcaggaattccaagatcagtctcttctgatttctgaaaataatcaatttggagagtgggccagggttctatgaccaggagtagctgcaagggcttcacttagtgactcacagacagggtgattccaaagcacacacttaactccgtgtcacaggcagccagtcagttgaatatgataaggtgaccatcgtaggcagaatagtgacccccaaagatgtccacatcctgatctccagaacttgtgaatatatgactttacagggcaaagagactttgtagatgtaatcaagctaggggtcttaagatgaggcagcgatcttggattatccaagtaggctggatgcaatcatgagggtccttatatgtgaaagagggaggtaagagtcagagaaggagacatgatgacagaagcagacgtcagagggtgtgattgctggctctgaaggtggatggaagctatgagccaaggaatgtgggcagtctctagaagccagaaaaggcaaaaaaaaaaaaaaatagataaattggattttcacctagagcctccagaaagacagtggctctgctgccatcttggttttaggcctttgagacccatttcagatttccaatcttcagaactgtaagataaattttgtttttgtaagccactaagtttatagtaatttgttacagcagcaatcggaaactaacatcatagcctggttcttttctattttaattcttcctgatctttgccaccagtttttctgtttataaatagtcactatcttcttttttatatttaaaatatttwtatttttcattatacaagtaaatatcgaaatacatataaaaatgaaaacgtatgtgaaaagtgaaaacataacacatacaaatgaaatttcttatgatcgctccctccaacccatcattccaccaagtaatcatggttgtaattttggtgtatatctttcta

SEQ ID NO: 703264 - DNA, 610 bp, Homo sapiens
aatttgttgtactataaattgctcaggacatgaatcctggtgatattgatatacaatttgtgtttaagttcaacaattgtttgagcttcagtgtaccttattctttgtaaacctaagggtcagcaaccccaaaacctggatgactaaaaaagtagggtattgtattgtctcatttgtcttctgataataatggaactaattaactctaggacaaccttgccctgccccttggccttcaaggaagtaattttagaaatggccataccttgagaatttatattgattcaaattttcccacaaaatgtatgttatttttccaatgcattttagctttttattgaaataatttcagatgtttcaaaaaataatacagggagttttcatgtacccttcactcagctttccccaaaggtaatgttaaccttataaaaccatagtactttatcacatgaggaaactggctttggtatactattaaactacaaatttatttggatygtactagcttttacatgtttttgggggggtatagttctatgaaattttatcacatagatacattttcataaccatgcccacaaccgggatacacaattgctctactcctaac

SEQ ID NO: 703265 - DNA, 642 bp, Homo sapiens
ctttttgtatgaaccttcccattcttagtcctctggaaaacctaggtcaaccttctctttatttcatttaccaataattttgactagaattcacaaacctatttaaaactttaaaataaaaatgctatcagctgggcacggtggctcacgcctgtaatcccagcactttgggaggctgaggagggcagatcatgaggtcaggagtttgagatcagccaggccaacatagtgaaacctcgtctctactaaaaatacaaaaattagctgggcgtgttggcgggcacatgtaatcccagctattcgggaggctgaggcaggagaatcatttgaacctgggaggcggaggttgcagtgagccaagatcgcgccactgcactccagcctgggcaacagggcaagactcygtctcaaaaaaaaaaaaaaaataataataataataataaaataataataaaataaaaatgctatctaaaagcttgctgagcccctcctttccctcttctacctctctgtgcattctctgtccagatacagtttgtcacttcagtcaaggctagatgcatggcaaggagaatttatattgagttatttgcctggttcagataacggcatgtctcttagcactctgaatgcctctgatgc

SEQ ID NO: 703266 - DNA, 734 bp, Homo sapiens
gggtgccaaaccaaagagaaacagcatgctggagcagaaagcctttagaatgagagctaggaaatgggcaccagtctaatccacaatggcttttgcatgagaaaaatgacattttatgtcttccatttcgagttacaggctcatagcaggtgctcaatccttcttcctggtcgtcactcttttatgaattaatggtggcattgggcaaattagtactctctgcaaactcatctctaactaaaaaagacatgaaaattaaacaaatacatattcagacacaatattgctaagcacaatgatagggtttttttaaatttgtaagtttaatatacaatgaatgccttaatttatrattgtgtttattctctggtttcatgtgtccccatcacagtgttagttcctagttacacgaatattcagagatatggaaatgataagctgtggtaggtggtctccatggtctttcctaattttcatgatttgtaggttttacagatacggtttgggtctgtgtcccgcacaaatctcaggccaaattgtaatccccagtgttggaggtggggcctggtgggaagtgattggatcatgggtgtggatttcccctttggtgctgttcttgtgatagtgagtaagttactgtgagatctggtcacttaaaagtgtgtagcacctcccccttctctctctttctcctgttccggccatgtaaaatgagcctgcttcccccttgcctt

SEQ ID NO: 703267 - DNA, 625 bp, Homo sapiens
tctctctctcactcatgacatttactggcattaaccaccacatctccatatttaactaatgcattcccttttctttatccttacacccaatcaccttgaactcttgtccaagccaccatcaactcttgcagagatgactgcaaaaccatcttctaatgcattcttcatacagctggcatagagaataagggataatccaatgttataattcttcaagggcagtttttaaaatgacattgtgtgraacttttcttcttaaaaatatattattcatttttaatttgatttttggcagtagtatttacttcattaaaattataatttcaaactctgaatttttaaaaatttttacatttagctttcacatgttctgttttatttatgtctaagaactgtaaatcacatttaatattctaatgcttattgtccttaacagggttaattacttaaatccctttaaatattttaaatcacacatatttttaatgtatatgatctcttgattaagtgcttaagtaatggtttagcatacaaatctacataattaattcttataaatataataaattatagttataaatatgattattatttgtagcttatttaagtgatacaagtatattta

SEQ ID NO: 703268 - DNA, 903 bp, Homo sapiens
tatatatttatatatataaatgtggataaagtacagaaaatcctatcattgcctctgactcaaatggtaatctttaatataaagatttgaaactttcatggaacagtatatcagaactttatttccaatttgtttatgtatacttaacgtatatcctaagtatcaagaaatcacattcaattaacatatacattataaaacaattcctatatgataattctaataagtaaacatgattttagtggtagtaattattcaatcaaatattcatattttaaagattaaatcttcatattttaaagcacattacatcagtttacaattcgatattgactactggatagaatttatcaatgaaattttgaatatgccatggttaatgcagatcatgtgaattaaattgcaaggcagagagcttttaaattaaaaaaataagctggtttataaatccagtgctagatagttagtaaaagcaatacatgtaaatctcccagacacctcccaatcttggtattttgaaatattttcctctttttaatattatttaaataaaaaaattatctgcctttaagcaacaaaacatgaactcttggtagaaaattcactaattgacataggtatgtagacttataaacctgtaaaaaatgtgaaatagaaggcataaagtatttgagtcaataaattactaactaaatattttaattaaatcagctttataaaaaaagtaaacataaacacataagtctttgtataagcacccctacatttttaaaagtatatttgccttttcataaactcagttgagwagtggtaacattcatcatcacaactttttagaggcaatgaaattgatgtcatttgagatcttcatcttttattttcttattttgtcatgtttagcaa

SEQ ID NO: 703269 - DNA, 1847 bp, Homo sapiens
ctgtaaaaatgaaaatatttcagaattgattaacaaatggtggaagttaaagttgtctcttcccgacctgcactttgttttctgtctcttgccttttctcacattttatttttccttcctatctcaacaatataccccacctgcagtgtgcccaatgtggacacatacctgcttttttcaggcactgttttggacaacatttccctactgagcattaaatcactttttcttaaatatgtactaaagatttccatggctgaaaagctagttccacatacattaataatccttgaagaattaaatcagatacaacctctacatcagcacaatatttcaaggtggtaagggagtgctactgctgggtttgtcttcacttaataactttattaatgatgtggatgagtgaacaaatatgaaaagaaaatttataggtattacatatgtagattctgcagaaacaaataggctggaaggtaatgactgtagaatgacctagaraggttaaaaaaagaaaatagtagtccaatattattccacttttaagtaaatgagaccattaagctctttaaaataaccagtagataaaaactcaaagcaatgatagctacatcaaaaagtgagggaagaggggaaattatatgttgcaatgttacagagtacattaaagcattcagtatatttcctgaaaatttcgtaagcacagttcttaatgtttattcataaataaacaaaaccaaaccaaaagccatagttcatttgtttctaactaagagtacaaattatttatgcggaaaagtacatataagctcacataaataacatgaataatgttttcattgtgaagatattcataacgttaaaatgacaaggtcttaggaactctgcaccttcattaattttaatcaatatttaacatcaagattgttttcaataaatcatgatctaataatgaaagggggaaactatttgttttaactttcatttcggttttaccctttactcacaagttgaaattcattctcactctttgcaaactattttgaaacatttccaggtaaaattcatataaatattttatttttcctaatttttggaaaaattttagactattacaatctgagttaatagcctagttcctttgttgatccagtgtaaataaatatttctcttttcttgctgtattaaaaaactcagtctctataaccaagtctatatctgtatcgatatctatctgtatctgtatctatctatgtgtatctctatcgatgtatgcatacacaaataatatctgtggaagaattttttttcgtgtagtgtaatatccacagctcttctactttaaccataactcaggttaataacattttattgtcttttgttagttttacctggaaaagaaagcacatcatatacaatattataaaatagaaataaaactaaatatagtgttttagaaggtaacaaagttttatgtttaaggatattaaataaaatctatttcttccagtatattttttcacaatctgtcttaaatggaatctgcagttatcttaacaagttgactactagattttgtagtgtattccaatcagttatctatctgaggccactctttttttaataatctaggcttctgtagacaatgtggaaacatttttaaaatgatgacgccctccttttccttcgtagctaaatcagtacacaaaattctaattatttccttagttttaataataataaagcaatataagattcaccctctgtattcaattctttgttaccaattctgctataattagaatttttgaaattcttagttataacctttatttttgataattgcattt

SEQ ID NO: 703270 - DNA, 1661 bp, Homo sapiens
catagaaagcttactcatcattctcttgacatcataataatggtttattgtctttaaagactgtgatcatatctacttagacatggtcatgagcactttttacaatgcaaacaactggtaatttgaagttcctgggttgtgatggaggtgtgtagtctattctttactcatttggcacaatgaagtaatcagcccagagcaataaattatgtaattaatctcatgaagccaacagttttatgtaaatgctagtgatttatttctttgcacatttgaaaagtttaatttccatttttgctctgaaaatagttttgaagtaaattgatatattaaaatatatatctagcttaataaattattataaatatagtagatatgctaatgttattgtgtatcttcaatccatattttaaagagatgtactttagttattatctttaatatatgcttcactttgtatttgagagaaaaattttatatatcatttaaaggctcatggctaagtgttaccagcaatcacagaatgaatatggatggacattttgggcaaatatgttccaataaaaaaaagaaacaaaatgttgatgtattagtttcatggcatattttcgtctttttttttttttgctttagtaaattcttacttgtcaagaaagtaacacagacatatagaggtatttcgttttgtccagtgcctcctagcagggaagcatgggaggaaaaaagatgtctttgcatctttatttttttatttcaataggttttgggggaacaggtggtgtttgcttacatgaataagtttgtactgaataccagactagaaaaattactgaagaaatggggctgataatataaatacagataaatggcaaagtacttttaattccattatgaattctggttaaatatctccatttctcccattaatgacaactagacaagctggtcatttttaaaaaatcaatttgatgcagtcagagaagaaacataaagaagaatttttttgtcccaggtctacaagatgtccagatagagaagtggccagtatcaggtgctgctttgtccatggcagccattgcttttattagaaaaggggctaaaaggctcagaaaatgttttgagatcttcccgtgtatagacagaaagaggttggagaccaggtcctgtccaggtttggggctctaatggcaccacggtgcaggtaacaccttggacagcttgaacacaatggattgatattttcatgctctggagaaataaatgttatcctagagctctatcascagtgagaaatgccactatatttcatgaatgaaggttaaacaaggacatatttcatatacacattaagatgaactatgaagattcaagaaggcatgattaattaggtaagaggactaatactgatagtattgataagtaaaaatgctaaaaataatatacacctacatactatgaaaatacacaataacactagcatataaatcaggaggaagtgaattgtttcaaaatgtctttcacagttgccaagaagataaaggtgctaaactataatagacttagaagagtcaagtatacatgttttaatctctaaaactgctaatggagtagtaaaaaatatgaagctcttaagataatggagtggcaggtgaaataattaa

SEQ ID NO: 703271 - DNA, 1661 bp, Homo sapiens
catagaaagcttactcatcattctcttgacatcataataatggtttattgtctttaaagactgtgatcatatctacttagacatggtcatgagcactttttacaatgcaaacaactggtaatttgaagttcctgggttgtgatggaggtgtgtagtctattctttactcatttggcacaatgaagtaatcagcccagagcaataaattatgtaattaatctcatgaagccaacagttttatgtaaatgctagtgatttatttctttgcacatttgaaaagtttaatttccatttttgctctgaaaatagttttgaagtaaattgatatattaaaatatatatctagcttaataaattattataaatatagtagatatgctaatgttattgtgtatcttcaatccatattttaaagagatgtactttagttattatctttaatatatgcttcactttgtatttgagagaaaaattttatatatcatttaaaggctcatggctaagtgttaccagcaatcacagaatgaatatggatggacattttgggcaaatatgttccaataaaaaaaagaaacaaaatgttgatgtattagtttcatggcatattttcgtctttttttttttttgctttagtaaattcttacttgtcaagaaagtaacacagacatatagaggtatttcgttttgtccagtgcctcctagcagggaagcatgggaggaaaaaagatgtctttgcatctttatttttttatttcaataggttttgggggaacaggtggtgtttgcttacatgaataagtttgtactgaataccagactagaaaaattactgaagaaatggggctgataatataaatacagataaatggcaaagtacttttaattccattatgaattctggttaaatatctccatttctcccattaatgacaactagacaagctggtcatttttaaaaaatcaatttgatgcagtcagagaagaaacataaagaagaatttttttgtcccaggtctacaagatgtccagatagagaagtggccagtatcaggtgctgctttgtccatggcagccattgcttttattagaaaaggggctaaaaggctcagaaaatgttttgagatcttcccgtgtatagacagaaagaggttggagaccaggtcctgtccaggtttggggctctaatggcaccacggtgcaggtaacaccttggacagcttgaacacaatggattgatattttcatgctctggagaaataaatgttatcctagagctctatcagcagtgagaaatgccactatatttcatgaatgaaggttaaacaaggacatatttcatatacacattaagatgaactatgaagattcaagaaggcatgattaattaggtaagaggactaatactgatagtattgataagtaaaaatgctaaaaataatatacacctacatactatgaaaatacacaataacactagcatataaatcaggaggaagtgaattgtttcaaaatgtctttcacagttgccaagaagataaaggtgctaaactataatagacttagaagagtcaagtatacatgttttaatctctaaaactgctaatggagtagtaaaaaatatgaagctcttargataatggagtggcaggtgaaataattaa

SEQ ID NO: 703272 - DNA, 1661 bp, Homo sapiens
catagaaagcttactcatcattctcttgacatcataataatggtttattgtctttaaagactgtgatcatatctacttagacatggtcatgagcactttttacaatgcaaacaactggtaatttgaagttcctgggttgtgatggaggtgtgtagtctattctttactcatttggcacaatgaagtaatcagcccagagcaataaattatgtaattaatctcatgaagccaacagttttatgtaaatgctagtgatttatttctttgcacatttgaaaagtttaatttccatttttgctctgaaaatagttttgaagtaaattgatatattaaaatatatatctagcttaataaattattataaatatagtagatatgctaatgttattgtgtatcttcaatccatattttaaagagatgtactttagttattatctttaatatatgcttcactttgtatttgagagaaaaattttatatatcatttaaaggctcatggctaagtgttaccagcaatcacagaatgaatatggatggacattttgggcaaatatgttccaataaaaaaaagaaacaaaatgttgatgtattagtttcatggcatattttcgtctttttttttttttgctttagtaaattcttacttgtcaagaaagtaacacagacatatagaggtatttcgttttgtccagtgcctcctagcagggaagcatgggaggaaaaaagatgtctttgcatctttatttttttatttcaataggttttgggggaacaggtggtgtttgcttacatgaataagtttgtactgaataccagactagaaaaattactgaagaaatggggctgataatataaatacagataaatggcaaagtacttttaattccattatgaattctggttaaatatctccatttctcccattaatgacaactagacaagctggtcatttttaaaaaatcaatttgatgcagtcagagaagaaacataaagaagaatttttttgtcccaggtctacaagatgtccagatagagaagtggccagtatcaggtgctgctttgtccatggcagccattgcttttattagaaaaggggctaaaaggctcagaaaatgttttgagatcttcccgtgtatagacagaaagaggttggagaccaggtcctgtccaggtttggggctctaatggcaccacggtgcaggtaacaccttggacagcttgaacacaatggattgatattttcatgctctggagaaataaatgttatcctagagctctatcagcagtgagaaatgccactatatttcatgaatgaaggttaaacaaggacatatttcatatacacattaagatgaactatgaagattcaagaaggcatgattaattaggtaagaggactaatactgatagtattgataagtaaaaatgctaaaaataatatacacctacatactatgaaaatacacaataacactagcatataaatcaggaggaagtgaattgtttcaaaatgtctttcacagttgccaagaagataaaggtgctaaactataatagacttagaagagtcaagtatacatgttttaatctctaaaactgctaatggagtagtaaaaaatatgaagctcttaagataatggagtggcaggtgraataattaa

SEQ ID NO: 703273 - DNA, 996 bp, Homo sapiens
agaagctcaagagtatatagtgttgatgtattctgttctgtggagaaagccaggcatctgtaaaagacaataatgaagaataaaatgaagcagaggagagatgcatagaaaattttttttctgtacgattctatggattacctacatttcccactcactaagtttgatatctcagggcccttataacacatttgagtttctgtcmtttgaaataaaattttttttaattaatgcagtcatcaggagcacagaacatcattattttattaacagtttatctcttagtgattagatcttttgggggcaaagcttcagtctactttctaattgtagaaaaagcagaaccccaaaatttgattttaatctttttaaaaatttttttccgaagtatataaaaatacatgtttattagagaaagacttataatgtacagggaaatataaatgcataaataaaaacaacctgatactccattattacaaaggtccttgttaacagtattttatccctgatatttgtacatttacaatctatgtgtttatttttttttattttcaaaacatgtgcagtactggctattcaatattctattcagtattttttctgtttgacattatactgtaagcctgtaatcccagcattttgggaggccgaggcaggcggatcacttgaggtcaggagtttgagaccagcctggacaacatgctgaaaccatgcccctactaaaaaaaaaaaaaaaaaaaaaaaaaaaaaaattagctgggcatgtaatcccagctacttgggaggcagaggcaggagactcacttgagctcgggaggtggaggtttcagtgagccaagattgtgccgctgcactccagcctaggtgaaagagtgagacttcatcaaagaaaaaaaaaaagcattttatcatttcactaatattatttctaaatatatttttaaatctatagtatagatacattatattgtatttaccaatcctataagatca

SEQ ID NO: 703274 - DNA, 758 bp, Homo sapiens
tccacaattttggcatcaagaaagggaaaatgacaatgttcttcctgaagagaggagaatatgatgttggtgaatactgtaatagaatttgtaatctaccttctaatgtttcaaagccccagagtgaggaggaagttccttgcacatgtagatataaaactaaggcagagggcctgcagccttgctcagcatttggttctccagtaggaaagtgatgttcagagcttgtctggccaacctgcagcagcagaccagcacaattaagagagcaactggtttggtctgatggagagcagatctcatttacaactgcatgtttctttcaattccagagtacatggacattggacatggacattagtttaaggacattggtatggtgggaacaacctgagaataaagatgagatggaaggtgtggcatagactcagggtctgcagaagcagggagcggagaggaagatgcattggcttggaagggtaaggggatggaccaagctaagaaattttggatcacagggtatgaccacacaataaatcrgctaacaatggctgaatgatcaccagctaacacacccaaagattagcttgaagctacagagtctccctcttgcaggtcccgagatcattcaaatatccacaccaagaacacaatatacccaagggtcagcaaattgcagtccacaagctgaatagtgcctgctgcctctttttgtgtgtcttggaagctaaaatgtgtgggttttttttttttttaca

SEQ ID NO: 703275 - DNA, 758 bp, Homo sapiens
tccacaattttggcatcaagaaagggaaaatgacaatgttcttcctgaagagaggagaatatgatgttggtgaatactgtaatagaatttgtaatctaccttctaatgtttcaaagccccagagtgaggaggaagttccttgcacatgtagatataaaactaaggcagagggcctgcagccttgctcagcatttggttctccagtaggaaagtgatgttcagagcttgtctggccaacctgcagcagcagaccagcacaattaagagagcaactggtttggtctgatggagagcagatctcatttacaactgcatgtttctttcaattccagagtacatggacattggacatggacattagtttaaggacattggtatggtgggaacaacctgagaataaagatgagatggaaggtgtggcatagactcagggtctgcagaagcagggagcggagaggaagatgcattggcttggaagggtaaggggatggaccaagctaagaaattttggatcacagggtatgaccacacaataaatcggctaacaatggctgaatgatcaccagctaacacacccaaagattagcttgaagctacagagtctccctcttgcaggtcccragatcattcaaatatccacaccaagaacacaatatacccaagggtcagcaaattgcagtccacaagctgaatagtgcctgctgcctctttttgtgtgtcttggaagctaaaatgtgtgggttttttttttttttaca

SEQ ID NO: 703276 - DNA, 600 bp, Homo sapiens
  misc_feature 95, 132: n = A,T,C or G
atttatatataaaatatatattatatataactatggttatatatatatataatatataaatatagttatatatataatatatatattatatatanctatagttatatatatatataaatatatatatatcanctgaatagcttattgagtattgaagggtgccaagccagtcagttttttataagttaagatactttctcagaatttagaagaaaattatatttaagggtaggggaacctaatatagtaaagaggagacatcactaccaatcttacataaataaaagtattgttggagaacactatgaacaattgtatggcaaaagatkagataacctagatgaagtgaacaaattgctagaaagacacaaactactgagaccaacttaagaaatagaaaattcaaatatagactcaaaaatgctcaacaaaatactagcaaccaaatctggcaacaaaagaattatataccatgatccagtaagttttattccaggaataaaggttggtttaacatgaaaatcaattagcattacatactaaaaaaaaaaaataaaagacacataattatctcaattgaagaagaaaaatatttggcaa

SEQ ID NO: 703277 - DNA, 1048 bp, Homo sapiens
gccagaatttaaaccctccaagattgattcttacacatgtttcctatagtgyccagcactgtgctttctgcttaggacctactgaatgaagaaatgaataaaatgagatgctcgatatttattacatttattttttatttcaatttgatatccattgcttttgttggtaaattccattaacataaaacacagtaaaggctcatacaataaacatggattatagaaagtgctgagaatcattttcttctcaggctctatttaaaatgctcatctacttgcagcgaggatcctgttatagagaaggtctatttttgtaatggaaatggatgactgtcagcatttggattaatagataatcctcttggaaggtgtaaggggaaggagaaagagagtactaaatccttcagcatcaagtacaagctttaataaaggagccaataaaataaaggaattaagaagacacaccaaaagccatattcaggtcagactcaagtgctgttgatttatgctggacctactcttaccctctgcccttgtttgttctctttcttcttgcgcctgtaaactacaaggctctatttctctcattgccataattccaattcttctactttcttgcctggattactgcaacagctaacaaagttcatcttcctgcccccagctgtttgcttatctgattcaccctgcacagcagctgccacagctatcttctaaaatcaaagcattgtgtcccattacttctggacaaatccaggctctctagcatcatcgtcaaagctcttaaaattatgtcctctcctactccccaacctcctcatagctcaggctccagctggaccttcaagagatccccactggggatgtaaagtttctctcactttacaaatggaatcttctgcttggaatgtccatcttgccttctctgacttttcactcttactaattgtttaagagcaagttgaaaggtcgacacatcagagacgtttgacctgacattcctcttccttcctaaatggtttacttttccttatgtggaatctggtag

SEQ ID NO: 703278 - DNA, 1048 bp, Homo sapiens
gccagaatttaaaccctccaagattgattcttacacatgtttcctatagtgcccagcactgtgctttctgcttaggacctactgaatgaagaaatgaataaaatgagatgctcratatttattacatttattttttatttcaatttgatatccattgcttttgttggtaaattccattaacataaaacacagtaaaggctcatacaataaacatggattatagaaagtgctgagaatcattttcttctcaggctctatttaaaatgctcatctacttgcagcgaggatcctgttatagagaaggtctatttttgtaatggaaatggatgactgtcagcatttggattaatagataatcctcttggaaggtgtaaggggaaggagaaagagagtactaaatccttcagcatcaagtacaagctttaataaaggagccaataaaataaaggaattaagaagacacaccaaaagccatattcaggtcagactcaagtgctgttgatttatgctggacctactcttaccctctgcccttgtttgttctctttcttcttgcgcctgtaaactacaaggctctatttctctcattgccataattccaattcttctactttcttgcctggattactgcaacagctaacaaagttcatcttcctgcccccagctgtttgcttatctgattcaccctgcacagcagctgccacagctatcttctaaaatcaaagcattgtgtcccattacttctggacaaatccaggctctctagcatcatcgtcaaagctcttaaaattatgtcctctcctactccccaacctcctcatagctcaggctccagctggaccttcaagagatccccactggggatgtaaagtttctctcactttacaaatggaatcttctgcttggaatgtccatcttgccttctctgacttttcactcttactaattgtttaagagcaagttgaaaggtcgacacatcagagacgtttgacctgacattcctcttccttcctaaatggtttacttttccttatgtggaatctggtag

SEQ ID NO: 703279 - DNA, 625 bp, Homo sapiens
agagatgggtttcactgtattagccaggatggtctccacctcctgaccttgtgatctgcccacctcggcctcccaaagtgctgggattacaggcaggagacaccacacccagccagtgccaggcattttataagcaaagtcctaagcactttacacattaactcatttggtccttataataaccctatgcggtagatgtgaataatattgccaatttgcaggaggtagaaactgtgtgcctcttactgcacaracagaattgagatgtgacttccaacagactggttctatgcccttaaccactacttaacctctaaatcacacactttaattattggattcctgtgctcttagaagggtacggttttttttgtttgttttgctgttgttgttttctgtttttcctatttttctaaactgttggtatggcagttctagtattttgtaaacttttaaagaagttttctttaaagaaccaaaagtaataagcactgaactggaaatcagaaacccttggttctagccccaggcctagaaccactttgctgtggttcttgggaaagtcactccacctctctgagtcttgatttcctttcctttgaactgagaggtttaggccaaattg

SEQ ID NO: 703280 - DNA, 625 bp, Homo sapiens
agagatgggtttcactgtattagccaggatggtctccacctcctgaccttgtgatctgcccacctcggcctcccaaagtgctgggattacaggcaggagacaccacacccagccagtgccaggcattttataagcaaagtcctaagcactttacacattaactcatttggtccttataataaccctatgcggtagatgtgaataatattgccaatttgcaggaggtagaaactgtgtgcctcttactgcacaamcagaattgagatgtgacttccaacagactggttctatgcccttaaccactacttaacctctaaatcacacactttaattattggattcctgtgctcttagaagggtacggttttttttgtttgttttgctgttgttgttttctgtttttcctatttttctaaactgttggtatggcagttctagtattttgtaaacttttaaagaagttttctttaaagaaccaaaagtaataagcactgaactggaaatcagaaacccttggttctagccccaggcctagaaccactttgctgtggttcttgggaaagtcactccacctctctgagtcttgatttcctttcctttgaactgagaggtttaggccaaattg

SEQ ID NO: 703281 - DNA, 625 bp, Homo sapiens
agagatgggtttcactgtattagccaggatggtctccacctcctgaccttgtgatctgcccacctcggcctcccaaagtgctgggattacaggcaggagacaccacacccagccagtgccaggcattttataagcaaagtcctaagcactttacacattaactcatttggtccttataataaccctatgcggtagatgtgaataatattgccaatttgcaggaggtagaaactgtgtgcctcttactgcacaaacagaattgagatgtgacttccaacagactggttctatgcccttaaccactacttaacctctaaatcacacactttaattattggattcctgtgctcttagaagggtamggttttttttgtttgttttgctgttgttgttttctgtttttcctatttttctaaactgttggtatggcagttctagtattttgtaaacttttaaagaagttttctttaaagaaccaaaagtaataagcactgaactggaaatcagaaacccttggttctagccccaggcctagaaccactttgctgtggttcttgggaaagtcactccacctctctgagtcttgatttcctttcctttgaactgagaggtttaggccaaattg

SEQ ID NO: 703282 - DNA, 625 bp, Homo sapiens
agagatgggtttcactgtattagccaggatggtctccacctcctgaccttgtgatctgcccacctcggcctcccaaagtgctgggattacaggcaggagacaccacacccagccagtgccaggcattttataagcaaagtcctaagcactttacacattaactcatttggtccttataataaccctatgcggtagatgtgaataatattgccaatttgcaggaggtagaaactgtgtgcctcttactgcacaaacagaattgagatgtgacttccaacagactggttctatgcccttaaccactacttaacctctaaatcacacactttaattattggattcctgtgctcttagaagggtacggttttttttgtttgttttgctgttgttgttttctgtttttcctatttttctaaactgttggyatggcagttctagtattttgtaaacttttaaagaagttttctttaaagaaccaaaagtaataagcactgaactggaaatcagaaacccttggttctagccccaggcctagaaccactttgctgtggttcttgggaaagtcactccacctctctgagtcttgatttcctttcctttgaactgagaggtttaggccaaattg

SEQ ID NO: 703283 - DNA, 623 bp, Homo sapiens
agagactttacatgttttctttgtttttctactttttacgagttttggttgtttaaatggaaagcatatgcacaacgaaacaaacttgaacagctactccagaagtcaccttccaaatttggatttctttcctccacaaaagaataaatgattaagatgcttaaaaatacttaagcagctaaattctatctcagatgtatctgttaactgtatgtgattttatgttttatttttaaataacattttataaactgtaagaaatattttaaaagtttataaatgttgtatggattaataatttatgaaaaaaaccacaaaaacktagtagccacttcctaggataaacatagaaacatatatttgttttggatttgaaaatttcaatggcctggacatatacaattttcataaagtggaagtatgtagaaagcgttttccttcattttattgtgtcaggtttaaatagacttttaaagaataacagaaactatggttgaaaatataaatatctactttcatgttcagcactaacagacacagtttgaaagttatgactcctgtattatatcaaaaaattagaaaaaaatcaatgtcttgaacatgtcagaaaaaatgagatcaca

SEQ ID NO: 703284 - DNA, 616 bp, Homo sapiens
ctagcaaacagtaatcttcacacaaatgtttatatagcaaagattaaacacgatattctctgggctcactgacatgcatatctcagtgtgatataaagcctcaacaaagatttttctgtataaaatgaatagacagtttttcttagaagttttagattacatgaaagcagaataacacaatggtgcttacagcaggactcaacaaagtgatagtccctgctcaggattggacagagataratgatcttcaactgtaagagtaaaatattccatttttctcatggatgtgctgtatgtatttacaattaaaatcacaataatagaaacactgaaattttacaaaagtaaatatatatatatagcttacacaaattataagcactatcattatttaagaattaaaaaaatactaagtgcagtctaagtttcatgtgtgttttagtttttcttaacgattccagtggtatgaatgaatatatatatatatatatatatatatatatatatatatatgctttgaaaattgattttcaaatacaaaatggggtgttaagatcctatcccttgatcacataaatataaacaaaaatagggtcatttacaatattcatatgtt

SEQ ID NO: 703285 - DNA, 1012 bp, Homo sapiens
tcattgatgggcatttgggtttgttccaagtctttgctattgtgaacagtgctgcaataaacatacgtgtgcatgtgtctttatagtagaatggtttataatcctttgggtgtatacccattaatgggattgctgagtcaaatggtatttctgattctagatccttgaggaattgccacagttttccacaatagttgaattaatttacactcccaccaacattgtaaaagcatccctatttctccaccatcctctccagcaactgcttcctgactttttaatgatcgtcattctaactagtgtgagatagtatctcattgtagtattgattggcatttctctaatgaccattgatgatgagctttttttcatgtgtttgttggccacataagtgtctttttttgagaagtgtctttttaattttttatcttcaaagagaatttaatatacgtataagtccaaataaaattcatcaagggaaacgtgtttgtctttcacttctaagtgtttacaatctaaaacaagtatgacattagaagcttccaattatttcaatataaattaatattttagtattattttaattttaataaatttcracactagtttattcaattataataaattttaatattgatttgctgctgtggctcattttgtacattaactcattgtccttttaaaattttgtctgctttcctatgtatactacactggatttcccaagctcccctgtagataaatgtaggcataacacagttcagaccaatgagaagaaaacaaacctgctggtattgcttcgtgtaacattttgtttctgtccttctaacatgaagatatgacatgtgtggatacaaatcattttgcctttccaaatacttgaaatcactccctttgctcaaaatgtattatgactaaaaatgtgaacttcagaaacccagaacaaactgagccagggttttactcccagaaattcaaatcctctgtgtattgacacagaaaatttagctca

SEQ ID NO: 703286 - DNA, 1012 bp, Homo sapiens
tcattgatgggcatttgggtttgttccaagtctttgctattgtgaacagtgctgcaataaacatacgtgtgcatgtgtctttatagtagaatggtttataatcctttgggtgtatacccattaatgggattgctgagtcaaatggtatttctgattctagatccttgaggaattgccacagttttccacaatagttgaattaatttacactcccaccaacattgtaaaagcatccctatttctccaccatcctctccagcaactgcttcctgactttttaatgatcgtcattctaactagtgtgagatagtatctcattgtagtattgattggcatttctctaatgaccattgatgatgagctttttttcatgtgtttgttggccacataagtgtctttttttgagaagtgtctttttaattttttatcttcaaagagaatttaatatacgtataagtccaaataaaattcatcaagggaaacgtgtttgtctttcacttctaagtgtttacaatctaaaacaagtatgacattagaagcttccaattatttcaatataaattaatattttagtattattttaattttaataaatttcaacactagtttattcaattataatamattttaatattgatttgctgctgtggctcattttgtacattaactcattgtccttttaaaattttgtctgctttcctatgtatactacactggatttcccaagctcccctgtagataaatgtaggcataacacagttcagaccaatgagaagaaaacaaacctgctggtattgcttcgtgtaacattttgtttctgtccttctaacatgaagatatgacatgtgtggatacaaatcattttgcctttccaaatacttgaaatcactccctttgctcaaaatgtattatgactaaaaatgtgaacttcagaaacccagaacaaactgagccagggttttactcccagaaattcaaatcctctgtgtattgacacagaaaatttagctca

SEQ ID NO: 703287 - DNA, 981 bp, Homo sapiens
tagccttgaaaaggggttccacactttctttatcaagacttgatgtggcttgttttataatttcagtaagtgtcaggtgaagtatcaagggattacagatatgaggggctgaaaccagtcaatgtcttattttggggactggctttgtccaggcctcagaaaatatggatggctgggtcatgttgtactcaactctacttgttcattaatttaacagctggatatgattgtattgttttgttgcatttcaagtatacacacacacacacacacacacacacacacacacccatacacaaagagataataaaaataaacaaatgaaataaattgtgtttagtgataaatgttatgaataaaatcacatagggttacacagtgaatggtagggtgattttcgatatattaagttctatgttcatggaaaatctttctaacaaagggataagaaaaaaatgaatagaaagtaaaaaaaaaagggggagcataatgtcacacatatctggactttatttcccagcataccttgtagttagtgaagttatctacctaaatattggccaatggaatatgagcagtagtgctgtacacagttatcaggatgagcacttctgggaaaatacgtctttcatatgctctttttctgtcttttagctgaacagagaagttctgattacctattggccactggaatcatggaagggggaagaatcatgtgcttctgaatgtgtagatctctttcatctaatggaattgcaccacacctaaagcaagaaacaaactttttgttactctcagcaactgatattttggagttattttatataccattttgccacgtcagataaatacagatattagtgtgtgaacataggaaagttactttattgtatgtctcagttttcccatttggaaagtaggtgaatgatagtatatttccacaagattgttatgaggcytaaatgaattaatgcctgtaaa

SEQ ID NO: 703288 - DNA, 1033 bp, Homo sapiens
tcatcacctggggtctagcagctaaggctggaaaaatgcatgcagctgtcactgatattggccagtgagaggaaagctgaatatgtagagcttctacccctataaccattcctggctacctcctttccctacttccctttacccacttccacccccagcatgcaacacaggtaccgaacacctgtgcacatatccattcactcacacgtacacacacatacacacaaactcttcattctgaaaatattttattattttccagttgttcaggaacctttcccaggatgttgtaaccaagatttaatcaccacagtagatttagagcagatcagtcagcccacttgtcttctctcttctttagggrgaggctaggcagtgaacacatcatgtatgcaatgagaaaataaccaactggtaggatgggggaggggaggggaggcagggaataggcacaaatggaattctatcctggctgtccttctcaggtctatctatatttaattttgtcttctctatattctccttccattgccacagagggcagagacaatggggctgagaaactgtaataactgtcactaacagcaaagtagcttagtacttcaagaggtcaggagttgcagtgtggtgttagaccagtcagactcctggctgagagtcaatgcctaatattggctcccagtggcccctgagcactgtctcagggtccacattccaggaatattcagatattcctggaatgacaagaattggaaccctgctgtccatagacacttctccctgccctttggtgaaaggaaagacttgggccacttaataccttagtatacatgtgatcaagggcaaaagcaaagggattctatccttatagtctaagacctgaaattctccctccaattatatctgaaattggcagggaagaagatgctgtcctcccatgtgatctaacagctaaaacccctagggagttccttcagctttcaccaccctattctgcaagagacctaaatcagatgtcctatgaggtgacatg

SEQ ID NO: 703289 - DNA, 1033 bp, Homo sapiens
tcatcacctggggtctagcagctaaggctggaaaaatgcatgcagctgtcactgatattggccagtgagaggaaagctgaatatgtagagcttctacccctataaccattcctggctacctcctttccctacttccctttacccacttccacccccagcatgcaacacaggtaccgaacacctgtgcacatatccattcactcacacgtacacacacatacacacaaactcttcattctgaaaatattttattattttccagttgttcaggaacctttcccaggatgttgtaaccaagatttaatcaccacagtagatttagagcagatcagtcagcccacttgtcttctctcttctttagggggaggctaggcagtgaacacatcaygtatgcaatgagaaaataaccaactggtaggatgggggaggggaggggaggcagggaataggcacaaatggaattctatcctggctgtccttctcaggtctatctatatttaattttgtcttctctatattctccttccattgccacagagggcagagacaatggggctgagaaactgtaataactgtcactaacagcaaagtagcttagtacttcaagaggtcaggagttgcagtgtggtgttagaccagtcagactcctggctgagagtcaatgcctaatattggctcccagtggcccctgagcactgtctcagggtccacattccaggaatattcagatattcctggaatgacaagaattggaaccctgctgtccatagacacttctccctgccctttggtgaaaggaaagacttgggccacttaataccttagtatacatgtgatcaagggcaaaagcaaagggattctatccttatagtctaagacctgaaattctccctccaattatatctgaaattggcagggaagaagatgctgtcctcccatgtgatctaacagctaaaacccctagggagttccttcagctttcaccaccctattctgcaagagacctaaatcagatgtcctatgaggtgacatg

SEQ ID NO: 703290 - DNA, 2060 bp, Homo sapiens
tggtctcatcatgaagccatgttgtgtaactgctgttgggatctcaagaccactgactcaccttcttatgcctcatggttagaacacagagttcacctaatgtgccacggtgtcctcctgcctctgccacacgcttctgattggggaggaaggagcctagagaggttacacacaacacatcccagctctgccacctactaggatatcacttttcaggttgcagcttaaatgtcactccactcccccagaatctcaagcaggattagtgtttactgatttgggcttccattgttccctggactcacccaggcatagcaccaaccacactttagtgctattgcttgtttaattactgatcagctttactaaactgtctcatcctaaggcaaccgtccatcagttctgcgacctaacaaccgcttggcctcccgatttctcctgtccgtygctgataaactgcttgaaagaaaagtctacattttgcctccacttggtcctctctctcctccctctcagtccacaccccggctccaggctccatcgctctactgaaagtgctctttttgtcctcagcctccctgatccttttgtgcacctggccctgtgggccccccttccttgaacctcattcttcttggctttcatgacgtcctctctcctggtctcttcctgggaacttagagatctaggccttctcctctttctcctcttctccctctgtctcttcctcttcttcttgcctcaagtccctctgtgctgactctgctccttcttttccctgatcctttcccttaggccacctcacccacaactgggtttcacccaaatccttgagggggatgctccaggtgggcccgttgcacgtggccgtgcagggtgttcagtgtacaggcacaccctgccaggaaacaaggaagaggctccctctctgcaatttgtgtaaaggccccgcaggttagctgtgaccctggcatccatacctcctgccccatgcctctcccaagctccagccctgctctcctagctgctcacaggatagttccctaaacactgctggcagaacctgcccagcctaggccaggaaagaggctgacagagacagagccggctgactggatgatctggagataggttcttggccactctgttcttccatttcaccccccttttcaaagactcagtcttagccaccctgccctgagcccatgttagatggaaaaaaatagtggtgagcagggagcagaaggctggagagtagtaagtgcaaaagaacaagggggctgggaagaaaaggagcaaatggggcaaagcagacaggaggggaggtcagctggcttctcagctgccaaagctcttccaggcacgtcatctcatttggtcctcatgaaaactctctaagtggatattactatttttctcattctacagctgaggagagaccaagctagtaaaggctgctcaagatcactaagccagcagtggggaatattgtgaaatattgaaatattttattatttcatagagacagggtcttgttatactgcccaggctggtctcaaattcctggccataagcgattctcccacctcaacctctcaaagtgctgggattacaggcatgagccacctggccgaatccaggtcttttgacaccaagtgccctattcatccctttgccctcccctaatctctgggcagatttgagtgaggcgataggctgggggatatggcattgggatactggggttgcacctgaggagaagccaacagcaccagggtcagaatgggcaaaggacataagcacaggcaaggccattcctggtggggctgggccagggagctgaggggctcctagaagggccaggttccccgacttctctgagcttcagcgcctggaggtttctgggcagccacacgcttctcagcgctgacccttcctcttcctttatccttggaaaataacccctagggcacaaacccaaccgaagcaatgatactaagtgtcagggcattcctcgactctcccacccctggggaagagggcctggcccaagccctgag

SEQ ID NO: 703291 - DNA, 2060 bp, Homo sapiens
tggtctcatcatgaagccatgttgtgtaactgctgttgggatctcaagaccactgactcaccttcttatgcctcatggttagaacacagagttcacctaatgtgccacggtgtcctcctgcctctgccacacgcttctgattggggaggaaggagcctagagaggttacacacaacacatcccagctctgccacctactaggatatcacttttcaggttgcagcttaaatgtcactccactcccccagaatctcaagcaggattagtgtttactgatttgggcttccattgttccctggactcacccaggcatagcaccaaccacactttagtgctattgcttgtttaattactgatcagctttactaaactgtctcatcctaaggcaaccgtccatcagttctgcgacctaacaaccgcttggcctcccgatttctcctgtccgtcgctgataaactgcttgaaagaaaagtctacattttgcctccacttggtcctctctctcctccctctcagtccacacccsggctccaggctccatcgctctactgaaagtgctctttttgtcctcagcctccctgatccttttgtgcacctggccctgtgggccccccttccttgaacctcattcttcttggctttcatgacgtcctctctcctggtctcttcctgggaacttagagatctaggccttctcctctttctcctcttctccctctgtctcttcctcttcttcttgcctcaagtccctctgtgctgactctgctccttcttttccctgatcctttcccttaggccacctcacccacaactgggtttcacccaaatccttgagggggatgctccaggtgggcccgttgcacgtggccgtgcagggtgttcagtgtacaggcacaccctgccaggaaacaaggaagaggctccctctctgcaatttgtgtaaaggccccgcaggttagctgtgaccctggcatccatacctcctgccccatgcctctcccaagctccagccctgctctcctagctgctcacaggatagttccctaaacactgctggcagaacctgcccagcctaggccaggaaagaggctgacagagacagagccggctgactggatgatctggagataggttcttggccactctgttcttccatttcaccccccttttcaaagactcagtcttagccaccctgccctgagcccatgttagatggaaaaaaatagtggtgagcagggagcagaaggctggagagtagtaagtgcaaaagaacaagggggctgggaagaaaaggagcaaatggggcaaagcagacaggaggggaggtcagctggcttctcagctgccaaagctcttccaggcacgtcatctcatttggtcctcatgaaaactctctaagtggatattactatttttctcattctacagctgaggagagaccaagctagtaaaggctgctcaagatcactaagccagcagtggggaatattgtgaaatattgaaatattttattatttcatagagacagggtcttgttatactgcccaggctggtctcaaattcctggccataagcgattctcccacctcaacctctcaaagtgctgggattacaggcatgagccacctggccgaatccaggtcttttgacaccaagtgccctattcatccctttgccctcccctaatctctgggcagatttgagtgaggcgataggctgggggatatggcattgggatactggggttgcacctgaggagaagccaacagcaccagggtcagaatgggcaaaggacataagcacaggcaaggccattcctggtggggctgggccagggagctgaggggctcctagaagggccaggttccccgacttctctgagcttcagcgcctggaggtttctgggcagccacacgcttctcagcgctgacccttcctcttcctttatccttggaaaataacccctagggcacaaacccaaccgaagcaatgatactaagtgtcagggcattcctcgactctcccacccctggggaagagggcctggcccaagccctgag

SEQ ID NO: 703292 - DNA, 2291 bp, Homo sapiens
  misc_feature 1952, 1953, 1954, 1955, 1956, 1957, 1958, 1959, 1960, 1961,1962, 1963, 1964, 1965, 1966, 1967, 1968, 1969, 1970, 1971,1972, 1973, 1974, 1975, 1976, 1977, 1978, 1979, 1980, 1981,1982, 1983, 1984, 1985, 1986, 1987, 1988, 1989, 1990: n = A,T,C or G
  misc_feature 1991, 1992, 1993, 1994, 1995, 1996, 1997, 1998, 1999, 2000,2001, 2002, 2003, 2004, 2005, 2006, 2007, 2008, 2009, 2010,2011, 2012, 2013, 2014, 2015, 2016, 2017, 2018, 2019, 2020,2021, 2022, 2023, 2024, 2025, 2026, 2027, 2028, 2029: n = A,T,C or G
  misc_feature 2030, 2031, 2032, 2033, 2034, 2035, 2036, 2037, 2038, 2039,2040, 2041, 2042, 2043, 2044, 2045, 2046, 2047, 2048, 2049,2050, 2051, 2094: n = A,T,C or G
tgaagctgactgaacccatgaacacaaattgcagctgtgatccatggatcaggaaaccactactgctccttgtggttcaactgtctcacaatactcaatacctacaaagcaaatgactggacactggacactgctccagaaaaatcccacagcctcatgaccagacgtgctagcaggaacaatcaaagcagcagaggagggtcttcacctcacttccactttccgaatcgtattcatctgcatctaattagtgcgacataattcacttcctagctgcaaggacatctgggaaatgcactttttagctctttggtttctgaagcagaaaggtaccaatttggaatggagctgaatgccaatccattccaactactgcctttggattttgcagccagactgcctgggtttgaattctggctttgccatttatttagctgtgagaccttaaggaaggtagtttacctttctgagcctcagtttcttcacctgtaaaatgaggattgtaatactatccgtctcatagggttgttgttaggattaagtgaattaatatatgtaatgtgcttagcacagtgcctgacacatagaaagtgctcagtaaatactggttactggccaggcgyggtggctcatgcctgtaatcccagcactttgggaggccaaggtgggtggatcacctgaggtcaggagtttgagactagcttggccaacatggtgaaaccccatctctactaaaaatacaaaaattagccaggcatggtggtgcacgcctgtaatcccagctacttgggaggctgaagcaggagaatcacttgaacctgggaggcagaggttgcagtgagctgagttcgtgccattgcactctagcctgggtgacaagagtgaaactctgtcccccccaaaaaaaaccaaatactggttattatggtaattgccattgttatatgaccaatccaggatgacaccaggatgaagaaaacagggtaggctgggtgcggtggctcacgcctggaatcccaggactttcagaggctgaggtgggcagatcacctgaggtcagtagtttgagaccagcctggccaacatggtgaaccccccatctctactaaacatacaaaaatggttgggtgtggtggcgcatgcctgtagtcccagctacttgggaggctgaggcaggggaatcacttgaacccagcaggtggaggttgcagtgagctgagatcacgccattgcactccagccttggcaacaagagtgaaactgtctcaaaacaaaacaaaacaaacaaacaaaaaacaataacacaaaccaaagaaacaaaaaaatagggtacctgtcttcaaggcatttccaggctgatggggaagatgacataaatagctaagtatgccacatgatgaaatgaaacaaaggcagttggaaaatatagcacggttctgaaactcaagagaggctagggctggaggtaaatattgagataccagctcagaggtagcaacagagtcagggaataaaaataagattgtccatggccaggcacggtggctcacacttgtagtcccagcactttgggaagctgaggtgggtggatcacttgaggtcaagagtccaaaaccagccttggcaacacggtgaaaccctgtctctactaaaatactaaaaattagctgggcatggtggcatgcacctgtaatcccagctactcagtaggctgaggcaggagaatcgcttgaacccgggaaggagaggtggcagtgagccgtgatggtgccactgcactccagcctgggcgacagagtgagactctgtctcaattaaaaaaaaataaaaaaagaaatcaagatgcagagctggataattttacatatataaaacataatgaaatgtgcttgtatatgtctaattttaaaaggtatttaacagtggttacttctagggagtggagaagggannnnnnnnnnnnnnnnnnnnnnnnnnnnnnnnnnnnnnnnnnnnnnnnnnnnnnnnnnnnnnnnnnnnnnnnnnnnnnnnnnnnnnnnnnnnnnnnnnnnagaacaggtattaggggaccaccagggttcaatgcctcactanatccccagagtccaccatgcacactcttcctcaccttgccatgttccaaacacctagtccctcctccatcctgtgcctgagacagggactggttcaccctagatgcccaatgtttgctgaatgactgaacaaatgaaattgacttttctggaatatgtattgtttttccagatcagctagaaagagtttgaggacaa

SEQ ID NO: 703293 - DNA, 1106 bp, Homo sapiens
ttgctgaaggttaaagtgagtagtgcctattagacactgaagtggaaccacagagctcttggagtcatccatttcaacaaaacatttgcgcatgatagagctcatacgtatttcattaaaacttttttcccattgctatggtgcattttacacgttaatggacttacatctcttttccacttytacataacttttctataatgaaaacatcatttgcagttggcctgaaaaaatgaccttttaagtatcttagtagcatattgtgatccaaataagaagttaaacttgtgaagtagaaaaattaattgtccttaaaaggtgagattagtcacccccctccccccgtgataatttcttgttccaatattggttaggaaaattttgtgaacttactgagatttaaagatacaagagaaaaatacctgccaaatttcctataccttcttatttctcaaacagtctaggctcagagttgagtgggtggccttatgttgaaagtacagctatagttttctaaaataatttaagccaatagttacaaacccacttttgaaagaaaaaaaaataaccttttcaactgccggcatttaaatatctgttggtatctaaaagtcaaagccaagcaggaattattgtttatctggacaacagcttaattacagatataataggcacagccttacagtggtgtgagatagaaccaaagtaagacttctcatttccactatcttgtttctctatgattcagtttactcatctgtaaaatcaatctaatgagtagtctagaagaaatgttctttccaattgttatttaatattttgagctctttaaagaggcaagtacaatattggcgctggcagagctactaattgttcttgtatatcccattagccttgcacgaatactgattgcttgtgcagcagaaagtcagaaatgagggcatgtgcagggatgaccatcttagaagaatggctttcagaaaaaaaaaaaaattgccatgattcaaatcttgtgttaaaaaggagccttttcctccttctggaagttgctctgattaaatttttaagcattaaaatatgctgccccattttctaataatgcagta

SEQ ID NO: 703294 - DNA, 950 bp, Homo sapiens
gtaactgcattggaaaattggatgcccttaggactgaacttgctgtgtacatatagactcttgctaaaaaatgagatctgtatgtatccatatacatatgtgttatatgaatgaactggtgagagtgctatttataggcagtgaaagaagattaatattgatattctccctgtcattcttggtatgattttttaaataaatttgtaatcttagaatactcggattatatcactcttyagctaattcttgattcttatattatttcacttgagcatcagcatttagtggttaatgagacaatttgttgtgtttatggtgtgaagatcatttcttttcctgataattgttcaataagcagtttaaatcatgtggacaaccttcagttcattagcaaactgcttcagatggtcaattatggagagcgtttacttccacttgctgattgaagagcgatgaagtattgtttattactttaggtggaaaataaacactttggtcatttagctgtcaatatttagaaagaaaggttggtggagtaagtatagtcatgtacttctgaattctggtctacatgcaatctaaacctggcatgtgctaactttccaccgttttgcatataggtgaggaaggaggatggggaactgtgcaaaccgacaattcagctttctaatcattcccatacctcccccagtgctcatcagttccccttgttaagctacgtcacagctctattacctttccttgcttttaagtacccatcacacatatcactgatccctaagtttagagagacctacataacacaggcatgtaacacacaaatgacttgtggaaataagtaatagccctgcctaaatacagtaatagggctgacacctgcagcttactagtaccagaaatgataacacaatagtgacagctgattagattttttaatttctatcttagat

SEQ ID NO: 703295 - DNA, 3105 bp, Homo sapiens
  misc_feature 1024, 1025, 1026, 1027, 1028, 1029, 1030, 1031, 1032, 1033,1034, 1035, 1036, 1037, 1038, 1039, 1040, 1041, 1042, 1043,1044, 1045, 1046, 1047, 1048, 1049, 1050, 1051, 1052, 1053,1054, 1055, 1056, 1057, 1058, 1059, 1060, 1061, 1062: n = A,T,C or G
  misc_feature 1063, 1064, 1065, 1066, 1067, 1068, 1069, 1070, 1071, 1072,1073, 1074, 1075, 1076, 1077, 1078, 1079, 1080, 1081, 1082,1083, 1084, 1085, 1086, 1087, 1088, 1089, 1090, 1091, 1092,1093, 1094, 1095, 1096, 1097, 1098, 1099, 1100, 1101: n = A,T,C or G
  misc_feature 1102, 1103, 1104, 1105, 1106, 1107, 1108, 1109, 1110, 1111,1112, 1113, 1114, 1115, 1116, 1117, 1118, 1119, 1120, 1121,1122, 1123: n = A,T,C or G
taaaagtgtttggtacctcccccctctctcgcttgctcctacatttgctatacaaagtgcctgctcccgctttgacaccctctaccatgattgtaagctttctgaggcttccctagaacgcgagcagatgccaggaacatgcttcctgtaaagcctgcagaaccgtgagccaattaaacctcttttctttataaatcactcagtctcaggtatttctttatagtaaggcaagaacagcctaacacagtgggatgtttacattttagtgtttgctcagatttggggcaagccaaaagtcaggagcctgtggggaggagagatgtctgattaaatcttgatcaagccaagtcagtgggcaagaaatgggcaattgtgagcatctggccgggatctgcaacctcatgaaaagtatataccatcaaaaggctaactacttgtttgtcacataaattcttataaaaagcttagtggagccaagaagcaagctaagtataataagagaaactcttcttaccatttgtatcactaatgagcacataattgcagctagtcatgtaagtctcctacaaatcagcgtaaggttaattaagagagttgagacacttaggtgaaagtcacttttgcttatagtaaagaacttatctatcttacagacacatatcacttacattatgtatttgttatattaatatatttaatatatttaaaaaacattgtaaaatgatgatctggcaatatccctagaagaacctcattgaaatacttgagatttattggtcatttgtctttacaaaattgagatttgaaaagctttaaaggaggacattctaccaaagcataactcataaaacagaagataaaagtatgagccatggaattatagagctggaaaagatctagccctactgtttcattttcaaatgaggaaattgagggttattctaggggggttgtttttttaagtcatacagtaagttggtgcagacgggaggagtagcaatcagatctctgagctcttttcctnnnnnnnnnnnnnnnnnnnnnnnnnnnnnnnnnnnnnnnnnnnnnnnnnnnnnnnnnnnnnnnnnnnnnnnnnnnnnnnnnnnnnnnnnnnnnnnnnnnntccacttgatgtcatgtgttcaacatcattcttgtgtttcacacagctttaatccaaagaggagaatgatcaagtagtaggcagaactggagcgggtccttcctggtgtcaaaagacaaaattataacaaattcagtttaaaaattgtatttgacttttgtttgcaatgctaggatgaggtaatactacattttataaagtagaatcagtgttcccatgagctaagcaagaggagatgggtttatagacagaaaagagttgaggaaagcagaaatagatgacaaaaagcagactggttgttttaaagttactttccttctaaaggttaaagcagaggggacttcctaatcctgccagctaaaactggcttgtttggggatttggccattatctctcactctcctggtttcttggaaggtcagataaacaacttactttcggcttggtgatgtggcaccttagcatgactgactccattttaattgggtctgttgggcctagttcaggagctcagtgctagccaatggcttcctatacattttctttaacaatttcccccttttggtcatgctcccccaggggcattagccctaagttaccaccattctgggtttctgaagtcaacatgccattcatagcttatagtgtcctcataatcatgcatttctttgagtttttgccattctattaggttggtgcaaaataattgtggtttttgccattgcttttaatggcaaaaaccgtgattagtgttatacaccgactgaatagctgaatagagaccatttgaagtttgagagatggctgcatgcaaacatttaaaacttttgagggaatgcagtataccagggagactgctattatcctcacaaatagtttctgaattttggcgataatgccaagratattaggaatgccaagagtttggagtatgcaccttagccagggtcttaatgaaccaaaccaactaaaattgaatagaacaaagaatgagccagaaaaggaatctacccattttaaccaagtagccaatttgctaactttttgcaatggagtctctacaatactttctatatttatacatgtgcaataagaagtgtcagcaaggcagggagtaaaaacatgtgagtctagaagttttaccctataaaagggaacactagtacaatttgaacagcaattgcattagggatattgccaaagttacccactgggtggactaaaggatcccttaggttttgtaaagatctgggtttgacatgaccaatctgatttaattttgtaagttacttgaagaagctactgattataaaattactacaagtctatcctgctgagcaaaaaatggtaggcataaataagaaaaaaattaagagggctaagagtttcattatgatacagagtcttgttttggcatctgggcacaagctgtctgtaagagttaaagaaagaggaaagaaacatgacaagtggctcaactgtcaaagacagggtttattttggagaataaatattttggagaggggcttctggctgatttttgtcaggaacattctctcttacagatttggcaccaaatataagagttaaagaaagaggaaagaaacacgaaaagtagctcaacagtcaaaggtttattttggagactaaacctgagaggggcttctggccaattttggtcaggagcattctctcttagggactaagagtatttattagttttagggtgagagagctttatcacaggcttggaatgtttctgtgtaggggagaagtttatggcagggttggaatgtctctggtcagaggggaggttatcttggggctaacatctctctggccagaggggaggttatatgagggctggcatgtctcttgccgggaaggggtttggaatgtttttggtcagagatgttatttgtggtttgtgatcaggctgaccttagccattaggctgatgtcctttggatttaggcagtttt

SEQ ID NO: 703296 - DNA, 574 bp, Homo sapiens
tagaggaatctctacatctctgttcccctttgtcttacatgactgatgacagttgtgcgacttgggccactctcatatatgtacctaaagttatctacaattccaggatttagttctccctttttcagtgggaagccagggattgagctagatgatataggtataaccgaatcttctcatttccataagaagagataaaaaggaaataacttgtgacttttggtattttagctttcataaggaagacatttggtaactccttgcaattgatcatatcatatcaatgtctcagaacccattagctgagaagggaagatttgattgatagagtagacataaactttagatgtctctgatccaaaatttgtgatacttcataaggccaatacatagtcctyagattgtttaatgtagtctttaattattcagtgttctcagaagcattttcatcatgaagaatttcttcatgagtttccatcctgtgatttttcagctgtaatcattgtgcattgaatgacttgattatcataattcacatatgatgtaggggcattgtgaactctacatttattca

SEQ ID NO: 703297 - DNA, 1325 bp, Homo sapiens
ggaagcgtgaagcatgagctttaatcagtttacagagccgctgacctaattttacatctgcaataagatcactatgaattctctgcttccctatggaggataaagctctgccttccccctcccctctgcagtctttctttgtgatggacgttagagagcctggcaggttctgttccacactgcatctctccaagagcaaatttatttatatattaattttatataaaaaagatttctcatagggagccagagattgaatcacaggcagaaacctgatttgaggttgaaggcaggatggcagcaagcaatgtcaaagagcaaaagcgttgggggcaagaagtgagcagggattggaaatttgcttccaaagagctctgtacctctctccctctggtgtctgacacactggcacagcttgcgtattagttttctatgcctgtgtaacaaatgatcacagatgtagtgacttaaaacaatacccatttatgatctcacagtttctgtaggtcaggagtctggggccctgctgagctaggttctctgcttagagtctcacaaggttgagatcaaggtgttggttgggctgtgttcttatttggaggatctactagggaaggattcacttccaagtatggtcctcccacccgccgcccctggttgttcacagaattcatttccttttggtcgcagaattaatggcagcttgcctcttcgaagccagcaagggagagggagaatctttgctgcttagtctctgaccccaggaccctcttttaaaggacttccctgattaggtcaggcccacctatgataatctcttttgattaaagccacctgctgagagattttaattatatctacaaaatcttgtcaycattgctatattctgttaataagaagcaagtaacaggttccacacccattcaaaaggagggagttatatgagagtgtgactcattgagtgtcacctatgggtgtgtcctccatacctcatcaatgctccaagatgcccagggtccccaaaaatgtcaccgttaactccaccctattattttaagctattaaatgtggtgaaaggaacaggaaaagaagtgtctttcagaatagcttacatttccttcctgcttggcagaatcatttgtgagttcacataaatgggttcatgcagataataaccaagaaatgggaagacattaattagaattgatttacaattacacacctcactcaagcccattagttacattctgtttttcaaaattgctttcattttgtgagtgtgccagacttttaaagatttggtaagacttgatgtcagccttctc

SEQ ID NO: 703298 - DNA, 632 bp, Homo sapiens
ttgcttcgttctcattctgtcttgtctgccaccatgtaagatgtgcctttcgccttctgccatgattgcaaggcctccccagccacgtggaactgtgagttcattaaacctctttttatttataaattacccattcttgggtgtgtcttcattagcagcatgaaaatggactaatacagcatcttagctacatgacctgcatctcacaataattttaatcctgcaacacaaagagaaggttcagttacatttcgataattcaagaagagracacgcatgatggctcacacctgtaatcccagtgcttcaggagtgtcaggcgggaggctcacttgaggccaggagtttgagaccagcctgggcaacacagaaagcccccaactctacaaaatacaaaaaaaaaaaaatgagctgggcatggtggcctgtgcctataataccagctacttgggaggctgtgtgaggaggattgcttgagcccgggagtttgaggttatagtgagctatgattgtgccactgcactccagcctgggtgacagagcaagaccctgtctctaaaaaaaagtaataattcaaggagaaaggaaaagtagttgccattctgacattgatcaggttaaccttcagtcaa

SEQ ID NO: 703299 - DNA, 609 bp, Homo sapiens
gaaggcctttcatcctgactaccgatataaatatcatcaactgtgattttcttccaagtcattgtctggcatgggatgttatcaagtgagtttagctgtactttaattttgggggccagtaacttaaaactacacacacacacacacctcatttttagagtgttcgcttatttggctaactaaaaactgttttactcacwttatgcaacaaaatttttctgtaccaaaataaccctgctaggtattatgaccattatttcctaaaataatgatactttaatgaaaaaaaacacataaccaagattaaaataaatatatttgctttgaaatatttaaaactaggtgttactaccttacatcatattagtaattatgtattactttaatttttgtgtcagttaaaatttaactattaactatctttaatgatttaatgaaatagttaatgatctaatgaaacagttatttttcaggactgaaaaataaaatttgaataaaatcacttttcagactttcattttctagtctgacatgaatggactttggtagtcttcactcctgtgcttataacaagaaaaaagctgaacaaactgaaaatcatagctcttt

SEQ ID NO: 703300 - DNA, 634 bp, Homo sapiens
agaatagagttccagacagggagaacagcaagtgcaatgtccctgaaatggagaatgcatagtgaattccaggaataacaaaatggcagtctgtccagagatgagagatggagaggaggagagaaagaggagagagagaatggtagggtgatgctgacagcagtaagtgggggcccagatcacaggaggctgatacaagtcttggaaggattttgttttttacttgggttgaggtgggaaacccactaatctctatttccttattcttccagagaacctaaaatcatagtaaggtgtttttgtccatgtttcttaattttattcatggctctattctgggtgctgcaggaacttgtgtatacttctttcaggatattttcatatagtactttaatagttgtttttttatttattccagatgatggggctttatgagtataggaartatacattattgttgctaattatcacagtgtctagaacagcaaaatctctaccttattgctgaataaatgtctgttggaaatagattattcacattgtcatatcactgtcaaatattaacgctttggatcaaaattacacaacaaaaattgtttgttatgctatatttggaaagtatttgagttagatc

SEQ ID NO: 703301 - DNA, 1321 bp, Homo sapiens
ctcttcttcttgcagcttccaactggttcttaacctctgaaattaatttttatatttctaaattgcttaattgaatagttatgctatggtcctgttccatatctagatacctcccaagtattctggttgcttttgaactgcagccttgctaatttttcttactattctttcaagtaatcaaaattcawtttttggactcactgggttagcctgatgtcaaatatatactgatagaattttttgaagtggactgaccttctgctagcctgccttgcatgatactgctcactcctggattctgtgtcaccatgtttcaacaccaccatgttctggtcaatggacagtagtagatgcatgtagatgttgctatgcattcagaaactgctccataaaatagatatactttcttccttcccctatatcttgcattacagagttttcccaattctgtgtccagttttatttttcttttacttttaaatacttttgatacattatcattttttgaggtccaaccaaatgggcacacactgcactaaatgacctctagctcagtgctctttccaccatatttggatgccttcatagccaacactgaaacactaaaaaacattacaaagaattcaactggctggagatcaaaatgctcaggcaatattttagtagtacctatgagaaggaaagacttctgtgatatgaggaggagagagtcaaagcagcatgaaataaataaaagtagatggctgaagacaaaaattgattattgtatttcatagtattctgtggagtcaactctgttttgacctcacatgtttctccaagcccttccaaactgtattatttggtacacattgctcgactaaatgtttttcacatggctccataaacttctcatggctgcccattgactacatggactcagaggtcagagggagaacctgaaaaaaaaaaaaacacaacattttttcaattttgcaaaggtgcttatcatcagaaatatttctgatcacaatgaaaaattgctttttagaaatacaagttctttttatttctgtaaatcttatttactgttttctcattgaagacaagaggtgtggttttactggtgattaggaaattttaggactgggctaataaatatcatatatgaatattgccctaagatataatgcaagctattattgcaaacttatatgaacaaataattaagtggtaatatttaattcacagatgacacttacctaaagattttccaaggaaaattgccttgaattaggccatgagaaaaagttatattatttttgaattgacaaataaaatg

SEQ ID NO: 703302 - DNA, 798 bp, Homo sapiens
gggggactttgcaggtgcgattaaagaccttgggttgaggagatattcctggactattttggtgggcccartgaaatcacataaatccttaaaaaaccttttctacctaaagtcagagtcagaaaggtatgtgatgttaaagtgatcagagagatgcagtgttgctgactttgaagacaggaaataaaggctataagccaaggaatgttattgacctctacaatctagaaaagcaaatgaaacatattctcttctagaggttcctaaaaggaacatagtcaaactgatgccttgattttaccacagtgaaatctgtgttggacttctcaaatacagaactgtaaggtagtaagtttgggctgttttaagttaccaaatttgtagtatatttcacagcagtaataaaaaaccaatataaaagtcactttttccttagttcttcttcatgtaaaaaggtaattagaataaaactctttacaaacaactcagatcttgatttgctaatgaatatgcctacagtggtaattttgggagattaatcttcattattttcctacggaataggtgggaactgaagaaccacctattaatattgtcaaagaaaaataaaaatgtgggacccccaattcactatgccaaaagaaaacagttaagctgaaagatgaatcatgaaagatgctgaccttccttttgttcctaagcaggtaactacagataaaaggttaaatacctccacaaatagctactctatgtttactttattttgtgtcacgtgctgatttgcttagtgagacagga

SEQ ID NO: 703303 - DNA, 798 bp, Homo sapiens
gggggactttgcaggtgcgattaaagaccttgggttgaggagatattcctggactattttggtgggcccaatgaaatcacataaatccttaaaaaaccttttctacctaaagtcagagtcagaaaggtatgtgatgttaaagtgatcagagagatgcagtgttgctgactttgaagacaggaaataaaggctataagccaaggaatgttattgacctctacaatctagaaaagcaaatgaaacatattctcttctagaggytcctaaaaggaacatagtcaaactgatgccttgattttaccacagtgaaatctgtgttggacttctcaaatacagaactgtaaggtagtaagtttgggctgttttaagttaccaaatttgtagtatatttcacagcagtaataaaaaaccaatataaaagtcactttttccttagttcttcttcatgtaaaaaggtaattagaataaaactctttacaaacaactcagatcttgatttgctaatgaatatgcctacagtggtaattttgggagattaatcttcattattttcctacggaataggtgggaactgaagaaccacctattaatattgtcaaagaaaaataaaaatgtgggacccccaattcactatgccaaaagaaaacagttaagctgaaagatgaatcatgaaagatgctgaccttccttttgttcctaagcaggtaactacagataaaaggttaaatacctccacaaatagctactctatgtttactttattttgtgtcacgtgctgatttgcttagtgagacagga

SEQ ID NO: 703304 - DNA, 798 bp, Homo sapiens
gggggactttgcaggtgcgattaaagaccttgggttgaggagatattcctggactattttggtgggcccaatgaaatcacataaatccttaaaaaaccttttctacctaaagtcagagtcagaaaggtatgtgatgttaaagtgatcagagagatgcagtgttgctgactttgaagacaggaaataaaggctataagccaaggaatgttattgacctctacaatctagaaaagcaaatgaaacatattctcttctagaggttcctaaaaggaacatagtcaaactgatgccttgattttaccacagtgaaatctgtgttggacttctcaaatacagaactgtaaggtagtaagtttgggctgttttaagttaccaaatttgtagtatatttcacagcagtaataaaaaaccaatataaaagtcactttttccttakttcttcttcatgtaaaaaggtaattagaataaaactctttacaaacaactcagatcttgatttgctaatgaatatgcctacagtggtaattttgggagattaatcttcattattttcctacggaataggtgggaactgaagaaccacctattaatattgtcaaagaaaaataaaaatgtgggacccccaattcactatgccaaaagaaaacagttaagctgaaagatgaatcatgaaagatgctgaccttccttttgttcctaagcaggtaactacagataaaaggttaaatacctccacaaatagctactctatgtttactttattttgtgtcacgtgctgatttgcttagtgagacagga

SEQ ID NO: 703305 - DNA, 798 bp, Homo sapiens
gggggactttgcaggtgcgattaaagaccttgggttgaggagatattcctggactattttggtgggcccaatgaaatcacataaatccttaaaaaaccttttctacctaaagtcagagtcagaaaggtatgtgatgttaaagtgatcagagagatgcagtgttgctgactttgaagacaggaaataaaggctataagccaaggaatgttattgacctctacaatctagaaaagcaaatgaaacatattctcttctagaggttcctaaaaggaacatagtcaaactgatgccttgattttaccacagtgaaatctgtgttggacttctcaaatacagaactgtaaggtagtaagtttgggctgttttaagttaccaaatttgtagtatatttcacagcagtaataaaaaaccaatataaaagtcactttttccttagttcttcttcatgtaaaaaggtaattagaataaaactctttacaaacaactcagatcttgatttgctaatgaatatgcctacagtggtaattttgggagattaatcttcattattttcctacggaataggtgggaactgaagaaccacctattaatattgtcaaagaaaaataaaaatgtgggacccccaattcactatgccaaaagaaaacagttaagctgaaagatgaatcatgraagatgctgaccttccttttgttcctaagcaggtaactacagataaaaggttaaatacctccacaaatagctactctatgtttactttattttgtgtcacgtgctgatttgcttagtgagacagga

SEQ ID NO: 703306 - DNA, 582 bp, Homo sapiens
tattcaggaaaggaggaatacataatgtggcaaacttcattgttgaattattgtagtaagttgctaaagccactccagtcttggcaacaagcactctgatcagttagcagccatcagtatcaaagcaaaaccttccaacagcaaaaagattaagacttgccgaaggcctagatgattgttagcatttttcagcaataacatattttttaaattaaggtatacacattgttacttcagacataatgctattgcacagctaatgaagcatagtgcagtgtaaacataaacttttatattcactagaaaacaaaaaaaattatttgagttactttattgagatattcactttattgtggtgatctggaaccaaatctgcagtatctccaaggtatgcttgatacacacacacacacacacacacagatataaatgacatacatgtgtatgtagtgtgtgtgtgtgtgtatatgtgtatatatatgtatatcatatatatgtatatcatatatatgtatatcatatatatgtatatcatatatatgtatatcatatatatgtatatcatatatatgtatatsatat

SEQ ID NO: 703307 - DNA, 1673 bp, Homo sapiens
  misc_feature 1103, 1104, 1105, 1106, 1107, 1108, 1109, 1110, 1111, 1112,1113, 1114, 1115, 1116, 1117, 1118, 1119, 1120, 1121, 1122,1123, 1124, 1125, 1126, 1127, 1128, 1129, 1130, 1131, 1132,1133, 1134, 1135, 1136, 1137, 1138, 1139, 1140, 1141: n = A,T,C or G
  misc_feature 1142, 1143, 1144, 1145, 1146, 1147, 1148, 1149, 1150, 1151,1152, 1153, 1154, 1155, 1156, 1157, 1158, 1159, 1160, 1161,1162, 1163, 1164, 1165, 1166, 1167, 1168, 1169, 1170, 1171,1172, 1173, 1174, 1175, 1176, 1177, 1178, 1179, 1180: n = A,T,C or G
  misc_feature 1181, 1182, 1183, 1184, 1185, 1186, 1187, 1188, 1189, 1190,1191, 1192, 1193, 1194, 1195, 1196, 1197, 1198, 1199, 1200,1201, 1202: n = A,T,C or G
tgttttaaaaggagaaggaggaagggaatgaaggaaaggagggagggaagaaaagaaggaatgaagaagccaggcgcagtggctcatgcctgtaatcccagcacattgggaggccaaggcaggtgggtcacttgaggtctggtgtttgagaccaacctggctaacatggcaaagccccatctctactacaaatacaaaaataagccggacgtggtgacacacaactgtaatcccagctatttagraggctgaggtatgagaatcacttgaacctgggaggcagagattatagtgagctgagattgtgccactgcactccagcctggacaacagagtgaggctctgtctcaaaaacagaaagaaagaaaaaaaagaagtaggaatgaagggaaggaaggagggggtagggagggaaagaaggattatggttcactggcatcaaaaaatatatatgcataactaaggctatagccaagtgaacttcaggaaagccagaacaaatagtactgggagaggaaaaatattctgtggttcttaaaccagttgcccaagtgccagtgctattcattgcttaaggtttggcaaatatgttctttaactcaggtaaagtagagttcaagtttttaaaaacaagatttataaaatttatcaaagtctttggtgggtttatgttaccttgcaagtagagtaaaatttcagactcttcacagttcttgacatgctagcagaagacatgagagtcctgggtcagagacaaaaaactttattactcattgcacagcaagcatgggtttcctttgtctaggcagggagatgtggagggttctaggtagatgctgcacacactatgcttttatgtcacagttgagaaaagctgagcttagggaacctgaattttttataatatgcaataaacaaacctgcttgccctttgctcctgatagagacgttctgtttattatacttggcagtatgaaaacgtgccctgtgctccagaaggagacactatcttccgaggttgttagctatccacacatatatgaaaagatagcccagaaggaacccactctgagcacattcagacacatgacaggttcatggannnnnnnnnnnnnnnnnnnnnnnnnnnnnnnnnnnnnnnnnnnnnnnnnnnnnnnnnnnnnnnnnnnnnnnnnnnnnnnnnnnnnnnnnnnnnnnnnnnnatggaaaaaaaattgctcctagtagagtggaagagaagaaaagccttctttcctttaaacggaattttgagtagttttaataacaaaccattctgggccattgctattgtgtctaagaggtaccagtgtccctcacttgtgcagtttgtgcttaaaacagtgtcacttgaattcaatcaagtacagtcctctgattacttttatttctgggacagatttcaagagcaacttctaattttaggtattgtagctgagattcttcccatcctctgtactccactgatgttctatgtgcattagcttccctttaaaggcgacaatcataggcacttcacagaggaagcagaaagctcatgtgggtggaggtgagggaggccagagagggaggcagatatattttttgtgtgtttttgtctgtgagtttaatttcacacgaccgtttttacaaataagaaacttttagaatctatt

SEQ ID NO: 703308 - DNA, 1673 bp, Homo sapiens
  misc_feature 1103, 1104, 1105, 1106, 1107, 1108, 1109, 1110, 1111, 1112,1113, 1114, 1115, 1116, 1117, 1118, 1119, 1120, 1121, 1122,1123, 1124, 1125, 1126, 1127, 1128, 1129, 1130, 1131, 1132,1133, 1134, 1135, 1136, 1137, 1138, 1139, 1140, 1141: n = A,T,C or G
  misc_feature 1142, 1143, 1144, 1145, 1146, 1147, 1148, 1149, 1150, 1151,1152, 1153, 1154, 1155, 1156, 1157, 1158, 1159, 1160, 1161,1162, 1163, 1164, 1165, 1166, 1167, 1168, 1169, 1170, 1171,1172, 1173, 1174, 1175, 1176, 1177, 1178, 1179, 1180: n = A,T,C or G
  misc_feature 1181, 1182, 1183, 1184, 1185, 1186, 1187, 1188, 1189, 1190,1191, 1192, 1193, 1194, 1195, 1196, 1197, 1198, 1199, 1200,1201, 1202: n = A,T,C or G
tgttttaaaaggagaaggaggaagggaatgaaggaaaggagggagggaagaaaagaaggaatgaagaagccaggcgcagtggctcatgcctgtaatcccagcacattgggaggccaaggcaggtgggtcacttgaggtctggtgtttgagaccaacctggctaacatggcaaagccccatctctactacaaatacaaaaataagccggacgtggtgacacacaactgtaatcccagctatttagaaggctgaggtatgagaatcacttgaacctgggaggcagagattatagtgagctgagattgtgccactgcactccagcctggacaacagagtgaggctctgtctcaaaaacagaaagaaagaaaaaaaagaagtaggaatgaagggaaggaaggagggggtagggagggaaagaaggattatggttcactggcatcaaaaaawatatatgcataactaaggctatagccaagtgaacttcaggaaagccagaacaaatagtactgggagaggaaaaatattctgtggttcttaaaccagttgcccaagtgccagtgctattcattgcttaaggtttggcaaatatgttctttaactcaggtaaagtagagttcaagtttttaaaaacaagatttataaaatttatcaaagtctttggtgggtttatgttaccttgcaagtagagtaaaatttcagactcttcacagttcttgacatgctagcagaagacatgagagtcctgggtcagagacaaaaaactttattactcattgcacagcaagcatgggtttcctttgtctaggcagggagatgtggagggttctaggtagatgctgcacacactatgcttttatgtcacagttgagaaaagctgagcttagggaacctgaattttttataatatgcaataaacaaacctgcttgccctttgctcctgatagagacgttctgtttattatacttggcagtatgaaaacgtgccctgtgctccagaaggagacactatcttccgaggttgttagctatccacacatatatgaaaagatagcccagaaggaacccactctgagcacattcagacacatgacaggttcatggannnnnnnnnnnnnnnnnnnnnnnnnnnnnnnnnnnnnnnnnnnnnnnnnnnnnnnnnnnnnnnnnnnnnnnnnnnnnnnnnnnnnnnnnnnnnnnnnnnnatggaaaaaaaattgctcctagtagagtggaagagaagaaaagccttctttcctttaaacggaattttgagtagttttaataacaaaccattctgggccattgctattgtgtctaagaggtaccagtgtccctcacttgtgcagtttgtgcttaaaacagtgtcacttgaattcaatcaagtacagtcctctgattacttttatttctgggacagatttcaagagcaacttctaattttaggtattgtagctgagattcttcccatcctctgtactccactgatgttctatgtgcattagcttccctttaaaggcgacaatcataggcacttcacagaggaagcagaaagctcatgtgggtggaggtgagggaggccagagagggaggcagatatattttttgtgtgtttttgtctgtgagtttaatttcacacgaccgtttttacaaataagaaacttttagaatctatt

SEQ ID NO: 703309 - DNA, 620 bp, Homo sapiens
ctctttacagtttcaaccaggttgtgtgttacttgcttcttaagtcaccctaaattacakgcataatataggatatatacaggttttaagaagcataatgaggatctatatgtaatgatatgaatagaagacaaagtaagatgcaatttgttgtattttttaaaaaaatcaagatgcagaacattgtatatattatatatatatataaatgggaacattatatacaatgttcactctcccttttttatataaagtgattatgggcctttatgtattcatatgttagtttataaccttatatcctagtacatgcaaataatgtttctagaaatataaataagacactgttaaccatggagtgggtataggaagttgggaatgggaaagaggacatacttttaccttaaacatttccaaactgttgaaaactttgaaatgggaatccattactttaaaaattaggaataataactatgaaaatctttaaaaatttgtgccagacagtgctaggagtggataactctgtcctataaggagttcattgtctagaggagataaatatacaaaaacacaatgcggtaatgtgcttcttgcaggtgcaaagataatccagttccatg

SEQ ID NO: 703310 - DNA, 1304 bp, Homo sapiens
agttgatgagcagagaaatattcagatctgtctgctgttaactataattagctacttcagcacattttattgaaacatatctgtaaaccagaggcataaagcagggactgtttgaacagctaaactgattagtttttttttttttttttatcttttctatattagaccactgggtgcattttaatgctgtgtctttgaaacacacatgtgggtaagatgaccgaagggagaaaggcagaacttatacacttgccaccaattcaatatcgggttttgattaaatactctctgtttcaagagtcacgaactgatagatatcagacccatcgactatagtaatgagtcatattacaaaactagtattcattgcatttcaactcttgtgactcccctrtgtgttttcccaggaaaacattcaaaaatcacttctaaggctacttgcgtgtgtgtgtaaattttatttaaagtactttcctagagctttgtgggactgggactctgagatcactgtcagttgttttccttgaacactcaggggcagtagatacctcagtagcactttgagtaaacaccttagaaaaccacttatggacaaatgctatcatctttgccctaaagttcattgaacacaagctgaaggtcttctgcaccacctgagaatttattaatatctttaaggctcaccccatgtgtatcacattcaacctaccctggagttctccaatatcgcaaatataactcacatgtaagagaagaggttaagctatttatatgtaactgttctattggcttctgggacttcattatacttagtgttatatcatgcagttttagagatcttttctggaactactttgtataatccttaagcattgttaaagcttgttacaattttttttccttattttcacaagtttattgggtcactataaagctgagagaaaatctcccaagagaaagaacgtgagagatagctagtgtgggaacaaagactggaagaaccaggcagaataaggaaagagacaccatagaagtaggtagtaaaaactgaagggaaaaaagaaagctagacccactgacccgtctgtctttatacaagtgtatttatcttggcaatttcatgaaagtgccaagtaaaatgcctgattgtttatttgttaattaatcaataacataattctcttactcctatcctccagaagcagacaatcagataatacaaagtaattattatctccctattaatttatttaactttgatttgttgaatgccagagaaaagttttaggaaatgcctgtggagg

SEQ ID NO: 703311 - DNA, 1304 bp, Homo sapiens
agttgatgagcagagaaatattcagatctgtctgctgttaactataattagctacttcagcacattttattgaaacatatctgtaaaccagaggcataaagcagggactgtttgaacagctaaactgattagtttttttttttttttttatcttttctatattagaccactgggtgcattttaatgctgtgtctttgaaacacacatgtgggtaagatgaccgaagggagaaaggcagaacttatacacttgccaccaattcaatatcgggttttgattaaatactctctgtttcaagagtcacgaactgatagatatcagacccatcgactatagtaatgagtcatattacaaaactagtattcattgcatttcaactcttgtgactcccctatgtgttttcccaggaaaacattcaaaaatcacttctaaggctacttgcgtgtgtgtgtaaattttatttaaagtactttcctagagctttgtgggactgggactctgagatcactgtcagttgttttccttgaacactcaggggcagtagatacctcagtagcactttgagtaaacaccttagaaaaccacttatggacaaatgctatcatctttgccctaaagttcattgaacacaagctgaaggtcttctgcaccacctgagaatttattaatatctttaaggctcaccccatgtgtatcacattcaacctaccctggagttctccaatatcgcaaatataactcacatgtaagagaagaggttaagctatttatatgtaactgttctattggcttctgggacttcattatacttagtgttatatcatgcagttttagagatcttttctggaactactttgtataatccttaagcattgytaaagcttgttacaattttttttccttattttcacaagtttattgggtcactataaagctgagagaaaatctcccaagagaaagaacgtgagagatagctagtgtgggaacaaagactggaagaaccaggcagaataaggaaagagacaccatagaagtaggtagtaaaaactgaagggaaaaaagaaagctagacccactgacccgtctgtctttatacaagtgtatttatcttggcaatttcatgaaagtgccaagtaaaatgcctgattgtttatttgttaattaatcaataacataattctcttactcctatcctccagaagcagacaatcagataatacaaagtaattattatctccctattaatttatttaactttgatttgttgaatgccagagaaaagttttaggaaatgcctgtggagg

SEQ ID NO: 703312 - DNA, 604 bp, Homo sapiens
ctcacttgtgaaatagatgttactaaccttgatgattattctttctttttcagtgagatcaacataatcttggagttgagaccctacttaccaaaatgttaggataggatgccattatgtattcttcatgaaaatatttacaggttaggtagactccttatttttggtacatttaaaaaatacatacagaaaagaawatttaccatagagatctaggtgcccaacagaatgcaaaagctacatttatattgaaatatatatttcaatatacacccatttacacccatttctgaggtgtaaatttcaatatacacaatattaaaatttacctcattctaagcttttggggaaaaaaaggctagtcatttctaatgctggctctttctcattgtggaaattcatctttttggacatcagttacatcatttttcaagtacggtgagttggcttggtgaaagaaggcttttatattttatattttattttattttattttattttattttattttattttattttatttttgagatggagtttcactcttgttgcccaggctggagtgcaatggcatgatctaggctcactgcaacctccacctcctg

SEQ ID NO: 703313 - DNA, 1102 bp, Homo sapiens
gattacaggtgtgagccactgcaccaagcctactctgatatcttaagacaccaaagcagtgccagcaactgtgtacctccagtcttcttgttatgttctgaaaattaacccttggagtttaagaccacacagtggaaggtctgtcactcttagccaaatgcaattcctcaggggtacacctaagatcctgaaaagaccctacatagacaattaagttatgaataaatgttactggataatgatgacgatgatcacaaggataatgatgatgacaatgttaatatctatgcagcgcatcctacatgtcacgtactgaagcccagaaagtttaagtaatttacccaagatcttgtggctaataagtggtaagactcgactttcaatccactcaatctggttccagaatccatgcttttaaccactacaagatgataatatcaagtagaacaaactaatatacactgcacaaatgaataaacacagatatactcatcttaaagcagctttgttgattcattaatgaaaattcttattatatgccatccccaaattgctcctttatttgagaattatttcctttaggaactgagattcttacaggtctggcaaacatttgattggcttcataagtgcctacctgttacattaaatactgcttgaaccatcattatagcctcctaacagatgcccttgtttctgatccctcctcttcaccatccatcacaccaccattgcaagatgaatctctctacagtggagctctgagcccctcacagcccttcccaaaggtattcagtggatccctagagccaaactctgggccaggtgcaatggctcacacctgtaatcccaatgctttgggaggctgaggcagaaggattccttctgagaccagcctgggcaacatagtgagacctcatctctacaataaaattaaaatttaaatattagttgaggatacacctgtagtcccagctacttgggaggctgaggctggaggatcaattcagcccaggagttgaaggctgcagtgagctataatcacaccactgcactccagtttaggtgtcagggtctatgtctctaaaaaaaaamttaatta

SEQ ID NO: 703314 - DNA, 618 bp, Homo sapiens
taaagatgcagtgcctcatggaatacagagatatccctttacagttgagtgtttcggcattgttcacacaacaaaaaggcagccttgccgcctcataggtttttttttttttaaaaaacaattaaagaattttgcttcacatgcagagttcaactatgactgggctagaaaatatgtgaaagacatacatggaaacaaggattgctaaaatttggctataaatgccctataaggctaaaactaaaaatagcatgacaaaaataaagcaaaggctcatacacacaaactttctccctctagctgtggggctttccttctgtgagtcagtttgacgaatgcaaggtagacsaagtgcagtgtgatagacaccagtaaccgaccacaccacacgtcatgaagctttctcttcagaaccacaacaatgcaagaaaagaaaacttctcagctacctttgaggggcagataagaagaacaagttaaaatcagtgctcaagacagagatgcagagggcatctctaggctaacgggctgtgctcgcttcctcgagttgacacatggaacagtttgacttcaactgtttgggtacaaagactactcgtgctgcactcaaaataaaca

SEQ ID NO: 703315 - DNA, 408 bp, Homo sapiens
  misc_feature 2, 3, 4, 5, 6, 7, 8, 9, 10, 11, 12, 13, 14, 15, 16, 17, 18,19, 20, 21, 22, 23, 24, 25, 26, 27, 28, 29, 30, 31, 32,33, 34, 35, 36, 37, 38, 39, 40, 41, 42, 43, 44, 45, 46,47, 48, 49, 50, 51, 52, 53, 54, 55, 56, 57, 58, 59, 60,61: n = A,T,C or G
  misc_feature 62, 63, 64, 65, 66, 67, 68, 69, 70, 71, 72, 73, 74, 75, 76,77, 78, 79, 80, 81, 82, 83, 84, 85, 86, 87, 88, 89, 90,91, 92, 93, 94, 95, 96, 97, 98, 99, 100, 101: n = A,T,C or G
tnnnnnnnnnnnnnnnnnnnnnnnnnnnnnnnnnnnnnnnnnnnnnnnnnnnnnnnnnnnnnnnnnnnnnnnnnnnnnnnnnnnnnnnnnnnnnnnnnnnntgccctgacaaaaccaactctgtctccactttgatttccacataatctgcattatctatagtctaaactaactacaaatatgcatgctttatctgtaaatacttcctttatcacatccctcattcaggccccatcctggaacccagaaatgtacacacaatgaattctcaatcacatgtgggcaattttaattgttaggtatgggaagaactggtgaaaatgctgcatgatggtaacaactacctgttaggctgacttaaaaagaaggatttagacatgttaataaamgatctacacttcggtaact

SEQ ID NO: 703316 - DNA, 1000 bp, Homo sapiens
ttagaccatgccctaaataatacaaaaagaaaatacatttatcattaaatacctaaatatagagaccctcacctgagatccagaaaacctaaattctagtcttgccccagaccaattaaatctcaatctttgggagtaaagccaaaataggcatactttaaaggcttcaggtttgaaaattatggaaaaatcaagaatatttttctgagtagtaaatctcaaaaaaaaatctcaataggtagcaacaattaggctttattcactcaccaaaaagaaacgaatctaaaaattaaacaaaaataaaccttacaatcaagagaataaaaaacaattttaaataaattatatcaatcttagagcttaaacttttggccagatttgattcccaggctaatagggcaatataactaagtaaatgttaacagatacttacataattttataaataaatacatgtacatgtatgttgatacatatcaacatttatctaatttatatatgtatatatgtatatacatatgggtgtgttcattatcttctctctaattagacattcttgatttttttctcagtaaatccttcattttttccttaaacttaaatatggcaatttcaactcagaagcaaccaattattttaaaagcctaatgtacaagaaaatgraaataagtattttataagtaataaagcattttcaacattaaaaaaattaaaaaataaattatatcaaagagaaaagtaataacataaactcgagatatcagttcccttaaggacaagggcaaggttatgatggagaaggaatagacagcttctggggtcttgccagagttattttcctttacctgagctactcatgtaaaactagacatcttaaactagacatgtaagttttatgcataatgaaaatgtttcagggaaataatttaagagatggtatccagagcatcctcaaaagtaaatgcagttttcaatccatgtatcactacaaaagggtatg

SEQ ID NO: 703317 - DNA, 1203 bp, Homo sapiens
atttcacytgcttctttgaaaaaatgatgtagacttattgtttagcataagctacacagctttcttttattatatagcccaagtgtccatttgtctcttaagagtcacccttctttaatatatttggggtgctttattgttattgttagggctattatctaaggcatatcttgtatgaaatcttgcttgaagactattcttgggttagtaggaatatggattacattgtgaagaggtaaatataaaatatatgggatggcatggactatattgaaataggttcaagaagagttagcgtcatgagactgtgaaactcttaaggtgaggggtatgccttatttgcctttgtgtctcattatctagcaccgcgcctgtcaaatgtctgttgagcacctactatgcactaggatctgaggcttacaacgatgagcaaaacagatgtggttcttgccctcataaagttatgatgatttagcagaacatagtacattctttattactaagggaaactaagagtttctgggatttcttggactcaggagttaatattagggaggatcacctaatgaattggatgatgaaactgggttaaaatgacactttaacattttttgatagcaggtgcgaaagtaaccctagtttgagtttcttagagaagtcatcactgttggcaaagagatgaaaataagctgtattacttggcatcttggggtaacagaaatgatgatgataagagtggcagtcatagttagtacatgctaagtgctcatgatgtgccaggcagggtgctaagagctatgcaacccttattctattagtctcatgagcagtggacaaagactctcatgctgttctcccggctctgccactaacctgcagtgtgactctggtaaatcactttgcttctctgggtctctgtgttcttgtctatgaagtgaggtgtttagattaaatgctgtctatgactttcaagtctatgataccactctctttgcatgccttattaaccgtcagtagagaaatgttcagttaggcttaagtttagacttcattcacttctctcatgtttaatgctctaacaccctgtttgaggcatggataatgcatggagatgcatcaagctttgctcatatactatggcactgtatagcgtctacagatgacatttcttaaacagggccccgaattaggaaggtatataca

SEQ ID NO: 703318 - DNA, 1203 bp, Homo sapiens
atttcacttgcttctttgaaaaaatgatgtagacttattgtttagcataagctacacagctttcttttattayatagcccaagtgtccatttgtctcttaagagtcacccttctttaatatatttggggtgctttattgttattgttagggctattatctaaggcatatcttgtatgaaatcttgcttgaagactattcttgggttagtaggaatatggattacattgtgaagaggtaaatataaaatatatgggatggcatggactatattgaaataggttcaagaagagttagcgtcatgagactgtgaaactcttaaggtgaggggtatgccttatttgcctttgtgtctcattatctagcaccgcgcctgtcaaatgtctgttgagcacctactatgcactaggatctgaggcttacaacgatgagcaaaacagatgtggttcttgccctcataaagttatgatgatttagcagaacatagtacattctttattactaagggaaactaagagtttctgggatttcttggactcaggagttaatattagggaggatcacctaatgaattggatgatgaaactgggttaaaatgacactttaacattttttgatagcaggtgcgaaagtaaccctagtttgagtttcttagagaagtcatcactgttggcaaagagatgaaaataagctgtattacttggcatcttggggtaacagaaatgatgatgataagagtggcagtcatagttagtacatgctaagtgctcatgatgtgccaggcagggtgctaagagctatgcaacccttattctattagtctcatgagcagtggacaaagactctcatgctgttctcccggctctgccactaacctgcagtgtgactctggtaaatcactttgcttctctgggtctctgtgttcttgtctatgaagtgaggtgtttagattaaatgctgtctatgactttcaagtctatgataccactctctttgcatgccttattaaccgtcagtagagaaatgttcagttaggcttaagtttagacttcattcacttctctcatgtttaatgctctaacaccctgtttgaggcatggataatgcatggagatgcatcaagctttgctcatatactatggcactgtatagcgtctacagatgacatttcttaaacagggccccgaattaggaaggtatataca

SEQ ID NO: 703319 - DNA, 1203 bp, Homo sapiens
atttcacttgcttctttgaaaaaatgatgtagacttattgtttagcataagctacacagctttcttttattatatagcccaagtgtccatttgtctcttaagagtcacccttctttaatatatttggggtgctttattgttattgttagggctattatctaaggcatatcttgtatgaaatcttgcttgaagactattcttgggttagtaggaatatggattacattgtgaagaggtaaatataaaatatatgggatggcatggactatattgaaataggttcaagaagagttagcgtcatgagactgtgaaactcttaaggtgaggggtatgccttatttgcctttgtgtctcattatctagcaccgcgcctgtcaaatgtctgttgagcacctactatgcactaggatctgaggcttacaacgatgagcaaaacagatgtggttcttgccctcataaagttatgatgatttagcagaacatagtacattctktattactaagggaaactaagagtttctgggatttcttggactcaggagttaatattagggaggatcacctaatgaattggatgatgaaactgggttaaaatgacactttaacattttttgatagcaggtgcgaaagtaaccctagtttgagtttcttagagaagtcatcactgttggcaaagagatgaaaataagctgtattacttggcatcttggggtaacagaaatgatgatgataagagtggcagtcatagttagtacatgctaagtgctcatgatgtgccaggcagggtgctaagagctatgcaacccttattctattagtctcatgagcagtggacaaagactctcatgctgttctcccggctctgccactaacctgcagtgtgactctggtaaatcactttgcttctctgggtctctgtgttcttgtctatgaagtgaggtgtttagattaaatgctgtctatgactttcaagtctatgataccactctctttgcatgccttattaaccgtcagtagagaaatgttcagttaggcttaagtttagacttcattcacttctctcatgtttaatgctctaacaccctgtttgaggcatggataatgcatggagatgcatcaagctttgctcatatactatggcactgtatagcgtctacagatgacatttcttaaacagggccccgaattaggaaggtatataca

SEQ ID NO: 703320 - DNA, 1203 bp, Homo sapiens
atttcacttgcttctttgaaaaaatgatgtagacttattgtttagcataagctacacagctttcttttattatatagcccaagtgtccatttgtctcttaagagtcacccttctttaatatatttggggtgctttattgttattgttagggctattatctaaggcatatcttgtatgaaatcttgcttgaagactattcttgggttagtaggaatatggattacattgtgaagaggtaaatataaaatatatgggatggcatggactatattgaaataggttcaagaagagttagcgtcatgagactgtgaaactcttaaggtgaggggtatgccttatttgcctttgtgtctcattatctagcaccgcgcctgtcaaatgtctgttgagcacctactatgcactaggatctgaggcttacaacgatgagcaaaacagatgtggttcttgccctcataaagttatgatgatttagcagaacatagtacattctttattactaagggaaactaagagtttctgggatttcttggactcaggagttaatattagggaggatcacctaatgaattggatgatgaaactgggttaaaatgacactttaacattttttgatagcaggtgcgaaagtaaccctagtttgagtttcttagagaagtcatcactgttggcaaagagatgaaaataagctgtattacttggcatcttggggtaacagaaatgatgatgataagagtggcagtcatagttagtacatgctaagtgctcatgatgtgccaggcagggtgctaagagctatgcaacccttattctattagtctcatgagcagtggacaaagactctcatgctgttctcccggctctgccactaacctgcagtgtgactctggtaaatcactttgcttctctgggtctctgtgttcttgtctatgaagtgaggkgtttagattaaatgctgtctatgactttcaagtctatgataccactctctttgcatgccttattaaccgtcagtagagaaatgttcagttaggcttaagtttagacttcattcacttctctcatgtttaatgctctaacaccctgtttgaggcatggataatgcatggagatgcatcaagctttgctcatatactatggcactgtatagcgtctacagatgacatttcttaaacagggccccgaattaggaaggtatataca

SEQ ID NO: 703321 - DNA, 1795 bp, Homo sapiens
ttgtcttcatatctttgttcactccatttcttttatttagatccccttctgcttctcagagttcttcccaaatcccctgtttctgaggttgccacataaccctttggagctagatgttcagtaaatacctaagacatgaaatgaaatgaagtgaaacaaaatgaaataaaaaagggtcatcacaagatccagctttttcataccttctccctgtgaggtgccctttagtggcttcctggtcactaaaggcattcgccatcggtaggactgcccttgactgggcgctgctgttacccccaagtctccaagctgctctgtgttttcaggagccctccaatgtgccagggcaggattggagagctgggcatgtcctcttctctattactctttgctttaagggtacaaaaacagtgttgctttgtctgtttcctactgggagctcagagtaaacacagctatacattcttgattaacatctctcagcctccttgtaattcagatacatccaagtgagaggcatcatgctgtagtgcattcatgcatttattcatggacgaatgaataaattcatggacgaatgaataaatggatgaatggagtacagcatgatatctcaattcagtgatatcctgcagatctgactctgaaccagtaaggggttcagggtcagatccataggatacaatggtgatccagtagatagcatccttgccctcaaaaatttagggctatagtactgagccaacttggtgtgtctacctcctttgtctttaggtgttttccctgtaagcttcctctgattcttagggggtggattctgggcaggtctgtcctgctcttctgccaggtgaggccaggcaggtgtaatggggctggatttaatcctacctggaggtgacagtgggccatgcaaggggtgggggaatctctgtgtctttcattccctccctcccaagatcaggtgcttggggcttaccctttcacactcacccttgactcaatrtcagactcctaccctcctaccctcggtttcagaaggtttataaacctgatgaataggacttgcccatgtgggacagtttggatggcaaggccgattcttgcgtggtatgcagctgatggtggaaacaaggacagctcagatggccgttcaaggcaggtggccaaggagcgcacaagaatggtggctgatggtgtgcaggttgggatcagctcctgcctggatcttaggtactggtcaatgaccacatgtgttgggcacggccctgggcagtcactcagagctgacccagctccttttggtcctgtctgtccagttctggcctcctcactgtagattcacagagctctgcccaggtcagactctccacttcctagcctgggcagctctcctctgctgtccatatcacactctccggtctttgtctatttttttttttgacaatccactcattcgagcagtttctcaaagaggatgctattggcattgtgataattaaatagtcataattaaatccctgcccccagatttccagcttaaccctacttcccaactccaccatccttgagaaagagggggaggtaccacttctctcgcagatcccaatgacagggtcatggtcacaaactctaagccttgtttccttcaaagttcagcttttgattctcaaaaactttttttcctctcaaaaaggctggtttctataacacaaaaatgtttggatttccccaattatcttgtttctgttatgtatttttaatatccatgtacaagcttagaaactgaatattaaaa

SEQ ID NO: 703322 - DNA, 933 bp, Homo sapiens
ttctggcctctaatccctcaactatagtgaaactcttctctcgaaggtttccactgcccaaatcactacaatctaatggtggttctcagttccaatcctctttaatctttcagaagcatctgacactgttgggtaccaattccttatatttctttttcgataagaggttgctaagatgtcctcttaaaattctctcctttggctttcaggacatactttccgggttctcctccctcatgcaatttcacaatttcaagaatcagatacatccaaactccaccaacctaatcagtactgttacagatccaaattaccagcttacataagattctggtctgttcttagatcacacaatttcaaaatgcctacacttgcctatgctttgctatagtaataacaataaagtcaacatttcattgagaactcataattttaaaggacygtataagactctttttggtcttttgatgtgacaataatctcaatcaaatgttaataagcttttactggttccctttctgactctgtttctgacattctaatcttttaaagatatagtttctgctgaaaataaaacatatatttaagataaaatataaacacttaaacctataattaaatgtgagaggtattatatagaaagcttaaatctagatctactatgtccttgtgatttagcaatatgactttaggcaagtaactaagcattgatttggtcaatgaaatggggataacagtattcacgcatgggattgtgaagattaaatgaaataacatatacaaagcacttagcatacagaaagagctcaataaatgttggctgttattatagttatcatctagaaagctatattatctttaaatattcccatctgtatcatcctgaaccactttattcctattgcagttcttctcaacccacatcagtctttt

SEQ ID NO: 703323 - DNA, 1647 bp, Homo sapiens
ttgataaaatggagataatacctatcataaaattgttttgaagacatattccaaaataacgtagctagatagaagaattctcattattggaagaaatttaaaatgctttgctttaattttatccatttgtataaattctatcacaatcctaatttaaacctgatatttagaccttcagtttttccataagtcctaagtgaagaaaacaactatgaaattttagtctgaagtaattatcttagtattttataaataactttaattttgtttgaattcacattgtttttgaggtatttttctgtcaactcttaaaactcctaagttcatcatgaagtttttatattatttaagtaatctctcatttgaaatttgaaactgaatataatcgttttcatattatgaagtgtgttattaatacacttactagtgccaatagtatgctaataatttagctgtgtttcaacaataaatattttctttcatttggaaagttttgaaataatgaataaagatttattcaacacaatttatatttttgaatctttatatagaataacttgacatatcttccattggttaattcattttgcctatttgaaaatattgattattgtcctttaacagtcatcagttaattcatatgtagaattgcaacttaattgttttgtttatttgcattctatagctggcagcctgctatcaattacattgatagtaaatttgaggactacctaaatgcagaatcgcragtgaacagatgtcagatgcctggtaacagggtgcagtgttgtttatacttcattgctccttcaggacatgggtcagtaacctgatacttctgattcctttttgttgttgttgcttactgttacctttatgtgcatatttgagtaatctttaagtttgtgaagtacatacaactatacccattattaagtaccaaatttcatgtagaaatgtcttagttgaaaagcctttttaagtcctgtgcaagctaacagtgattttactccttagttcttattcataaggattttccctgcttcatggaaataaacagtgttgccaccatggtttgaggtctcaatgtggcaaatttagctttcatgttgaactaccaaataaagagaagcagccaaaccagttagacatattcaaaataaatccagagatgctatttattataagtctcataagagatggttatcaaaagcacttgcatgccaatgttttcttgtgccatttcttaatgcaaaaaatctgtttggcttctgtttcaccttagctgtcatagacatgtttaagtatcatgttgtcagtactaaccttttgtttattaggacataagacctaagaatctagacattaatctgatgcgattgttctgtttgttatagttagcctgtactccctttttttgttctttgtacttcccctttcattttgagtacatatatgtgtcatttgtaactgcagatttttccaattattcttcctcagtcttttcctttgggtaagtaactcagcatacataattcagccacctggtgactgtaactccaccatctctccaccaaaagaactgtagtagcatcaagctacatagcattaagttatctaacactcacattacagtagagtaaacca

SEQ ID NO: 703324 - DNA, 1647 bp, Homo sapiens
ttgataaaatggagataatacctatcataaaattgttttgaagacatattccaaaataacgtagctagatagaagaattctcattattggaagaaatttaaaatgctttgctttaattttatccatttgtataaattctatcacaatcctaatttaaacctgatatttagaccttcagtttttccataagtcctaagtgaagaaaacaactatgaaattttagtctgaagtaattatcttagtattttataaataactttaattttgtttgaattcacattgtttttgaggtatttttctgtcaactcttaaaactcctaagttcatcatgaagtttttatattatttaagtaatctctcatttgaaatttgaaactgaatataatcgttttcatattatgaagtgtgttattaatacacttactagtgccaatagtatgctaataatttagctgtgtttcaacaataaatattttctttcatttggaaagttttgaaataatgaataaagatttattcaacacaatttatatttttgaatctttatatagaataacttgacatatcttccattggttaattcattttgcctatttgaaaatattgattattgtcctttaacagtcatcagttaattcatatgtagaattgcaacttaattgttttgtttatttgcattctatagctggcagcctgctatcaattacattgatagtaaatttgaggactacctaaatgcagaatcgcaagtgaacagatgtcagatgcctggtaacagggtgcagtgttgtttatacttcattgctccttcaggacatgggtcagtaacctgatacttctgattcctttttgttgttgttgcttactgttacctttatgtgcatatttgagtaatctttaagtttgtgaagtacatacaactatacccattattaagtaccaaatttcatgtagaaatgtcttagttgaaaagcctttttaagtcctgtgcaagctaacagtgattttactccttagttcttattcataaggattttccctgcttcatggaaataaacagtgttgccaccatggtttgaggtctcaatgtggcaaatttagctttcatgttgaactaccaaataaagagaagcagccaaaccagttagacatattcaaaataaatccagagatgctatttattataagtctcataagagatggttatcaaaagcacttgcatgccaatgttttcttgtgccatttcttaatgcaaaaaatctgtttggcttctgtttcaccttagctgtcatagacatgtttaagtatcatgttgtcagtactaaccttttgtttattaggacataagacctaagaatctagacattaatctgatgygattgttctgtttgttatagttagcctgtactccctttttttgttctttgtacttcccctttcattttgagtacatatatgtgtcatttgtaactgcagatttttccaattattcttcctcagtcttttcctttgggtaagtaactcagcatacataattcagccacctggtgactgtaactccaccatctctccaccaaaagaactgtagtagcatcaagctacatagcattaagttatctaacactcacattacagtagagtaaacca

SEQ ID NO: 703325 - DNA, 1647 bp, Homo sapiens
ttgataaaatggagataatacctatcataaaattgttttgaagacatattccaaaataacgtagctagatagaagaattctcattattggaagaaatttaaaatgctttgctttaattttatccatttgtataaattctatcacaatcctaatttaaacctgatatttagaccttcagtttttccataagtcctaagtgaagaaaacaactatgaaattttagtctgaagtaattatcttagtattttataaataactttaattttgtttgaattcacattgtttttgaggtatttttctgtcaactcttaaaactcctaagttcatcatgaagtttttatattatttaagtaatctctcatttgaaatttgaaactgaatataatcgttttcatattatgaagtgtgttattaatacacttactagtgccaatagtatgctaataatttagctgtgtttcaacaataaatattttctttcatttggaaagttttgaaataatgaataaagatttattcaacacaatttatatttttgaatctttatatagaataacttgacatatcttccattggttaattcattttgcctatttgaaaatattgattattgtcctttaacagtcatcagttaattcatatgtagaattgcaacttaattgttttgtttatttgcattctatagctggcagcctgctatcaattacattgatagtaaatttgaggactacctaaatgcagaatcgcaagtgaacagatgtcagatgcctggtaacagggtgcagtgttgtttatacttcattgctccttcaggacatgggtcagtaacctgatacttctgattcctttttgttgttgttgcttactgttacctttatgtgcatatttgagtaatctttaagtttgtgaagtacatacaactatacccattattaagtaccaaatttcatgtagaaatgtcttagttgaaaagcctttttaagtcctgtgcaagctaacagtgattttactccttagttcttattcataaggattttccctgcttcatggaaataaacagtgttgccaccatggtttgaggtctcaatgtggcaaatttagctttcatgttgaactaccaaataaagagaagcagccaaaccagttagacatattcaaaataaatccagagatgctatttattataagtctcataagagatggttatcaaaagcacttgcatgccaatgttttcttgtgccatttcttaatgcaaaaaatctgtttggcttctgtttcaccttagctgtcatagacatgtttaagtatcatgttgtcagtactaaccttttgtttattaggacataagacctaagaatctagacattaatctgatgcgattgttctgtttgttatagttagcctgtactccctttttttgttctttgtacttcccctttcattttgagtacatatatgtgtcatttgtaactgcagatttttccaattattcttcctcagtcttttcctttgggtaagtaactcagcatacataattcagccacctggtgaytgtaactccaccatctctccaccaaaagaactgtagtagcatcaagctacatagcattaagttatctaacactcacattacagtagagtaaacca

SEQ ID NO: 703326 - DNA, 1613 bp, Homo sapiens
tttagtcaattagcagcaattaatcttggttgctttgcataataaccccataatattttataatttgtttaatggtgtatgctgtaaaagtattgtcctttgttccatttttgttgatgtttagatttccctccctgttacaacgagctttggatatatcattctttatgtttggggaaattatctttactcccttgtgaattattaatttgttaaaaaaaacataaaggattgctcagtatccattgaataacatttataatttactttatgtttgtcttatattaatttgagccatttttaaagccaaaatgaagatgtcttattggaaagatactaaaacaacatttactaaaaaagattttaggttatagaagtaaaaatttaataactgcaatggagactgatgaatttaagagcagattaaacatagaagagaacattactctttgagaattaataaatttgaatgtgactcaacgaagtatatatttgaaaacttacacaatagaatataggtaagaggcaaagaaaggcatttaaaataaactgtaacaataaccagaacaaaagaatgtagaaaaaatgaaaaaatactgggaaactttctgatcagctatattaagaaaaactttaaaaagtatttttcatgctgaatgagctacatctcagaagtataaaggaaaaaaattaaaatatatatttttcaaaaattaaaacattttcaagaaattaaatttaaaattttagtgaaaaatatttacttatacatacagaagctcaagcagtttaaatacaaaaaaaggactgacatattagattcaaacttctgaaaaagaaaaatattgagagtatcctgaaagcaatcagagaaaaaagacattacatatggaaaaactaatctacaactgcttgccaagttttcactagaaataatagatgactaaatgcagtgaaatgtctattttaagagctaaaaacatttaggtattcatatatctaatattgggaagaatataatatttatattaaatacaagaaataaaacatgttgataatcttgagatgaaaatattcctcaaaaaataaggcaaaataaagacattctcaatgaaatcgtgagaacatttatttcaaacagttccacacggtaaaaattgytaggataaattattgagtttggaaagaatttctttcaaggaattgatagtttgaagcaaagttatgacaatataataagggtttatagtatacataaaagtaaatgtaagacaatattgatggttttaagaataaaacgagattgatgttcaaagcaaaaataaagataatgtactaggggttataattattaaaaagtaaaatataaaacaacaagaaaacaagatatgagaaggaggaaatgtaatgcactgccatgagatatttacactctttgtgacataatatattatctaaaggtagaatgacataaactaaaaatgtacattgtaatccttggagcaaccagtaaaaatgagaaaataggtacggctaagaaagaaaatgcagggaataacatgaattgctaacactgtacaattcacacaactgaatttagaaaaagaggtaca

SEQ ID NO: 703327 - DNA, 544 bp, Homo sapiens
gtccctagctgaacatataagatgttttataggtaccctctctggcctcagtttacatgtttagcctgatctcaatctcttaatcatgtttcttgcatgaaaggcaatgcccatatcctttaagaatcattcctatgtgagacacagtcatcctcagaaggatggagttaccggttcacctgttctttcctctggcatctccaagactttggttataccttccttacggcatacatcaggtcatttatagtttttctgcttctatttcctctccctcatgaaatttgagttcctcatatccttgttgcttttcctgaccaccacccatttaccttcctctgatgaaagcacactgatattcctgtggggaaactaccttccacattctaggtcctgtgttttgggttgggccccagagatggctccagagatgggccytgttcattgcatagaacacattatgagtgtgtgttttcgtccaggttgaatggaaactgaatagcaagtctccagagaatgataacgtgggacatgctgtaatggt

SEQ ID NO: 703328 - DNA, 646 bp, Homo sapiens
caacggagtgagggtgagattgaggatcagtatataccacgccccctccacctgcaccttaccaccagagtccttactgaaatgagccactgttactcatgggaggatgtgtgggggataggaatgaaagctgtgctacttctgttctcatcccttcccatcttcctccaattcctggggctcttgcttaggagacacggtgccttcaaatttgtcaccttgaggggctaactacttatttcagtgacaattcccttaaatgtttcttagcagtcctatatcttgaaagcaatctcggaaggtaatgttattatagatttcattttatagataagaaaactgagattcagcagttgggtaattcctaaagatagaagtaaaagataagttccattataaacttataaatcagcccaagtttcttgcttccgtatttaagtgtaattatcaggatgaggatttgacatgcacttgttcttgactcgcctttgttgcaaggtctggaaagaaaggaaggctgtcattgtcgctaacccctgtcctcagcagcagttagttcctgtggatcacagcctcccaaggggaacagtcagtttgacartgggttcagctgcctctagggcagaaggggccatgtggaggagcg

SEQ ID NO: 703329 - DNA, 811 bp, Homo sapiens
agggtcttcagacagagatgagaatttaaagacaataaatgaagagcattgttttatgattgtgacttcaatatgcaagtctagtgagaactatctctaagtcagatttgtggatatgtcagtactgtttaaaatgaaattcagctgtctcccctctccatcctggaagcattttatacgtcagcattgtctactgtttagttgcagaatattttgctcagtggtcattataactttggagggcacgccttaatgcctaacatgtgtaaaagrtatttacctatagtaaccagtaattttacttacattttctcccaagcattgtggaatctcaaaagccttcgactctacgcttcaagtccaaaaaaactaagcagatttgtgataccacttctttttcatggttctagataaaacaagtaagaattttctttctagtaaaataaatggatttgcttctctggttttctactctaagtactaagaaaaagggaggtacaatacttaaagttaaggattattgtaactaggatagaataaatagaaacaattaattttccccgtagatctatatccatgaccaaggataaatgaaaactgtgacattaggatttgagacagtgttttgctattttgtggttatttcagacttactgttttaaagcaaaatcaacttattaccattttgaaaatgagaaaaaccaaatccaagttttgattcagactttactaatagttctatgtcacatgattaataaacctctgggggatataacttttaaatattataataaaaataaatgatatttgg

SEQ ID NO: 703330 - DNA, 1367 bp, Homo sapiens
acttaaagggatcttaaatcattggtctagtgtgtaggttttgtctgtattttaatgacctttttgggtagttaatagcgttaatgtttttaataaaaattagtttgcagctagctgagtgagcattgtagaccttgttttcaagagttctcctaaattgtttagtactacgtgcattcagtacttgcactcttttaatgctttctcagagttgaaagaacgtataagctggctgggtggggtggctcacgcctgtaatcccagcactttgggaggccaaggcaggcggatcacaagatcaggagttcgagaacagcctggccaacatagtgaaactccatctctactaaaaatacaaaaattagccgggcatggtggtgcacacctgtagtcccagctactcgggaggctgagacaggagaatcgcttgaacccaggaggcggaggctgcagtgagctgaagaccaccccactgtactccagcctggtgacagagcgagactccgtctcaaaaaaaaagaatgtaaaagctataaatgatgtagtccttaacctttgtggacttgtagctatatagaaaatctaaataggattgcataggaatgtcagggtttgtatgtttcacaagattccattctacatagtgtctcttgtgcatttaacttgagctggtaatgttactgttttcccactgttaagaaattaagaattggggaagtcttttcttttcagattcatctagctgatctcaagtttgtgatttctgcttaagtggtttttcatgagattattatataacagagtccatctaattctggttaaagaaacttggacctgttgttcaccaaggatgtactagattctggatttgtagctatagattttattgtcagttgagtaaaatggcatttatttttatttttattttttagagatgggggtctctctttgtggcccaggttggagtgcagtagtgaacccctgggcctatgcagtcctcctgcttcagcctcccaagtagctgggactgcaggcacatgctaccacacctggctaatttttttagttttttgtagagatggggtctccctatgttgcccaggctgctttgcaactcctggctacaagcaatcgtcctgcctcagcctcccaaagtgctgggaagacgggtatttgccaccaagcygagtccaaaatagtattaatttatcctagtcataggagactgtgctttagattgatgagataatgaataaaatggtttgccagaatttggaaaaagcaatatctaattgtaacttaccaggttgtgaaagcataaagtagaaaagacactttaagtcacaaatatcaagtgtgctgagagt

SEQ ID NO: 703331 - DNA, 1370 bp, Homo sapiens
ttgaattgtaattgctataatccccataatacccctgtcaaggaagaagccaggtggaggyaactgattcatgggagggctttctcccatgctgttcttgtgcatgatattgagttctcatgagatctgatgggtttgtaagcgtttgataattcctcctgctttcattctccttcctgctaccttgtgaagaaggctccttgcttcccctttgccttccatcacgattgtaagtttcctgaggcttccacagccatgctgaactgcaagccaattaatcctctttccttataggttacccagtctcgggcggttttttatagcagtatacaaatggactaatacaatcgcttaaagaagaaattatggtggcaaatgaatcagacttgtgttaacgggttaaaatattttaagtgcctgtattagagcttgacacatagtaagtgctcagtaaatgtcagccatagtattatacagaaaaatgctactcacctcagttcccttatttataaaattaaatttgaaaaattgaattataaatatggaactaaacaaagcaggaaagtgggagagagatttgtgcgattttaattttcaacatgatggcctaggaaaactctctgaggaactgacttaagcaaagaacttaatgaataagagaaggaagcaaatctatctatctgtctgtctgtctgtctgtctgtctatctatctatctatctgtctgtctgtctgtctgtctatatctgtgggaagcccattatctatatctgtggaacaacatgtgagaatacattgagcacaggaatggatggtgtccttagagacatcacccaagtgacaacacaccatcagacacacagtatgtatccaaaaaactcagtattttattttttcattgagacaggttcttactctgttgtccaggctggagtgcagtgctaccatctcagctcactgcaacctccgcctcgccactcacgccatcctcccatttccacctcccgagtagctggaactacaggtgcatgccactatacctgcaaatttttgtgttttttgtagcgatggggttttgccatgttgctcaggctggtttcgaactcctgagctcaagccatcctcttgccttggcctcccaaagtgctaggatcacaggcatgagctaccacatcctgaccaaaaaattaagtattttagttgtttaaatttgtctccctatttaccttttatacattattttcatgtatattagtttattgatcttcacaactgttccatgatgatgtggcataaaagagagtgagtagggacttctaggtctcacagggatggaagaaggtcatgaaaccatatttcctaactcatcc

SEQ ID NO: 703332 - DNA, 1370 bp, Homo sapiens
ttgaattgtaattgctataatccccataatacccctgtcaaggaagaagccaggtggaggtaactgattcatgggagggctttctcccatgctgttcttgtgcatgatattgagttctcatgagatctgatgggtttgtaagcgtttgataattcctcctgctttcattctccttcctgctaccttgtgaagaaggctccttgcttcccctttgccttccatcacgattgtaagtttcctgaggcttccacagccatgctgaactgcaagccaattaatcctctttccttatargttacccagtctcgggcggttttttatagcagtatacaaatggactaatacaatcgcttaaagaagaaattatggtggcaaatgaatcagacttgtgttaacgggttaaaatattttaagtgcctgtattagagcttgacacatagtaagtgctcagtaaatgtcagccatagtattatacagaaaaatgctactcacctcagttcccttatttataaaattaaatttgaaaaattgaattataaatatggaactaaacaaagcaggaaagtgggagagagatttgtgcgattttaattttcaacatgatggcctaggaaaactctctgaggaactgacttaagcaaagaacttaatgaataagagaaggaagcaaatctatctatctgtctgtctgtctgtctgtctgtctatctatctatctatctgtctgtctgtctgtctgtctatatctgtgggaagcccattatctatatctgtggaacaacatgtgagaatacattgagcacaggaatggatggtgtccttagagacatcacccaagtgacaacacaccatcagacacacagtatgtatccaaaaaactcagtattttattttttcattgagacaggttcttactctgttgtccaggctggagtgcagtgctaccatctcagctcactgcaacctccgcctcgccactcacgccatcctcccatttccacctcccgagtagctggaactacaggtgcatgccactatacctgcaaatttttgtgttttttgtagcgatggggttttgccatgttgctcaggctggtttcgaactcctgagctcaagccatcctcttgccttggcctcccaaagtgctaggatcacaggcatgagctaccacatcctgaccaaaaaattaagtattttagttgtttaaatttgtctccctatttaccttttatacattattttcatgtatattagtttattgatcttcacaactgttccatgatgatgtggcataaaagagagtgagtagggacttctaggtctcacagggatggaagaaggtcatgaaaccatatttcctaactcatcc

SEQ ID NO: 703333 - DNA, 1370 bp, Homo sapiens
ttgaattgtaattgctataatccccataatacccctgtcaaggaagaagccaggtggaggtaactgattcatgggagggctttctcccatgctgttcttgtgcatgatattgagttctcatgagatctgatgggtttgtaagcgtttgataattcctcctgctttcattctccttcctgctaccttgtgaagaaggctccttgcttcccctttgccttccatcacgattgtaagtttcctgaggcttccacagccatgctgaactgcaagccaattaatcctctttccttataggttacccagtctcgggcggttttttatagcagtatacaaatggactaatacaatcgcttaaagaagaaattatggtggcaaatgaatcagacttgtgttaacgggttaaaatattttaagtgcctgtattagagcttgacacatagtaagtgctcagtaaatgtcagccatagtattatacagaaaaatgctactcacctcagttcccttatttataaaattaaatttgaaaaattgaattataaatatggaactaaacaaagcaggaaagtgggagagagatttgtgcgattttaattttcaacatgatggcctaggaaaactctctgaggaactgacttaagcaaagaacttaatgaataagagaaggaagcaaatctatctatctgtctgtctgtctgtctgtctgtctatctatctatctatctgtctgtctgtctgtctgtctatatctgtgggaagcccattatctatatctgtggaacaacatgtgagaatacattgagcacaggaatggatggtgtccttagagacatcacccaagtgacaacacaccatcagacacacagtatgtatccaaaaaactcagtattttattttttcattgagacaggttcttactctgttgtccaggctggagtgcagtgctaccatctcagctcactgcaacctccgcctygccactcacgccatcctcccatttccacctcccgagtagctggaactacaggtgcatgccactatacctgcaaatttttgtgttttttgtagcgatggggttttgccatgttgctcaggctggtttcgaactcctgagctcaagccatcctcttgccttggcctcccaaagtgctaggatcacaggcatgagctaccacatcctgaccaaaaaattaagtattttagttgtttaaatttgtctccctatttaccttttatacattattttcatgtatattagtttattgatcttcacaactgttccatgatgatgtggcataaaagagagtgagtagggacttctaggtctcacagggatggaagaaggtcatgaaaccatatttcctaactcatcc

SEQ ID NO: 703334 - DNA, 476 bp, Homo sapiens
tttggtcagggacttttacagagagcactgctgtatttgtttaggtgggaggagcttgagggcagrtaaagacaagatccttggtcagacagagagctataaaaaaaatgcactcatagacaagatctattttgcctttctcaaaaaccctgttagatcagaaaattaagttttattataatgctttatagatgaagatctgacactgggaggttgaaatggctggtcaaagtcataccccatggaaagctgtgtatcttgcttgtattataatcgagtcctacctcctgtaagtcatttttcaataaactaacaaaaatgttacactaataaaatagttacattaaaaaataagaaagaagagccattaaacaattagtaccagttactatctgtacaatttcctatgttattttttatttcaatttttatttttaattactagtaataattatatatatttatttgttataata

SEQ ID NO: 703335 - DNA, 2368 bp, Homo sapiens
  misc_feature 1078, 2268, 2269, 2270, 2271, 2272, 2273, 2274, 2275, 2276,2277, 2278, 2279, 2280, 2281, 2282, 2283, 2284, 2285, 2286,2287, 2288, 2289, 2290, 2291, 2292, 2293, 2294, 2295, 2296,2297, 2298, 2299, 2300, 2301, 2302, 2303, 2304, 2305: n = A,T,C or G
  misc_feature 2306, 2307, 2308, 2309, 2310, 2311, 2312, 2313, 2314, 2315,2316, 2317, 2318, 2319, 2320, 2321, 2322, 2323, 2324, 2325,2326, 2327, 2328, 2329, 2330, 2331, 2332, 2333, 2334, 2335,2336, 2337, 2338, 2339, 2340, 2341, 2342, 2343, 2344: n = A,T,C or G
  misc_feature 2345, 2346, 2347, 2348, 2349, 2350, 2351, 2352, 2353, 2354,2355, 2356, 2357, 2358, 2359, 2360, 2361, 2362, 2363, 2364,2365, 2366, 2367: n = A,T,C or G
aaccagatgattgtagctaattcattctaggaagtaaggttttccatgtacaaatctctgggctgtgtctacgaccattaaacaagcgatcagaaaccaaaccagtaaaataaacaacaaccagaactgtatcaagcagatccaattttgaaagggagatgtagtaatagatataattttatgttaagatcttatttctcagaagccctcatttaaatatacacatagagttccttctctattcccaccgtttcacttgacttcacttttttttctctttaaaaaaaggaaggaaaaaaatatatacacatataaacatgtgtggtcccaggataatggtccacaggagaagtcaggtttttttgatagggaaaaatcagttcaggcagggtatttgctgtgtgagaagcaggtccatggggccctgagtttgagggctccccaggagtactgagttcccactggaggatggagaagcacccgaggtagacctcacacaaggtcagccctcactactgcaccttgtcgtttttaccaaatttgattgcctcctggtggtagtgattagcgtgtattgttgaaatttcataataaatgactcgtttcaacaattcatccaaacatttatgtaatccacataatgggagaagaaaaaaattaatagtgtttgggatcactaagtagcttttggaaattgtgtgtgtgtgtgtatgtgcatgtgtgtatacgtgtgtgtgtgtgtgggtgtttgcttttttcacaaagaacatggtatagaaaaataggataggaaacctgggttctacttctaggcctgcaataaacctgctacgtgacygtgtgctgcctaatagccctctctggactccagttgtttccatttggaaaatgaggggattgaaccaaatgatctgtaaagtcctttcccactctaaaattttatggctctaggagaaaggcatctatagttgcataaatgggcaagttaaatgaggcccaaaagtagttcaggcaaatcagtgttcattgttgggatggagcacttatacttatgtgtgtggagtggtcttcatagtancactagcaagcctgggctgcagtttaaattcttcccttctattcctctctctgagacattagcatctataaaacctttggtactcttcaggaggaaagggactacatgtaaatagtaagaaggatttttcttttctcaaagtacagtacaggacatttattttgttttctacttatgcatttgtgctatggcttgcttcctggtaaaatattacccagttgttgaacatttctccagaagaaaaaaagcttcaaaagttaccctatggtgatgatgatatggtaggctttgtgtccccacccaaatctcatcttgaattataatccccataatccccataatccccacatgtcaaggcaaagactgggtggagataactggatcatgggggcaatttcctccatgctgttctcttgatagtgagtgacttctcaccagatctgatggttttataagggccttttccccctttgctcactcttctctctcctgctgccctctaaagaggtgccttccaccatcattgtaagtttcctgaggtctccccagccatgccgaactgtgagtcaattaaacctcttttctttataaattacccattctcggacagttctttatagcactgtgagaatgaactaatacagatgaggaggaggataaaaacaaaaatatgcaaagaggaaagtggggtgatgaaaggccatgagagtgagacaggcttgaattcagttcttgattctccatcttattcattgtaggagctttcatttttgtctggccagctttcttcttttggacaacatcctctcacctattcagtgtaatttgactaggccatattatggatggctgactctgttccccatttctacctccccacaagcctaagtgttgggcacaagatccagaccaggctattcagaggatagttattggagttctagggaagatgccctgtcctgctccagtttgcaagttatagaggacatcctccttctgtgggagtatctatgtataaatgaagttaagcagagatatgggaaaagacagttctgatgacattcttattatacaagctgatattttcctttaaattttatctattaagtttgagttgggtttctataacttatactaataaaagcaaacatcatgtaagtacatgatgcttattatgtaccaggcactannnnnnnnnnnnnnnnnnnnnnnnnnnnnnnnnnnnnnnnnnnnnnnnnnnnnnnnnnnnnnnnnnnnnnnnnnnnnnnnnnnnnnnnnnnnnnnnnnnna

SEQ ID NO: 703336 - DNA, 668 bp, Homo sapiens
tgaggctttctatagaatcttcaccctgttctggattctctttctgtcccagctctttctgtttttcagcaagccattctttctcttgtcttcttttcaaggcacctggtaggcaacccttcctagtataatgggatagctcccttgaccctttcgtgggactcatgaaggggtggcttgcttactcagcccacagctctcaactccttgcaggtaggtaagtgagtgcagagtctgggatgagtgcttctgggtgaccagcaggagcagaactctgtgcgagcccatggaagcgcctaggggttgcccatgacccccagagcccctgagggcatgtgttaaagtgtactgtcttagctttgccatccacrgatggctaagtgtttaacagctctgtgtgacagccctctgtatcctgagctcttgttcagtgtccaggaagaatcagatcacacaaacaaattgaagatggtgtccaggaagaatcagatcatacaaacaaatcaaagatggtgaatgtggagcattttatcgagcagtggaagtggctctcagtgggatggagagctggaaagggatggattgggaaaataatcttcccctggagttcggctgtccctggctgaagtcttctttgaggtcctctcaacgaactgtccctctgaaat

SEQ ID NO: 703337 - DNA, 626 bp, Homo sapiens
tgatcttcccaatttagttgtataaataaccttttggggatattattctacaataaaaaaaatctgctgctttaaaggacacacggttttccaacttccctctaagtgtcttcactgccattgtgttttttgtytaggctgccctatggagtctatttaaagagagattcaagaatcaaacccactgacagtctttcagaaggatttgctattgcacttgacaggaagaggcttgtcaatcatttgaagaccttttgcttgaaaaactaatattttggaggaaaagtaaagcaaatcttgagggccatttactcacaacttcttcacgtttatatgccttaaattattcctcctgctaaaggagtatctgtatacagactttggaaaactatgagtatttattaaatagcaaatatgaggactaggtatcataaaattatggaattaaaacaaagtgaattgtgcaggtatcaaatctaaatgctcatttatttcattttattaaaaacatagctgaacaggtgtatcatattgttcaagaaaccacagttagagtcaggcttggctgtattctttctagcatgccatccaatgccttccatttcaattttctttctctttctttc

SEQ ID NO: 703338 - DNA, 656 bp, Homo sapiens
ttttggttactagatctgcagaccctgagcaggcatttccataatcctagccatatatttattcatccagggcctaaagattggcttcaaatgtgttcctcagctagggcaacattgctgtcattctaccagaaatactctctgagtagccagaggccagcttaagagagtggattaaaacactgagaaattcacatcaactgtcccctgtcactgtcactctacctgctgatgtttgtgtatgtctctctccgtgtgtgtgtgtgtgtgtgtgtgtgwgagagagagagagagagagagagagagatttcttaaatacctgttcttttattttaacaccttaagaaatgggcaaagagtacagatatcaaccatgtttggggtaattaagtgaaaataatcttgtactcgtgacttgtgatgctgaaagtgtgttggtagctatatttacatatttctaaaattttttttttcaagttgggtccataggaaccaaatcttttgctttcctgaccttagacaagtaaaccaataggaaataagaccctacttctgatgtagtaacactgggaaagattgatcccaatagaggaagatcattctaggagaacttagtctttttcattgattagaaataacgcagtatgtaacctgct

SEQ ID NO: 703339 - DNA, 656 bp, Homo sapiens
ttttggttactagatctgcagaccctgagcaggcatttccataatcctagccatatatttattcatccagggcctaaagattggcttcaaatgtgttcctcagctagggcaacattgctgtcattctaccagaaatactctctgagtagccagaggccagcttaagagagtggattaaaacactgagaaattcacatcaactgtcccctgtcactgtcactctacctgctgatgtttgtgtatgtctctctccgtgtgtgtgtgtgtgtgtgtgtgtgagwgagagagagagagagagagagagagatttcttaaatacctgttcttttattttaacaccttaagaaatgggcaaagagtacagatatcaaccatgtttggggtaattaagtgaaaataatcttgtactcgtgacttgtgatgctgaaagtgtgttggtagctatatttacatatttctaaaattttttttttcaagttgggtccataggaaccaaatcttttgctttcctgaccttagacaagtaaaccaataggaaataagaccctacttctgatgtagtaacactgggaaagattgatcccaatagaggaagatcattctaggagaacttagtctttttcattgattagaaataacgcagtatgtaacctgct

SEQ ID NO: 703340 - DNA, 1410 bp, Homo sapiens
cttcctcaccagattgtaaatgactccaaggatagggaagggcttttattataccctacaacccttgctcttagttgcaaaaaggcgcaataaacattccatgaaggaataacttactgtggctaatgatggaacagcaatgtcttggctgacagtgatgactcaactagaaactacatttatgatcttggttaaataacctctttgggtttgtgtgtctttacacatgtaagattttaaagattatattgtctagaaaaagcatcgggcccctgctacgcactacacaccctgctaaacccaggggccctaagatgctgccctcaagctgctctgggtcaagctagggactggaccagagggacctgaggatttttcacaagttcaatgcccagacaacccctagggcccctcccaccccccaattatttgtgtagatcattcaataattcctccagtggactcttcctgagaggatcttcccagccttccccaaaaactccatgacaatggaccaatttagtagcatctttgaccctatagaatgtattgtcatgcttcccccagaagagtcctggtcattcctgagatttttggcttaaccgatgaaagagcctgatgtgggaaatgaacccagcacccattccgccaacgtgtatggacaaaaagcagccttgaccgggtgcggtggctcacgcctgtaatcccagcgctttgggaagctgaggcaggcggatcacttgaggtcaggagttcgagaccagcctggtcaacatggtgaaaccccatctgtaccaaaaagtacaaaaattagctgggcatggtggcgcacacctgtaatcccagctactccgtaggctgaggtgggaggactgcttgaatccaggaggcagaggctacagtgagccaagattttacccctgcactctagcctgggttggacagagtaagaccttgtctccaaaaaaaaagaaraaaaaagcagccttatgactcaaataaggagtggactgacagttgcattctgttggcacagaacacatcttggatgataatggcccttccagtgtgcggcatagatccagatattctctcctctggctgggcagccactcgtctacccctcccactgtttacagggaacatggaaaaaattaaaacgtgtggccagtaagagtgtaaccatcatttggagactcagttggatttttctgtgtggtggtttgaaagaaaacaaaacaaaaatgctacatttcaaaaacatttgcagcaaaaaataaagtaaatcattatctcaagctaatttttataagtaaatgctctatttacttgtatcttggaaagtttcaaaacattttattttatttaaatgcttaagggaatgtagagatttgctcagttatgagatag

SEQ ID NO: 703341 - DNA, 677 bp, Homo sapiens
agtttattcattggattctttagctgcagaatttctgtttggttcttttataatgtctgtctctttgtttactttttcattcacatcataaattgttttcttgattttgttgattgtctgcctgtattttcttgtatcccattgagtttccttaagattactgttttgaattcctttttctgcaattcattgatttcctttttattgaggtctattactaaagagttattacattcttttgactctgtcatatttccttgctttttcatgtttcctatgttcttgcatggatgtctgtaaatctggtggaacartcacctcttccaaactttctagagtggctttagcagaaaaagactttcacctgaatttgaggttagtgtgaatttggatctttcacttgcaaagtgggtctttctgttgggaaaggtatggtggctgttgccaggtaggtgcagtagtatagtctccatgcagcttatttagctatgtttctgtatcagcaataattatgggcatttcaggggcctaggctgtagaagtttgtggtagcagaataggttgttaatgtcttcagtggcaagaggtttttggctccttccattcttttttcttacaatgaggaaacttggatgagggatgcctcttgataatagggctgacatggcctaaaagca

SEQ ID NO: 703342 - DNA, 677 bp, Homo sapiens
agtttattcattggattctttagctgcagaatttctgtttggttcttttataatgtctgtctctttgtttactttttcattcacatcataaattgttttcttgattttgttgattgtctgcctgtattttcttgtatcccattgagtttccttaagattactgttttgaattcctttttctgcaattcattgatttcctttttattgaggtctattactaaagagttattacattcttttgactctgtcatatttccttgctttttcatgtttcctatgttcttgcatggatgtctgtaaatctggtggaacagtcacctcttccaaactttctagagtggctttagcagaaaaagactttcacctgaatttgaggttagtgtgaatttggatctttcacttgcaaagtgggtctttctgttgggaaaggtatggtggctgttgccaggtaggtgcagtagtatrgtctccatgcagcttatttagctatgtttctgtatcagcaataattatgggcatttcaggggcctaggctgtagaagtttgtggtagcagaataggttgttaatgtcttcagtggcaagaggtttttggctccttccattcttttttcttacaatgaggaaacttggatgagggatgcctcttgataatagggctgacatggcctaaaagca

SEQ ID NO: 703343 - DNA, 677 bp, Homo sapiens
agtttattcattggattctttagctgcagaatttctgtttggttcttttataatgtctgtctctttgtttactttttcattcacatcataaattgttttcttgattttgttgattgtctgcctgtattttcttgtatcccattgagtttccttaagattactgttttgaattcctttttctgcaattcattgatttcctttttattgaggtctattactaaagagttattacattcttttgactctgtcatatttccttgctttttcatgtttcctatgttcttgcatggatgtctgtaaatctggtggaacagtcacctcttccaaactttctagagtggctttagcagaaaaagactttcacctgaatttgaggttagtgtgaatttggatctttcacttgcaaagtgggtctttctgttgggaaaggtatggtggctgttgccaggtaggtgcagtagtatagtctccatgcagcttatttagctatgtttctrtatcagcaataattatgggcatttcaggggcctaggctgtagaagtttgtggtagcagaataggttgttaatgtcttcagtggcaagaggtttttggctccttccattcttttttcttacaatgaggaaacttggatgagggatgcctcttgataatagggctgacatggcctaaaagca

SEQ ID NO: 703344 - DNA, 677 bp, Homo sapiens
agtttattcattggattctttagctgcagaatttctgtttggttcttttataatgtctgtctctttgtttactttttcattcacatcataaattgttttcttgattttgttgattgtctgcctgtattttcttgtatcccattgagtttccttaagattactgttttgaattcctttttctgcaattcattgatttcctttttattgaggtctattactaaagagttattacattcttttgactctgtcatatttccttgctttttcatgtttcctatgttcttgcatggatgtctgtaaatctggtggaacagtcacctcttccaaactttctagagtggctttagcagaaaaagactttcacctgaatttgaggttagtgtgaatttggatctttcacttgcaaagtgggtctttctgttgggaaaggtatggtggctgttgccaggtaggtgcagtagtatagtctccatgcagcttatttagctatgtttctgtatcagcaataattatgggcatttcaggggcctaggctgtagaagtttgtggtagcagaataggttgttaatgtcttcagtkgcaagaggtttttggctccttccattcttttttcttacaatgaggaaacttggatgagggatgcctcttgataatagggctgacatggcctaaaagca

SEQ ID NO: 703345 - DNA, 2139 bp, Homo sapiens
  misc_feature 1167, 1168, 1169, 1170, 1171, 1172, 1173, 1174, 1175, 1176,1177, 1178, 1179, 1180, 1181, 1182, 1183, 1184, 1185, 1186,1187, 1188, 1189, 1190, 1191, 1192, 1193, 1194, 1195, 1196,1197, 1198, 1199, 1200, 1201, 1202, 1203, 1204, 1205: n = A,T,C or G
  misc_feature 1206, 1207, 1208, 1209, 1210, 1211, 1212, 1213, 1214, 1215,1216, 1217, 1218, 1219, 1220, 1221, 1222, 1223, 1224, 1225,1226, 1227, 1228, 1229, 1230, 1231, 1232, 1233, 1234, 1235,1236, 1237, 1238, 1239, 1240, 1241, 1242, 1243, 1244: n = A,T,C or G
  misc_feature 1245, 1246, 1247, 1248, 1249, 1250, 1251, 1252, 1253, 1254,1255, 1256, 1257, 1258, 1259, 1260, 1261, 1262, 1263, 1264,1265, 1266: n = A,T,C or G
ttgttttgtttggatacagagtattgctctgccacccaagctggagtgcagtggtgcgatctcgatctcagctgactgcaatctccaccttccaggttcaaacgattctcctgcctcagcctccagagtagctgggattacaggcactcaccaccacacccggctaatttctgttatttagtagacactaaataacgtggtttcaccatgttggcaaagctggtcttgaactcctgacttcaggtgatctgcccacctcggcctcccaaagtgctgtgattaaaggtttgagccaccacagcgggctggaaagcattctttattggccaaggcattgactctccaacaacatgtggtgctattttttattttacaaatacattttcagtagatgtagcaaatttatgtacacataaaatataaaggacaagtaaataatctagatccattaagcttcaaaattaataaaaatctgtatgcttttgttaaaaaataattaatttttagataatattctttacgttccttacaactttggatagataaatataatgaacaccttcacaaatttttgtttaagttatacaccaaaaatagtattattttaccttctgctgtatataaaatatttgctgtaattcacattctgaacacatataaatgaagtaaagcaacattcattcttgatggaaatataataaaaagtggacaggaaacaaatatatatgtgtaatcatatgtatacacacatatatatgtagtaaacagatattaaataaatgacagagagtggactgttgataacagaacaataagaaggcttatccatatatcctttctttcatggtattcagaattgttttaacaatacaatataaatagtatagttgaagatagaaaagtagaaatgatgaccaggtgtggtggctcatgcctgtaatcccagcactttgtgggggctgaggcaggcagatcgcctgaggtcaggagtttgaggacagcctgggcaacatggcgaaaacctgtctctactaaaagtacaaaaattagccaggcgtggtggtgggtgcctgtaatcccagccactcaggagcctgaggcaggagaatagcttgaacccgggaggtggaggttgtggtgagctgagatcgtgccactgcactccannnnnnnnnnnnnnnnnnnnnnnnnnnnnnnnnnnnnnnnnnnnnnnnnnnnnnnnnnnnnnnnnnnnnnnnnnnnnnnnnnnnnnnnnnnnnnnnnnnntcacctcattctcctttttcctttttcctgcccatatgcacaatattgttgattcaaaatatcacttctcacgtttatgcacttctctttgtctccactatatctagtctgcaaagcattctcttgccttgaaaagtaaaacagccaatgggtgcacacagtagctctgccttttctgtgggaataagttccaagacccccagtgaatctgtggatacctgaaactgcaaatagcacaaaactctttatatgctatgttttccccatacatacatacctatgataaagtttaatttataaatttttcagagtaagagattcacaaaataactaataataaaataaacaattacaacaatatactttaatacaagctgtgtgaatgtagtttctcactctctctctttctctcttctcttgaaatatctcattgtttgtggtagtatttgactgtggttgaccacaagtaactgaaaccatagataaggagacactactgtattcttgcctctagtcttagttctttctcagacatttcttcgctctcttggcaggcgcatttctacaccaatatatgttctatgtcattttagttttaagccaactcactggatttattcttagaataaaacctcaaactctgatcatgtttagcaaagctcatcaagatctagttcctgaattatttgccaaatttgcctcctgcccttcycacttgcctatgtacaaaatgtttcccttttctgtgaaaaacaataaccctttttttcttgtgttcacctaatgagttcattctcattggtactcttattcaacatcactacctcagaattcttagaagtcatgttgcattacacaatagccagacagatg

SEQ ID NO: 703346 - DNA, 2139 bp, Homo sapiens
  misc_feature 1167, 1168, 1169, 1170, 1171, 1172, 1173, 1174, 1175, 1176,1177, 1178, 1179, 1180, 1181, 1182, 1183, 1184, 1185, 1186,1187, 1188, 1189, 1190, 1191, 1192, 1193, 1194, 1195, 1196,1197, 1198, 1199, 1200, 1201, 1202, 1203, 1204, 1205: n = A,T,C or G
  misc_feature 1206, 1207, 1208, 1209, 1210, 1211, 1212, 1213, 1214, 1215,1216, 1217, 1218, 1219, 1220, 1221, 1222, 1223, 1224, 1225,1226, 1227, 1228, 1229, 1230, 1231, 1232, 1233, 1234, 1235,1236, 1237, 1238, 1239, 1240, 1241, 1242, 1243, 1244: n = A,T,C or G
  misc_feature 1245, 1246, 1247, 1248, 1249, 1250, 1251, 1252, 1253, 1254,1255, 1256, 1257, 1258, 1259, 1260, 1261, 1262, 1263, 1264,1265, 1266: n = A,T,C or G
ttgttttgtttggatacagagtattgctctgccacccaagctggagtgcagtggtgcgatctcgatctcagctgactgcaatctccaccttccaggttcaaacgattctcctgcctcagcctccagagtagctgggattacaggcactcaccaccacacccggctaatttctgttatttagtagacactaaataacgtggtttcaccatgttggcaaagctggtcttgaactcctgacttcaggtgatctgcccacctcggcctcccaaagtgctgtgattaaaggtttgagccaccacagcgggctggaaagcattctttattggccaaggcattgactctccaacaacatgtggtgctattttttattttacaaatacattttcagtagatgtagcaaatttatgtacacataaaatataaaggacaagtaaataatctagatccattaagcttcaaaattaataaaaatctgtatgcttttgttaaaaaataattaatttttagataatattctttacgttccttacaactttggatagataaatataatgaacaccttcacaaatttttgtttaagttatacaccaaaaatagtattattttaccttctgctgtatataaaatatttgctgtaattcacattctgaacacatataaatgaagtaaagcaacattcattcttgatggaaatataataaaaagtggacaggaaacaaatatatatgtgtaatcatatgtatacacacatatatatgtagtaaacagatattaaataaatgacagagagtggactgttgataacagaacaataagaaggcttatccatatatcctttctttcatggtattcagaattgttttaacaatacaatataaatagtatagttgaagatagaaaagtagaaatgatgaccaggtgtggtggctcatgcctgtaatcccagcactttgtgggggctgaggcaggcagatcgcctgaggtcaggagtttgaggacagcctgggcaacatggcgaaaacctgtctctactaaaagtacaaaaattagccaggcgtggtggtgggtgcctgtaatcccagccactcaggagcctgaggcaggagaatagcttgaacccgggaggtggaggttgtggtgagctgagatcgtgccactgcactccannnnnnnnnnnnnnnnnnnnnnnnnnnnnnnnnnnnnnnnnnnnnnnnnnnnnnnnnnnnnnnnnnnnnnnnnnnnnnnnnnnnnnnnnnnnnnnnnnnntcacctcattctcctttttcctttttcctgcccatatgcacaatattgttgattcaaaatatcacttctcacgtttatgcacttctctttgtctccactatatctagtctgcaaagcattctcttgccttgaaaagtaaaacagccaatgggtgcacacagtagctctgccttttctgtgggaataagttccaagacccccagtgaatctgtggatacctgaaactgcaaatagcacaaaactctttatatgctatgttttccccatacatacatacctatgataaagtttaatttataaatttttcagagtaagagattcacaaaataactaataataaaataaacaattacaacaatatactttaatacaagctgtgtgaatgtagtttctcactctctctctttctctcttctcttgaaatatctcattgtttgtggtagtatttgactgtggttgaccacaagtaactgaaaccatagataaggagacactactgtattcttgcctctagtcttagttctttctcagacatttcttcgctctcttggcaggcgcatttctacaccaatatatgttctatgtcattttagttttaagccaactcactggatttattcttagaataaaacctcaaactctgatcatgtttagcaaagctcatcaagatctagttcctgaattatttgccaaatttgcctcctgcccttcccacttgcctatgtacaaaatgtttcccttttctgtgraaaacaataaccctttttttcttgtgttcacctaatgagttcattctcattggtactcttattcaacatcactacctcagaattcttagaagtcatgttgcattacacaatagccagacagatg

SEQ ID NO: 703347 - DNA, 1616 bp, Homo sapiens
tggaaccaacccaaatgcccatcagtgatagagtggataaagaaaatgtgtcacacatacaccatggaatactatgcaaccataaaaaagaatgagtttatgtcctttgcaggaacatggatgaagctggtgcctcttcttatagggacatttatcatacatgatggggacccacccacataacctcatttaacctgaattacttcttaaagtccccaattccaaatacagccactgaaagttaaggyttcaacatatgaattttagggaacaaaaacattcaatctataactatgtgtatatagagaaatatgtatatgtttgtaaaaatatatattaattatattcctgtgtatcttgttagctagctactacttacttgtccttaaatgatgtacaatcagtaaattattgttaaaaatatgtttataatatatagattcatttatatctaaatttgaaccacatattaaactgcatttttattaagcttaatcatagaactgaatgtcataatctttatgatgtattaaattacatttttaaaattattattctcttttgttatcctctatttagctgttttcctacattaagactaagctgtagcctcgtgtccctcattaattcttttgttcaacctaactaatcattatctactcactctctgcccctctgcagcaatattgtctttgtttaccttctttcaaagtaaactggtgttttattatattttgtgcatattaatgaatgtgtcaatacaagagatgttgttaggaaacaactttgaagaattttgattactgatcaagtatggaaagcatggatttcaggggaaacaaaatgcctcagaggattttaaccataataactgagaacaggaattaggaatcctcagaggaactctgttaccttaagggttcatggagattgtcatcttggttttaaacaaattgaactcatcttttgaaactgacacttcagtgttttaagttattcttaatgaaaaaaagttgttttctagtaagaaaagtctgatgttgttgatgaaagtatgtctttaactagatagaggtgattgacttttttaaaaaaggagatggctaagcatataggaaggtataatgatgctttctacagaaaagctgggtttcaagtgagatcacttaatttcgtaaggtcttacaatgttaaggcaggacgtagaaatgaatcgtatattcacaaatacttgagaatggaaatttctcaacctaagccctccagagaggcaaattgtcatgtactagcactttaacaggtagtacaatgccaaggacaatgagcaagggaacaagggtctagacatgcaggaatgtgttacttagctagtcacctcttggtgtcaaatgcaactaattaatttcctggaactgtttttgaatgtcctcatgaaccaatttaggacattaatcactagggatcaggagatttagggagagagctcttaactttaactacctcctcttttaacttccactttgcattcacaagcatgaggtcttgagcaagtgccatagcttcttattctttagcttcaacaaagaattcccactataggagaggagacgcatcca

SEQ ID NO: 703348 - DNA, 2320 bp, Homo sapiens
tggagcctcagagttcttttctataaatcttaccagggtactaggaagggaagaataaaaggagagaagggggaagtgagacagaagtggcaaaatgaataaggtctcagtctctgtagggggaaggagataatcagcctctgactagatactttagacagattgtattaattattccctgcaacgactctgtgaaacaaaatgtgctgtcttcattttattatctaggatagtgaaataagaaatgctgggtgagttgtccaggtaaacggtggagttaggattcaaaccctggtctgtctcactccaaagacagtactttatccaggagagcatgttataagggagaagggtggaatgaaagtaggaagtggaatgaagggatggtgatgggcaggttaactggggaacactgccaaggaaaacaggaggggggtttgagtagcccagaatccccagaagaagaccataaagctcagagtggtagaagaggacagtgaaacagttctcatctccaaatgcctaagaacaagggggagatggcaggagtgtctacatctggagtttgagtcatgggtttgtgttaaaggtggaaccctgggcaggtagaagggccatcattatccctgcaggaggtaactaccacccagatgcatgaagggcatgactctggacatggtgagaaatagagagatatggaagatgaattaatgaaggggtgggaacagttgggatggacagagcaaggggctgcatggagttctgagtgatgactgagaagctccctccttgagaagcacttcagtggacatgctgctcaggtcaacaagaaagctgcacctgggagaagaatcccaagtggccaagagcagctctgctctgctctcattaaagtgaactcaagggactttggcttagcgatgtcacttccatgtctcattgctttggtccaggccctggtcatcttgcatggcgaccttggaagaatttgttaactcgtctcttgcctcttccagtctagtcccctcctccaaacaaccctcttattttttccaaaatggacctttgcaggtcacaagtcagatttgatcactacccaaccttaaacgctcaaagattaaaaactcttgtgcgctgacccaagctactcatctcctacctctcctcaccattccccataccagagctgctttgaacttaacactattctatcaacaggatgcagtctttcacagtgccatgttctgcagctgcttcttcctctctctagaattctgcaatctccatccttcaccgccaggtttgtacctggcaaacaccttcaggatgatgcttaaagccttccatttaaattatccctcttactttcaaaagagagcagtggttctcagaatctaagtgtgaatctggggaacttaaaatatactcatacatsaatcccaccccagaatttctgttttaactggtccaggatatgggattggcctgggcattgggattttattttattttattttagagatggagtctcactctgttgcccaggctggagtgcagtggcacaatctcggctcaccgtaacccccgcctcccagattcaaacgattctcccgcctcagcctcctgagtagctgggactacatgcacatgccaccacgcccagctaatttttgtattttttagtagaaatagggtttcaccatgttggccaggctggtctcaaactccttacctcaggtgatccacccgcctcagcctcccaaagtgctaggattataggagtgaaccaccgcgcctggctgggatttttttctaaaaccctggaattcaaatgtgcagcagacattgagaaaccatggtgtagagtttaaactgcttaacattttaaatgagatccttcatcagacctgctatgagaaacatgatgctattttcaattaatgtaatcagcgtgacaagaaacctaaagagaagagtcataaattataatgaccacagctgttagtgactacagctcttacttaaggaatcaaggggagtggttctgacttgtaagtattataggaatttagagatggagagtttttgtctacataaataggatagtaattaaaccgagccttgaagaatgagaaattcaactttccactactttgaatggattagtggaaaaaggggtgaacattttcattagagaaagggcagaaggtaagaagatataggctgaaacaagggtgaacacattcaatcctgggtgctttcaaaatactttgcctgtatgaacttgtttaatctgcatagtatccctaaaatatcccca

SEQ ID NO: 703349 - DNA, 1850 bp, Homo sapiens
ttcctccccaccttgttcaaatacttcctctcatccaaggtaaccactccgtgaaccttgtgcttattattccttaactgcaaaaaaaccctttatctcatattttaagaatatatgtattacaaaaaagcacattttatagttctcatattttaagaatatatgtattacgaaaaagcacattttatagttaaaaaaagttaaaaaatttgtaaccttttaaaagtggtgaaaatcgtctttttttttaattcacaataatgttatcaaggttcatcccaattgctacatgtagctrtaattcatttgttttgactgtattagaatgtttcattttgcaattgcatgactgtatcacagtttatttatccactcttctgtcaatgagcatttgagtggtttccaggtttttgctattgtgaacagcactactacaaacattattattcatgtgtcttgggtttatcttggttatgttccaagaaatggaattgctgagacatagaatatgtgaatgctcaacttttcaaaatagtaatgcattctttttctaggtggttggatctgctatttaacctgttagttgaggtttaaattttcaatgacaatgcttttcacttgtaaaagcattatgtagttgttgttgttttttttagatggagccttgctctgtcacctaggctggagtgtagtggtatgatctaggctcactgcaacctctgcctcccgggttcaagcaattctcctgcctcagcctcccaagtagctgggactacaggtgcccaccaccacgcccagctaatttttttttttttttgtatttttagtagagatggggttttgccacattggccaggctggccttgaactcctgacctcagacagtctgcccttctcggcttcccaaagtgctgggattacaggcatgagccaccatgcccgacctatgtagtttttaaaatcaaatttgctttttacttttccaaactttcttctattgatattgtggcttctattcttccatttgtctgtttaatcagcttacgtgtccatataagtcttctcaaattgtgtaattatcttcagtgcttgaggtgccaagtctgtttgttgtatcttcttaacactcatatatactccctcactccatggttgtttgtttctttatgtggtttataattttggttgtgagcttgttttaagcctgactttttttcctctgagggaattctgtgttttctgacttaagtgcctctacaaagtaacttttcagttgcttttattggagcacagaatttcagtggttttaggatgtatgtttatgcagctgccttgatttgggattcctgtatcttcgtgcagcgttcttctagactctacacctttacatggtacaggcctggagttttaacttctcataaattacttttttgggtttgttttgttttaactccatcagcttccttgctacttccacaggttgtcgcccaggctagagtgcagtggcgtgatctcggctcactgcaagctccgcctcctgggttcacgccattctcctgcctcagcctcccgagtagctgggactacaggtgcccaccactatgcccagctatttttttgtatttttagtaaagacagggtttcaccatgttagccagtatggtctcaatctcctgacctcatgatccacccgccttggcctcccaaagtgccagtgggattacaggtgtgaaccactgtgcccagcctgatggatggagttttcaaagttccctttccaggaactgggaagaagcacattgattgtgtctctgagatttataaagaggattcaattagttttcaaactt

SEQ ID NO: 703350 - DNA, 172 bp, Homo sapiens
ggtaaagcaaggtgacttgacaaaggaaggcatcattttagatgggaagtagtgggatgtattggatggcaaaagccagaagactgggggttgaagccttgcccattgctgacattttaaataataytgggctctccattttcccatctgaaaaacaagatctccaatatct

SEQ ID NO: 703351 - DNA, 582 bp, Homo sapiens
gacctttcctgtagctgcagttcttactgcattcaggtaaatgttcctttcccttgcacattcaggctgattggtggtcatggactgttgccaaccctggggttcccttaaacttgcctagacttttgtaaatactcttttaataaactccccttagtcacccctttgagtgtacgtgccatctgtctgcagctggaattctgactcatactctccgaatcggactcgaggaatttctaaaatttcattcaacatttattttaacaaaaaggctttgagaaactactttatacaagcaatagatacttaaacacttagtaataacacctaaacatttttgagtgattgtggtatgtaatcattactggactaaacaatttagatggtttaatcattgcagcagctttgcagtgaatatgtttttaaacctcttttcctatacggaaacaaatattcattacagttaagtaccttgcctgaggccatgacaccagtaagtagaggaaacaggattcatattatattttaaacatattttcttgatggtcttttatatacartggtaattataatagagtgttc

SEQ ID NO: 703352 - DNA, 664 bp, Homo sapiens
gacatttatttggctcatggttctggaggggtggcatctggtgagggccttcttgctgcatcatgacctggcggatgacatcacatgatgagaaagcacatgcctgcatgtacacacgagagagagagaggaagaaggccaaactcatccttttaacagaaaccaactcctgtgataactaacccactcccaagataaaggctttaactcattcatgaggggatagtcacctctgaaatgtcccacttctcaatayggttacattggagcttaagtttccagcacatgaactttgaagaatacattcaaaccataacagtttccaaaaattacttgaggaggaaaccctaataaaatactgaactcctttatggcaatagagatttaggcttttgttatttgggcatgaataacttctgatggctggagatatggtgacgtcttaattaggtatgattcccaacactcctgcacacctatctccccaaccccttcctcttcccttcctcatgagacaaagagaaatcaagaatctactaactcagagaatgtaccactgtgtcttatgctttataggtatttggtaaatatttattgaatgaatacctgaaataacccaacctccatcaacaaacacaaaaacatataaataagaagataagaa

SEQ ID NO: 703353 - DNA, 2894 bp, Homo sapiens
gttttctttttcaggtgaactccagaaatctcaaagtcttgaacacacagtttagaattatctgtttattgacagagaattttgaaatgtataggcaaacatgctggaataaatcaactaagatgcagatagtaaatttgccgatgaggtttttgaaaaatgtatttgcagaaaaatttagataaagtttctgaaaaacttactatggcctaaaattacatgacttaatataaattgtcttgaaattccaatttctattaacttcttatgggaaagtataatgcaatacaaatcgtaattttaaaggctgcacatctaaagctattaaatatttcactttgcaaagtttacctagcatttatttgaaattatgtgctattgtgcgcatttaaaattaatcataaatagcactttttttaaaaaaggtatccttctatgcataaataataacaacatgatgaatttctagatygttcttggtataaatgttattgtcttctctgtatgattactatatcaaataacatgaaatttatttgccaatcttctaaccactcataccagaaaaagaatattgtaatgattgagtggattggtttactcatacaaataattatacattttataagaactacaaaacatctccattaaccactgcagtctttctgatcaaacagtgacagataggagctgagagtttaagggcatttgtttactatgtttgcttggattttccgaactgccttagttcctgattccacactgctattgtgtggatcaaataatcccttgtcacaaaaataccctggggaatgactcccctggcgtccaggttatgagtgtggtcagtcattccacatgccttagggatgagctatctgtgccatgacgagcgatttccttttcgagttttgtaatccccaaatactaaatactattatcaataaaagttaattaaggaaatgtatatcgaaatattgttcaagatagcactgaaattaggtttatctttcctcattgtcttaaaaaattattactgaattaaaacaggagaaattttacaatatactcttaaaattgtaaatatctactactgacctctttgatatgaaccataaccagacatttaaaaatatacttttgtcatgtagacacactagatatgccacttttattctcctttgcatggttcaatgtataagaaaacaacttagtagggggagaaaaaaattaaaagccattctgtaaatctttccctctttcttttcttgcaatctctcattgtatcttggagagcaagaccacaggttttaagaaatatgactcattttatgttagtggccttccaatacttcagaatattcttgatttttcatgaacagaggtacagctcagggagtgtggctaaatcagtcccagtctccagctccgcgtgaacctgggatccagacatctcctggatatctggcgctctctgagatccagccctcggtttcctgcaagccaaaaggatccgctaggttgggaaatgccgcctggtgcgattccagaaagggccatctctttaaggataacggacttggagggcctcttcaccctctcaccctgctccggaccctttcttcccatcctttgctcctaggattttacatgttgcctgcaaagggagtcaaacttagggggcaggcaaacaaacgagttctttccagcctctgtaaccggatcgctagagcgaaataaactcgcacaagtgtccagagatcgtagccagacagccagcctgcgcttgaagcaacttttaagtgaggctgcaagagccgccgggatgtagattttagttcgtggccaagcacaactacgacaccctgtccctgcccccaccccatccccaagaatgcatggaggaaggagagaggacgaggtgagggccgcctgcatttctgcacgtcggcgccggttagaaaccctgcagttttgagagagaagaagaggagatggaggggccaggagccacgactcccgggagagcgcagggaggggcgtgggtgccccttcgcccacctccgcccccgtcacctcgacagctgtcccgctcttggaattcattggcttcctctacccggcctcccaaacaccaccccaatctagtttagccccccgccccaccctcgctgacctaataaggccatgcagtgtgcgggggagctacataaaagcgcgggctcgcggcgactctgcaccacgcaggggaagagaaagcaggagccgtccagcacggaggaaggcgaccatggccaaggagtggggctacgccagtcacaacggtgagtgcaggcagccgcgacccggccaggaagggatgccagtccaggagagccctgccattgcacagaaatgggcaactttagagactgcagtggaaaatgtaggagtagaataagacctaacatttactgaggcttttcaactgccaaatgctgctgcttctttttttccttcatctcatttggttctccctagtatggagtttttatttcccttggagaaaactgaagtgcagagaagttggatcacttgcctaagatcccattgcctctgagaagtcagacagcccgaggtcaggtgtgactggcccttattctgttttactggacaagcacctaacctgagcttggtgccggtgtgagaatctctgctctgcctaagcttctccctaatccaaggcaaaggaacatgggtgtgctctgaaacccacaacacaatgctcaaatgtaggtggtcaatattattttattccaactctatgatggaaggtgtcattggttaaaaaaaaatgtgataaagtttatctgaaaaataagcctttgagcaggcagagtgaacacactgagtta

SEQ ID NO: 703354 - DNA, 622 bp, Homo sapiens
ccaacagccccacgaagcagccacttcagaaaagggagaggcattcaagaacttagaaaagcacctctggaaaatgctcactttaaaactttgcatgtaactgtacattttaattacaaggtttttaacatccattttctcatgtattcttaattaactctgtgaaagtaaacacagcttttattcttactccyatagttactgtgttggaagtccacctatatgaacaaactgttgtaactgaaattttctgagaacaaatcccaagctctttccatcgacacaaactatattgtttagttctctttatttccatttgttaaagaccagaatgtgtgaaatatgcattatcagattagaaaaacaaaacaaacatcagaaaaaggttttgcaaaatagcatttactaaaatctatgacagaaactagctctaaaacttcctgtttcaaaatttcactgtgtgtgcactaagttagttttgctggctgtggacagcaggcccaccccatgccgcgggcccaccccacgccgcgggcccaccccacgccgcgggcccaccccacgccacgggcccaccccacgccacagacccaccatggccccatgaacaggccagctgaga

SEQ ID NO: 703355 - DNA, 622 bp, Homo sapiens
ccaacagccccacgaagcagccacttcagaaaagggagaggcattcaagaacttagaaaagcacctctggaaaatgctcactttaaaactttgcatgtaactgtacattttaattacaaggtttttaacatccattttctcatgtattcttaattaactctgtgaaagtaaacacagcttttattcttactcctatagttactgtgttggaagtccacctatatgaacaaactgttgtaactgaaattttctgagaacaaatcccaagctctttccatcgacacaaactatattgtttagttctctttatttccatttgttaaagaccagaatgtgtgaaatatgcattatcagattagaaaaacaaaacaaacatcagaaaaaggttttgcaaaatagcatttactaaaatctatgacagaaactagctctaaaacttcctgtttcaaaatttcactgtgtgtgcactaagttagttttkctggctgtggacagcaggcccaccccatgccgcgggcccaccccacgccgcgggcccaccccacgccgcgggcccaccccacgccacgggcccaccccacgccacagacccaccatggccccatgaacaggccagctgaga

SEQ ID NO: 703356 - DNA, 1522 bp, Homo sapiens
ggctcactgcaatctccacctggcgggttcaagcaattctcctgcctcagcctcccaagtagctaggactacaggtgcacgccaccatgcccagctaattttttgtatttttagtaaagacggggtttcaccatgctggccaggctggtctcgaattcctgacctcgtgatccacccgccttgggctcccaaagtgctgggattacaggcatgagccaccgcggccagccgactggaccaaattcttaaaacagatgagaccacatccctttctacttgtgaccttccagtggcttctcatgcacttaaaataaaagtcactcttcttttcatggcctgtcaagcactgcctcatctgttactttctctgttttcctgatttaatcttctatcactctctcccttgccataaacattccagctaccctggttgtccttccatttttcaaatcattgcacaaattattcccttttggctagaatattctccaaattgttttgtagcatgaataccatccagcattgaaatctaggcttaaatgtcacttttactcagtaagggcattcactgacccactatttaaacgaataccttcatgtttccttctctcagtgtattgcttttttcttcagagaatcgtgttttctttctccttttcttttctttctttcttctttctttctttttttttttttttttttttttttgacagagtctctctctgctgctcaggctggggcgcaatggtgtgatcttggctcactgcaacctctgcctcctaggttcaagcgattttcatgtctcagcctcccgagtagctagaattacaggcacgcaccatgatgctcagctaatttttgtatttttagtagagactgggttttgtcatgttggccaggctagtctcgaactcctgaccttaggtgatctgcctgccttggccttccgaagtgctgggattacaggcgcgagccactgtgccyggggaatctttatcttacaattatcttgcttattcagttgatttatttaatttttctctcttaccccacttgaactaaggtccatgaagtcaggtgtcttgtcccccttactcactactgtgttctcactgtctggcaaagcctgcctcagagtaaggaatcaatacataatcaatgaataaataagttaagtttataagttttgaacttgggtcttgaacttaggtcttctgacttctgacttctagttttctggtccttcctttgttctgcatattctccctgcaaaccaagcattgatccctctcaaatccagactttgggatggaagtgagcaaggattctatttttctcaactaaaggaggaactccaaacacattatctacacagggtacaaaaggggacagtatcttatacaagcagccataggggtgagggccttgcttcatggaaattgaccagattttctatatcacaaaattacaacataccatcttggtccctatctccatttgacaggctccagggcatcccaga

SEQ ID NO: 703357 - DNA, 1522 bp, Homo sapiens
ggctcactgcaatctccacctggcgggttcaagcaattctcctgcctcagcctcccaagtagctaggactacaggtgcacgccaccatgcccagctaattttttgtatttttagtaaagacggggtttcaccatgctggccaggctggtctcgaattcctgacctcgtgatccacccgccttgggctcccaaagtgctgggattacaggcatgagccaccgcggccagccgactggaccaaattcttaaaacagatgagaccacatccctttctacttgtgaccttccagtggcttctcatgcacttaaaataaaagtcactcttcttttcatggcctgtcaagcactgcctcatctgttactttctctgttttcctgatttaatcttctatcactctctcccttgccataaacattccagctaccctggttgtccttccatttttcaaatcattgcacaaattattcccttttggctagaatattctccaaattgttttgtagcatgaataccatccagcattgaaatctaggcttaaatgtcacttttactcagtaagggcattcactgacccactatttaaacgaataccttcatgtttccttctctcagtgtattgcttttttcttcagagaatcgtgttttctttctccttttcttttctttctttcttctttctttctttttttttttttttttttttttttgacagagtctctctctgctgctcaggctggggcgcaatggtgtgatcttggctcactgcaacctctgcctcctaggttcaagcgattttcatgtctcagcctcccgagtagctagaattacaggcacgcaccatgatgctcagctaatttttgtatttttagtagagactgggttttgtcatgttggccaggctagtctcgaactcctgaccttaggtgatctgcctgccttggccttccgaagtgctgggattacaggcgcgagccactgtgcctsgggaatctttatcttacaattatcttgcttattcagttgatttatttaatttttctctcttaccccacttgaactaaggtccatgaagtcaggtgtcttgtcccccttactcactactgtgttctcactgtctggcaaagcctgcctcagagtaaggaatcaatacataatcaatgaataaataagttaagtttataagttttgaacttgggtcttgaacttaggtcttctgacttctgacttctagttttctggtccttcctttgttctgcatattctccctgcaaaccaagcattgatccctctcaaatccagactttgggatggaagtgagcaaggattctatttttctcaactaaaggaggaactccaaacacattatctacacagggtacaaaaggggacagtatcttatacaagcagccataggggtgagggccttgcttcatggaaattgaccagattttctatatcacaaaattacaacataccatcttggtccctatctccatttgacaggctccagggcatcccaga

SEQ ID NO: 703358 - DNA, 1522 bp, Homo sapiens
ggctcactgcaatctccacctggcgggttcaagcaattctcctgcctcagcctcccaagtagctaggactacaggtgcacgccaccatgcccagctaattttttgtatttttagtaaagacggggtttcaccatgctggccaggctggtctcgaattcctgacctcgtgatccacccgccttgggctcccaaagtgctgggattacaggcatgagccaccgcggccagccgactggaccaaattcttaaaacagatgagaccacatccctttctacttgtgaccttccagtggcttctcatgcacttaaaataaaagtcactcttcttttcatggcctgtcaagcactgcctcatctgttactttctctgttttcctgatttaatcttctatcactctctcccttgccataaacattccagctaccctggttgtccttccatttttcaaatcattgcacaaattattcccttttggctagaatattctccaaattgttttgtagcatgaataccatccagcattgaaatctaggcttaaatgtcacttttactcagtaagggcattcactgacccactatttaaacgaataccttcatgtttccttctctcagtgtattgcttttttcttcagagaatcgtgttttctttctccttttcttttctttctttcttctttctttctttttttttttttttttttttttttgacagagtctctctctgctgctcaggctggggcgcaatggtgtgatcttggctcactgcaacctctgcctcctaggttcaagcgattttcatgtctcagcctcccgagtagctagaattacaggcacgcaccatgatgctcagctaatttttgtatttttagtagagactgggttttgtcatgttggccaggctagtctcgaactcctgaccttaggtgatctgcctgccttggccttccgaagtgctgggattacaggcgcgagccactgtgcctggggaatctttatcttacaattatcttgcttattcagttgatttatttaatttttctctcttaccccacttgaactaaggtccatgaagtcaggtgtcttgtcccccttactcactactgtgttctcactgtctggcaaagcctgcctcagagtaaggaatcaatacataatcaatgaataaataagttaagtttataagttttgaacttgggtcttgaacttaggtcttctgacttctgacttctagttttctggtccttcctttgttctgcatattctccctgcaaaccaagcattgatccctctcaaatccagactttggratggaagtgagcaaggattctatttttctcaactaaaggaggaactccaaacacattatctacacagggtacaaaaggggacagtatcttatacaagcagccataggggtgagggccttgcttcatggaaattgaccagattttctatatcacaaaattacaacataccatcttggtccctatctccatttgacaggctccagggcatcccaga

SEQ ID NO: 703359 - DNA, 1522 bp, Homo sapiens
ggctcactgcaatctccacctggcgggttcaagcaattctcctgcctcagcctcccaagtagctaggactacaggtgcacgccaccatgcccagctaattttttgtatttttagtaaagacggggtttcaccatgctggccaggctggtctcgaattcctgacctcgtgatccacccgccttgggctcccaaagtgctgggattacaggcatgagccaccgcggccagccgactggaccaaattcttaaaacagatgagaccacatccctttctacttgtgaccttccagtggcttctcatgcacttaaaataaaagtcactcttcttttcatggcctgtcaagcactgcctcatctgttactttctctgttttcctgatttaatcttctatcactctctcccttgccataaacattccagctaccctggttgtccttccatttttcaaatcattgcacaaattattcccttttggctagaatattctccaaattgttttgtagcatgaataccatccagcattgaaatctaggcttaaatgtcacttttactcagtaagggcattcactgacccactatttaaacgaataccttcatgtttccttctctcagtgtattgcttttttcttcagagaatcgtgttttctttctccttttcttttctttctttcttctttctttctttttttttttttttttttttttttgacagagtctctctctgctgctcaggctggggcgcaatggtgtgatcttggctcactgcaacctctgcctcctaggttcaagcgattttcatgtctcagcctcccgagtagctagaattacaggcacgcaccatgatgctcagctaatttttgtatttttagtagagactgggttttgtcatgttggccaggctagtctcgaactcctgaccttaggtgatctgcctgccttggccttccgaagtgctgggattacaggcgcgagccactgtgcctggggaatctttatcttacaattatcttgcttattcagttgatttatttaatttttctctcttaccccacttgaactaaggtccatgaagtcaggtgtcttgtcccccttactcactactgtgttctcactgtctggcaaagcctgcctcagagtaaggaatcaatacataatcaatgaataaataagttaagtttataagttttgaacttgggtcttgaacttaggtcttctgacttctgacttctagttttctggtccttcctttgttctgcatattctccctgcaaaccaagcattgatccctctcaaatccagactttgggatggaagtgagcaaggattctatttttctcaactaaaggaggaactccaaacacattatctacacagggtacaaaaggggacagtatcttatacaagyagccataggggtgagggccttgcttcatggaaattgaccagattttctatatcacaaaattacaacataccatcttggtccctatctccatttgacaggctccagggcatcccaga

SEQ ID NO: 703360 - DNA, 1326 bp, Homo sapiens
acatttttcaacaagtatacctacacagaaaattcaggtgcagcttgcccgtgagcaacattgagaaacttgggtttaaaggaattctgtatttcaactmaccaacctcattctacatatgtacaaattgaggtacaagaaggtgagctagccatatagcaatttaattgctcagtaaagactagaacccaggtatggtgagtggaatttcccaatgtgagaatggcattaaacaacagactcacaatgcgtatgcacattcattttaaatttccttttattcctgctattaagtgaaaaagaaaatctgtttggtaaattatttatctccataccttgccatttcccttttattttaaacaaaaagaggcaagaatcaggctcagaacgctatgaatgcaatggcatatggctagaatataataacaatgctttgttttaattttatagcttctaactattaatagtgatactggtttttctatttgcaatagttgatatgtttcctttttaaataactttaattaaaatatgtttgttaaaggaaaatataagtaaatgcacagatatgataaatacatgaagataggagaagggttgtgtttaggaaacagtgacctaatttaatcattctctcagccctggccagctagttaccccttcatgaggtttgattagttcacaaacccagccagtgtcattccaaggaagatattgacagaaaataattcaagaacagaaccaagagtagttttcaagaggaaggacttcattggaattacacatgctaggattaagatattttagtataggttacaggtaaggtagttttgaggatcataaccatccagaggaatgaggacaaatgataccatatgaacgcacctgtaggatgtacctgattgcttatggaaactgaacatggcctctaaatcaattggtaaagacctaattagagggagaaatagggacatgttgtgctaacgcaagtgtcacacaaaaagggtgggtgggtggctgtgcagtgggactcataatctgaaagttcaagcggaacaaattctaaacctccaagattgcagtagacctcccagagggattcctagcatttagctgtgtgagtgtcctgtgagctgactaagagccacctattcttacttcatgtagtgaacctgcaggcatagccagaccttgggtggtgggaggtgggatgagggcagatctaccagttgctggggaagcagacacattaaaaaaacacccctccacctttgacagcctctctactcatcttgtggtctttgtttcacattgcttcctttaaat

SEQ ID NO: 703361 - DNA, 1100 bp, Homo sapiens
ttccgatattttaaaacactgatttaaaccttttcatatgtaacaagtgagactcgggggggaaccctgtatttcaccttgctgcttacccactctctttctcctccttcctccacccccttgaaactgcaagcatgaattctgttgctttcatctgtgtgaatttcccgttggcagtgccccaactctcggaatcattctgtttcccccaagggaatcagcagatgttccttgtgtgattgatgtaccgtgtgctgttcggctttgcctgggcttgtccacgtgtcctccaaaaatgtaaacagaggcgctgcaactgtgcctcaaagtggcaggcagggcggcaagtcggtaacaaaaccaaacaaatgcaggaaatgttgctccttcctgcagtatgtgcaggagggtggctctctcatgatacagttctagctgtagtatctgaacaaggtgggttctatggtgtaaaaagtcacttgttaagtgctgtgacaatttgtcaatctgtgttacttcacactgaaaaaattcccagcaatgtcatttctgccagtatcacgggaaatagttatgtagttaaagytttaaaagctaagttcactgcatattgtttataatagttcaaaagtgggatggaattaaatgtgtaacaagaatttggttaaaaaaatcatgatatgtgtctgtttatatctcttccagatatatctatttttaccatttaaaatgagggtgtaaaacagtggccttaaaaatttttgattgtgggcacccttggggagctcaataaaagctgtgaaccatctccctagaaaaatctccatatgctcaacattttcatgtaatataaagagatttaaacaggaacctgtctatcactcaaaggttaagaactcctagtattaagaatttagtagaaataatatttaataatttagatatatggagtagtggaacaagcaagttataaaagtatgattcagccaggtgcaatggttcatacctgtaatcccagcactttggttggccaaggcgagaggatcacttgagcccaggagtttgataacagcctgggcagactctgtctctactaaaaa

SEQ ID NO: 703362 - DNA, 1083 bp, Homo sapiens
ggtgggctccacccagttcgagcttccccactgctttgtttacctaagcaagcctgggcaatggyggacgcccctcccccagcctcactgccgccttgcagtttgatctcagactgctgtgctagcaatcagtgagactctgtgggcgtaggaccctctgagccaggtgcgggatataatcttgcggtgcgccattttttaagccggtcggaaaagagcagtattcagctgggagtgacccgattttccaggtgccatctgtcacccctttctttgacttggaaagggaactccctgaccccttgcgcttcccaagtgaggcaatgcctcgccctgcttcggctcgtgcatggtgcatgcacccactgacctgcgcccactgtctggcactccctagtgagatgaacctggtacctcagatggaaatgcagaaatcacccatattctgcgttgctcacgctgggagctgtagactggagctgttcctattcggccatcttggctcctcctcctctgtatcaatatttttatgtattgtgcccttgatatcatatatataatcattaaagtcaaggtcacttaaatttgtttcctattttatcttctgagagatttatgttttgcatttatgtttacatctgggagatttatgtttacatttaggtcggtagactacttttagttaatttttatgaaaggtgtaatgtctgcctctactttcattatttttgtatgtggatgtccagttgttctaacattatttgttgaaaagactatattttctccatggcattgtctttgttcccttgtcaaagctaaattgattatatttgtatgcatatctttctagcctcactatttgtttccaataagatctgtctatgcttttgtcaatatcacactctctgattactgttgctttattgtaagtctttattttaggtagtctcagtcctccaaatttgttctccttcaaagatatgctggctattattgggtcttttgcctttctacatttacattccatttaaaattgatttattaatatccataaaataatgtgctagaattacgagtgggatg

SEQ ID NO: 703363 - DNA, 1083 bp, Homo sapiens
ggtgggctccacccagttcgagcttccccactgctttgtttacctaagcaagcctgggcaatggcggacgcccctcccccagcctcactgccgccttgcagtttgatctcagactgctgtgctagcaatcagtgagactctgtgggcgtaggaccctctgagccaggtgcgggatataatctygcggtgcgccattttttaagccggtcggaaaagagcagtattcagctgggagtgacccgattttccaggtgccatctgtcacccctttctttgacttggaaagggaactccctgaccccttgcgcttcccaagtgaggcaatgcctcgccctgcttcggctcgtgcatggtgcatgcacccactgacctgcgcccactgtctggcactccctagtgagatgaacctggtacctcagatggaaatgcagaaatcacccatattctgcgttgctcacgctgggagctgtagactggagctgttcctattcggccatcttggctcctcctcctctgtatcaatatttttatgtattgtgcccttgatatcatatatataatcattaaagtcaaggtcacttaaatttgtttcctattttatcttctgagagatttatgttttgcatttatgtttacatctgggagatttatgtttacatttaggtcggtagactacttttagttaatttttatgaaaggtgtaatgtctgcctctactttcattatttttgtatgtggatgtccagttgttctaacattatttgttgaaaagactatattttctccatggcattgtctttgttcccttgtcaaagctaaattgattatatttgtatgcatatctttctagcctcactatttgtttccaataagatctgtctatgcttttgtcaatatcacactctctgattactgttgctttattgtaagtctttattttaggtagtctcagtcctccaaatttgttctccttcaaagatatgctggctattattgggtcttttgcctttctacatttacattccatttaaaattgatttattaatatccataaaataatgtgctagaattacgagtgggatg

SEQ ID NO: 703364 - DNA, 1083 bp, Homo sapiens
ggtgggctccacccagttcgagcttccccactgctttgtttacctaagcaagcctgggcaatggcggacgcccctcccccagcctcactgccgccttgcagtttgatctcagactgctgtgctagcaatcagtgagactctgtgggcgtaggaccctctgagccaggtgcgggatataatcttgyggtgcgccattttttaagccggtcggaaaagagcagtattcagctgggagtgacccgattttccaggtgccatctgtcacccctttctttgacttggaaagggaactccctgaccccttgcgcttcccaagtgaggcaatgcctcgccctgcttcggctcgtgcatggtgcatgcacccactgacctgcgcccactgtctggcactccctagtgagatgaacctggtacctcagatggaaatgcagaaatcacccatattctgcgttgctcacgctgggagctgtagactggagctgttcctattcggccatcttggctcctcctcctctgtatcaatatttttatgtattgtgcccttgatatcatatatataatcattaaagtcaaggtcacttaaatttgtttcctattttatcttctgagagatttatgttttgcatttatgtttacatctgggagatttatgtttacatttaggtcggtagactacttttagttaatttttatgaaaggtgtaatgtctgcctctactttcattatttttgtatgtggatgtccagttgttctaacattatttgttgaaaagactatattttctccatggcattgtctttgttcccttgtcaaagctaaattgattatatttgtatgcatatctttctagcctcactatttgtttccaataagatctgtctatgcttttgtcaatatcacactctctgattactgttgctttattgtaagtctttattttaggtagtctcagtcctccaaatttgttctccttcaaagatatgctggctattattgggtcttttgcctttctacatttacattccatttaaaattgatttattaatatccataaaataatgtgctagaattacgagtgggatg

SEQ ID NO: 703365 - DNA, 581 bp, Homo sapiens
cctcatgcctgttagaatggctactatcaagaaacaaaatatagaaagtgatggtcaaggtgtgaagaaaagggaacttttctatgctgttgttggcaaagttggtgcagctgttatggaaaacagtatggaggctccttaaaaagtaaaaaatacaactacctaccatatgatctagcaatctcacttatgtgtatatatccaaaatgattgaaaccaggatctggaagagacattaacactctcacattcattgcagctttattcacaatagctgagataygtaaacaatctaaccgtccatcaatggatgaattgatttttttaaatgtgctatatatacaacattggtcaatgatgtaatggcatgtattagctgaatccaaagttgaagtgaattctaaaattacaccaagaccttgggggaaaaaaagaaaagaaatgtaaaaaaaagaaaacaaaagtgctgtatcaacgacataaacctgttggcccggcacagtggctcaagcctgaaatctcaacacttgggaggccaaggcggttggatcacctgaggtcaggagttctagaccagcctg

SEQ ID NO: 703366 - DNA, 581 bp, Homo sapiens
cctcatgcctgttagaatggctactatcaagaaacaaaatatagaaagtgatggtcaaggtgtgaagaaaagggaacttttctatgctgttgttggcaaagttggtgcagctgttatggaaaacagtatggaggctccttaaaaagtaaaaaatacaactacctaccatatgatctagcaatctcacttatgtgtatatatccaaaatgattgaaaccaggatctggaagagacattaacactctcacattcattgcagctttattcacaatagctgagatatgtaaacaatctaaccgtccatcaatggatgaattgatttttttaaatgtgctatatatacaacattggtcaatgatgtaatggcatgtattagctgaatccaaagttgaagtgaattctaaaattacaccaagaccttgggggaaaaaaagaaaagaaatgtaaaaaaaagaaaamaaaagtgctgtatcaacgacataaacctgttggcccggcacagtggctcaagcctgaaatctcaacacttgggaggccaaggcggttggatcacctgaggtcaggagttctagaccagcctg

SEQ ID NO: 703367 - DNA, 581 bp, Homo sapiens
cctcatgcctgttagaatggctactatcaagaaacaaaatatagaaagtgatggtcaaggtgtgaagaaaagggaacttttctatgctgttgttggcaaagttggtgcagctgttatggaaaacagtatggaggctccttaaaaagtaaaaaatacaactacctaccatatgatctagcaatctcacttatgtgtatatatccaaaatgattgaaaccaggatctggaagagacattaacactctcacattcattgcagctttattcacaatagctgagatatgtaaacaatctaaccgtccatcaatggatgaattgatttttttaaatgtgctatatatacaacattggtcaatgatgtaatggcatgtattagctgaatccaaagttgaagtgaattctaaaattacaccaagaccttgggggaaaaaaagaaaagaaatgtaaaaaaaagaaaacaaaagtgctgtatcaacgacataaacctgttggcccggcacagtggctcaagcctgaaatcycaacacttgggaggccaaggcggttggatcacctgaggtcaggagttctagaccagcctg

SEQ ID NO: 703368 - DNA, 3266 bp, Homo sapiens
tgaaaaaaatagaaaaggaaatggtaactatgtgaggtgattgatatgttaattaatttgattgaagtgattatttcacaatatatgcatatatcaaaatatcaagttgttcatgttaaatatatacaatttttgttagtcaattatatcttaaagctgaaaacaatttaaaagttttaagtaagcaaaaaagttttgatacctttcaaaatcctcacgtccaattactatcacatagggaattagacatcaacatatacatttctgggaatacaaatattcagtccatatcattccaccacttacctcttaaaattcatgtctttctcataggcaaaagaattgcattctatcccgactgctccaagagtcctaactccttccaccatcaactttaacatctgtagttcaaagtttcatgtaaatattatctagaacagatatgggtgaaactcaagatacaatcctgaagcaaaatttctctccagatgtgaatctatgaaaccaaaaaagttatatgctttcaaatgcagtgatgggatgggcacggaatagacattcccattttgtaaaaaagattagggaagaagcaagggataacaggttctacacaaatctaaaacctataacagcaaacaatatgagttcctagaactcaatgataatcctctttggctctacgttctgccttccagactcactggggtggtgattctgcctacaggactcactgaggttggattatgcccccacaaatatgagtagccctaccctcatgcctgtgctattagtagtcccactctttgaaaccaaggtggaggtaatcctgctccccaggttcaacactctggatctgtggctggagtggcagccttaatacagagatcatctttggcatacttctcttgtcctgaagaatagcacacattttacagccaaatagctctataatctggtcctatagtatctaaaaagtctgatggccttctttcatcctatcatgtcttccttcagttcaaattagcagtgtttctgctggggtggctgattaagactgtgcttcacacccatactgatccttttatcaaacagttgttgggcaatttgcaatatgaataggctgcaatatggataggttgcatatgtataggctgagaaatctctaagtatttttctgctcatttttgtttaacaactccgtcttcaatatgtttctttcttcttacattttattataatcagtcaggagtaaccaagctgttccttcaatacttagcttagaaatctcagctaaatatctatctttatttcttgcaagttctatattccagaaagcactagaacatgaatacaattcagccaagttctttgccactttataacaaggattaccttttctcccttgtctaataacctttcttattcccatctaagacttcattacattgaccttcaccattcatatttctaccaacattctatacatgattgtttgtgttctttatgaaaatgggagcttcttctccaggtctctatgtcctgtctaacacccaccagaattgctttgaatagttcattcagggaaatattggttttatttagcatgtatatcagtactctttcagcctttacttattatccagttccaaagtaacttccacatttctcccatccagagcatttattttagaattcagttcagtatagaaaaatgaagatgatgcaacccattatttttgagtttataaatgtatgggataaaatgtctcacccattcaacataactaattgtgaagttaaaaatctaatttgttatttaaacactaatgaacagacattacagaaccaaagacatctccttagctaacagcctgtactaagagtacttttcttagttttggtttcagctgcaataatacaaaatttttaaaactatctccagtcattttgtcacttaacatcatgactccaaaaataataaaaagcaaaaatatccaggaatcagcatactaataaatctcataggtataaaaatattattcttttcaaagctaatgactaatactattcaaataagtatggtttttaaaacagaagtttgcctttctgaagccatttaatggatataacactacaaaaaaatacatccaagtcaacagracatttttcagattttaaactttattaatatcagtacacaatcctgatttcccatttttaatttttttcaacttttattttaggttcaggggtaaatatgtaggtttaataggtaaattgtgtttcacagatgtttggtgtacaaattattttgtcacccaagtaataagcacagtactttatacgcagtttttccatcctcaccctcctcccagcttccaccttcatgtaggttccagtctaggttgttcccttctttatatcctaatgtactcaaagtttagctcccagttataagtgaaaacatttggaatttggttttctgttccagtgttagtttgcttaggatactggcctgctgccttttatgtccaaaacggtatttcccaggttgcagctccatccatgttgatgcaaaggacatgatctcattcttttttatggctgcatcgaattccatggtatgtatgtatgtatgcatgtgtatatgtgtgtgcatgtgtgcatatgtgtgtgtacacatacatatatatacatatatgtgtatatgtatatatttgtgtatatatatgtgtgtgtgtatatacatatatgtgtacgtgtgtgtgtgtatacacatatatatgtatataacattttcttcatctagtctgccattgatgggtacttaggttgattccatgtctttgttatggttacttgtgctgtgctgaacatgtatatgcatgggtctttatgatggaatgatttgtattcctttgggtatatacccaattatgggatttctaggtcagaaggtaattctgttttatttgagaaatcaccaaactggtttccacaatgactaacctaatttactttcccatgatcattgcataaatgttccctgttgtccccaaacatacaagcatctgttactttttgacttttaataatagccattctgactggtgggagatggtatctcattgtgggtttaatttgcatttttctttcttttttttttttttttttttttgcctattaaaccagtttatttgtttctaaagagtttaatgatacgggtttgctatttccattagagcatcctttttctggccattcgg

SEQ ID NO: 703369 - DNA, 3266 bp, Homo sapiens
tgaaaaaaatagaaaaggaaatggtaactatgtgaggtgattgatatgttaattaatttgattgaagtgattatttcacaatatatgcatatatcaaaatatcaagttgttcatgttaaatatatacaatttttgttagtcaattatatcttaaagctgaaaacaatttaaaagttttaagtaagcaaaaaagttttgatacctttcaaaatcctcacgtccaattactatcacatagggaattagacatcaacatatacatttctgggaatacaaatattcagtccatatcattccaccacttacctcttaaaattcatgtctttctcataggcaaaagaattgcattctatcccgactgctccaagagtcctaactccttccaccatcaactttaacatctgtagttcaaagtttcatgtaaatattatctagaacagatatgggtgaaactcaagatacaatcctgaagcaaaatttctctccagatgtgaatctatgaaaccaaaaaagttatatgctttcaaatgcagtgatgggatgggcacggaatagacattcccattttgtaaaaaagattagggaagaagcaagggataacaggttctacacaaatctaaaacctataacagcaaacaatatgagttcctagaactcaatgataatcctctttggctctacgttctgccttccagactcactggggtggtgattctgcctacaggactcactgaggttggattatgcccccacaaatatgagtagccctaccctcatgcctgtgctattagtagtcccactctttgaaaccaaggtggaggtaatcctgctccccaggttcaacactctggatctgtggctggagtggcagccttaatacagagatcatctttggcatacttctcttgtcctgaagaatagcacacattttacagccaaatagctctataatctggtcctatagtatctaaaaagtctgatggccttctttcatcctatcatgtcttccttcagttcaaattagcagtgtttctgctggggtggctgattaagactgtgcttcacacccatactgatccttttatcaaacagttgttgggcaatttgcaatatgaataggctgcaatatggataggttgcatatgtataggctgagaaatctctaagtatttttctgctcatttttgtttaacaactccgtcttcaatatgtttctttcttcttacattttattataatcagtcaggagtaaccaagctgttccttcaatacttagcttagaaatctcagctaaatatctatctttatttcttgcaagttctatattccagaaagcactagaacatgaatacaattcagccaagttctttgccactttataacaaggattaccttttctcccttgtctaataacctttcttattcccatctaagacttcattacattgaccttcaccattcatatttctaccaacattctatacatgattgtttgtgttctttatgaaaatgggagcttcttctccaggtctctatgtcctgtctaacacccaccagaattgctttgaatagttcattcagggaaatattggttttatttagcatgtatatcagtactctttcagcctttacttattatccagttccaaagtaacttccacatttctcccatccagagcatttattttagaattcagttcagtatagaaaaatgaagatgatgcaacccattatttttgagtttataaatgtatgggataaaatgtctcacccattcaacataactaattgtgaagttaaaaatctaatttgttatttaaacactaatgaacagacattacagaaccaaagacatctccttagctaacagcctgtactaagagtacttttcttagttttggtttcagctgcaataatacaaaatttttaaaactatctccagtcattttgtcacttaacatcatgactccaaaaataataaaaagcaaaaatatccaggaatcagcatactaataaatctcataggtataaaaatattattcttttcaaagctaatgactaatactattcaaataagtatggtttttaaaacagaagtttgcctttctgaagccatttaatggatataacactacaaaaaaatacatccaagtcaacaggacatttttcagattttaaactttattaatatcagtacacaatcctgatttcccatttttaatttttytcaacttttattttaggttcaggggtaaatatgtaggtttaataggtaaattgtgtttcacagatgtttggtgtacaaattattttgtcacccaagtaataagcacagtactttatacgcagtttttccatcctcaccctcctcccagcttccaccttcatgtaggttccagtctaggttgttcccttctttatatcctaatgtactcaaagtttagctcccagttataagtgaaaacatttggaatttggttttctgttccagtgttagtttgcttaggatactggcctgctgccttttatgtccaaaacggtatttcccaggttgcagctccatccatgttgatgcaaaggacatgatctcattcttttttatggctgcatcgaattccatggtatgtatgtatgtatgcatgtgtatatgtgtgtgcatgtgtgcatatgtgtgtgtacacatacatatatatacatatatgtgtatatgtatatatttgtgtatatatatgtgtgtgtgtatatacatatatgtgtacgtgtgtgtgtgtatacacatatatatgtatataacattttcttcatctagtctgccattgatgggtacttaggttgattccatgtctttgttatggttacttgtgctgtgctgaacatgtatatgcatgggtctttatgatggaatgatttgtattcctttgggtatatacccaattatgggatttctaggtcagaaggtaattctgttttatttgagaaatcaccaaactggtttccacaatgactaacctaatttactttcccatgatcattgcataaatgttccctgttgtccccaaacatacaagcatctgttactttttgacttttaataatagccattctgactggtgggagatggtatctcattgtgggtttaatttgcatttttctttcttttttttttttttttttttttgcctattaaaccagtttatttgtttctaaagagtttaatgatacgggtttgctatttccattagagcatcctttttctggccattcgg

SEQ ID NO: 703370 - DNA, 1558 bp, Homo sapiens
tgtatattcaaatagatgatagatagatagatagatagatagatagatagatagatagatggatacatagatatataagcagatgtatagatcacattttctttatccatttgtctgtcatcggacattgagatagcttttatatcttggctattgtgaataatgctgcaatgaacacgggagtacaaatatatctcctctatcctgagtttaattctttggatacacagccagaagtggaattgctggatcataacagtaattctatttttgctttttgaggaactctcattctgttttttatagctactgtaccatttttcattcccatcaacagtgtataaaagttctagtttctccacaacttcattgtttttttgatgagtcattctaacagatgtgaagtgatgtctcaagaaaatgcaaatcaaagccaataaaatttgctttatttatgtttaacaaatgtgacyggttttactcatcctgctgggatttctttttttgcaactaaatttaaaaatgtgttactactttactttaaatacaaattaaagcgttctatatagatcatgttaattgcaagaaaatgtttcatcattttaactcttaatataatccagaagaaatgcatatctttaaaagaattatgaatgaatagaaaactcaactttaattacaattcctgcctaataaaattttttaagtagtatatgttggatgtggcctgcagaaggatgtggctcattttgatagaaaagattctagttgtctcttttgcagcttattaattgctgcaaaagacatgttttgtttctttggttcccctggaggattaaataccacataacatatgttagattttggcaatcttaggtttacagaagtttaaatatatttgaagctgttgggcatgaaattatttaatttatctcatgagacgaaatgctaacaatgctttaaccaaataaaactgctttctatgcacacatttcttcatatcacaagaagctactgcattagctatcagatctaaagacttagttaatacctggataaaagataagtacaacaaacaacaatgtattctttgcaaaaataaaagatatgttagcacaggaaaaacaaaaatgttaaaatatttaaaaaataagaaagagtctttagaaagtgaatttttttcaccaaaattgtacagatgtatgactatgtagtaagaatgtaatagctaaattctgtcatataaactgaaaaataaaaacttgaaagctagcaaactaattacaagtaatttaatggcaacacatctaaatgaaatggtaattacacttaatttttatttaaaattaatataaaatagaaacttgaccctttcctctgatatgtagaaaaccacaaatttgatccagattagagctatttcaaaaaacaatttctgaaaaatgtaatttatatcaggaagaattctgaattgtatcttttttttattttttcacaaatttttgagacacatattgagttgacatgacctttaaggtacttatgatctactcattct

SEQ ID NO: 703371 - DNA, 602 bp, Homo sapiens
tgaggcattcaagtagagatgaccagcaagcagttggatatatgagtcagagaaacaaaagaagtagcaaatttttttttttttttttttttttttttgagacggagtctcgctctgtcgcccaggccggactgcggactgcagtggcgcaatctcggctcactgcaagctccgcttcccgggttcacgccattctcctgcctcagcctcccgagtagctgggactacaggcgcccgccaccgcgcccggstaattttttgtatttttagtagagacagggtttcaccttgttagccaggatggtctcgatctcctgacctcatgatccacccgcctcgacctcccaaagtgctgggattacaggcgtgagcaaattttaaataagaagaaacagtcaacagcatcagacatagtaggtatgtccaacaccataatggctgaaaagtgcccacctagtctggcaattagtaggtcattggtttattaataaccggcatgttaaagttgggtcaggatgagctcagagtgtagaagaaaaaccaattgccaaactcctccggcgaggaaataaaagtgttttgaacatttgttggtgaatcat

SEQ ID NO: 703372 - DNA, 2342 bp, Homo sapiens
tgaagattttttcctttattctacaggtctaaaacttctctgggctacacatccagaagatcctctaagtttggctggtacctgtgattcctttctgtctaaagactgggatgttttcttctattattctttaattttctaaagtatctattcagttactgcttccattgtgtatgtaatttatcatatttgtcttttcgaattatttctctttctaatatcggtctgttttgcgctgatttcgtaaatgagaatatggattagagattttcttgtatagtgagctctgctctctagcgctcattccattgcagaggaggagaggacatctgctctgatttctcaggccggcctcctcttccagaactgctcagctctttacctatctagttgtgttcactgtttggtccttcttagtaaggagaggctgggagaattgaaatgggttgcaatcagagactctttttgccctgttcaaatcttcaaggccaaagaaggggaaggcttagatttatcatagcatagaaatctcatagattaggagaaataaggaagcaacaggggcagggggagccttgataaggagtttcccttttgttcggagaaacgcatctatgtgttatggctgcccaaatgcaatgaggtagtgaccccttccccagctgaggtgtttcacaaaataccttccatttgcatggtgttgtaaggttttaaaattatattttcagtgataaagttttgctgacwtattttcacttagagtgtaagaccctcgaagacagagggtttttttgcttatttactttttgtactccagagttgctactatttgatccttaccacaaccctgcaaggtagacaaggcacctgatgttatccttattttgcagaaaaggagacagatgccccaataaattaaatgagtcactcaagatcacatggctgaattgggattaacacccaggtcatccttagtacactaatccccacttaccatcctttcttccagaactaaaggggacgttctgggtgctgtttgtcctgctttggcaacaatagggacttaatctttcattatttgtgtagcagagcaacttaagtactgttttccctcatttcttctgagactgacacaccactaggcctgggcgtacacatgaagaattcccatccacagcagataaagccacctagacagcaagggagagagaaggggagggagagaagcccacccgctgagagggggttgtggccgagagcagagtcattggctcctgtcctctggtccaggtagcacctaggaagggatcctctatccctgtggtttcagcgttctttgccgaatctgtctcttttccctgaacccctgcagctaatgctcctgggatatgctggcagagttactgctgttaccattctcatttctttaggctttaatcaagctctcctgtgaagtgctacatcaattcaattttgaatttcacatataaaataatgaaatgagagtgaagcgtgatagacataaaatgtttttttaaaatgaaaatgatatttttaatttaatcatataaaaatcatctggatccagtacatgtaagtggcagagagtttgctatattctcttaccaatggcctcagaaagcccacgatccacattggttggtgaatgatttccaatttctttaatattttcccttctctccattaagccctgaccctggcattctttaaaatcaacccaagaactcacctcctatgaaaatgtattcatgggaatacttatttatagaatatataaatattctatgttcatttatacatgatacttgaaaaacctggtgtgatggaaagaacatgagtccccatcagtctgcaggtctgagttctagttcccgggcctgcagacgggctgaactccttcagtctcaatttctatctgtaaaacataggcatggaactaagtgacactgcaaatctgtaaattgttaaggtgtttttcttcagttatttaatacttacctcttcctctgatccaactggattgtgaatcccccaagaacagggatcacattctcagcatcttctgcacgtctgtccctaccacaggccgtgtggcactgcgccatcccccagtggttgccttgttcatgctgcctgcccgcctggctgatagcacctgtggtagccaggaggtggcacttcggtattttatgcaatagaagaacagaccacagaatgaggaaatcactctgacttctgctttattgaccaaagtagaatatctagagatcaaaacagccagggtgtgcaattttttaaatttataggcaatgaatataatt

SEQ ID NO: 703373 - DNA, 1166 bp, Homo sapiens
  misc_feature 651, 652, 653, 654, 655, 656, 657, 658, 659, 660, 661, 662,663, 664, 665, 666, 667, 668, 669, 670, 671, 672, 673, 674,675, 676, 677, 678, 679, 680, 681, 682, 683, 684, 685, 686,687, 688, 689, 690, 691, 692, 693, 694, 695, 696, 697: n = A,T,C or G
  misc_feature 698, 699, 700, 701, 702, 703, 704, 705, 706, 707, 708, 709,710, 711, 712, 713, 714, 715, 716, 717, 718, 719, 720, 721,722, 723, 724, 725, 726, 727, 728, 729, 730, 731, 732, 733,734, 735, 736, 737, 738, 739, 740, 741, 742, 743, 744: n = A,T,C or G
  misc_feature 745, 746, 747, 748, 749, 750: n = A,T,C or G
tatcttcttttgaggcatgtcttgaaccataacattttgtcagctcattttatctctttctataatcagagaaagtgttcaaccaatatcattatatattgttaaattgttacatatcactaaaatattgaaagtattttcattctgattagtatagccactgtccttagttctatgagtagcccacaccaatactctgccccccaccatattaatgctcactcaagcagcaaggctccaggcatcactgcccaagccagtcagccatcacacaccctatccatgccctacaccagtgtcaccagggatctctggcggccagcaggccaggcctggccctgcctgttctcccagctaaagcatgcctgaatttaggtagaggagatggaagacctgctggtagttctggctcccctctgagcaaatgcccaatgttatctacaccctcaaagctaccacaggcagaaacacccctatgaccactgagacatttatagccaacagacctctttatgtctgagaaaagggaagaacaaagtgcctatgggggagatctgaggtgggaaggtgcttaagatataggatatctttatggaatccttattgaaattcatcttgagcaaataaatgagtttgttaaaattcactaannnnnnnnnnnnnnnnnnnnnnnnnnnnnnnnnnnnnnnnnnnnnnnnnnnnnnnnnnnnnnnnnnnnnnnnnnnnnnnnnnnnnnnnnnnnnnnnnnnntacaaatcatagcccactttaagactggttagttatgataaacagctcccttacacacacacacacacacacacacacacacacacacacacacacattaacaaagtaagcctgttctaggtcctctcaaaaaaatatactcttggctttatgaattgggttgatatcagatractgaaagatattttcagtcagttgctgagtttttgggaaatgcagcaggtagtagaaaattcaagcaatcagggtacaattaatgaacaatatattatttggttgttgttttaattgtgttaaattttatttttaaaggtattcaaaactattataatttgtagatttatataagaaaatgtttgcgtgcacgtgtacatctactattaaactttcatcgttcctaaaaatcttaaagaatg

SEQ ID NO: 703374 - DNA, 1282 bp, Homo sapiens
gatctgaacaaatacaagtgtcttaaaagcagtatattttgcaactagagcaaggcctccactctgcccaagaactcctggctaaatgctggaaatacctactgttctatttagagcagtttaacgttttttttaaataaggaataaactgtatctgtttttatggtcaagttaaaacaagactcctacctgtaagcttgacaggtaaagccacaccaatcttttcagctttaaaacaagaaaaaaaaaatctgtttcatgcttctcagcctagacaacacaagttatgtaggttttttcccttcagatttagtgtaaatgtccccacctgacacacgcaaaaccaaactatcaaacagaatgatgacgccgatgtgcaacacctgtactttcagggcctccaacaaaggaagacagaaatttctccatacacacctgctgggtggstggatgcctttaacctcttcttctcctgatgggtccccacaaggcagaaatggaaaagagtacttgtcagagaggcactaagaaggacaggcaaaccaaactgccctatattacaagatttaaatgtttaattatagaatatatctggcaacatgctgggaaggaaactttatattaatcaaaacgaaaaacaaaaaaaaaaacagaattcacaatttctcctagccaaactggaaaaaaaaaaaagtaggtttctaaaaacaccaaaagaagacaagttattatttaaagcaaactaaacttatgacattttgtagcatgtatggtgtattaggtcattctcacactgttataaagaattgcccaacactaggtaatttataaaggaaagaagtttaattgactcacagctccacaaggctggggaggcctcaggaaacttaaaatcatggccgaaggggaagcaggcacctcttacatggcagcaggtgagagagcttgtgagagaatgcaggaaaaactaccgtgtataaaaccattagatcttgtgaaaattcactcactatcacatacaagcaagttcacataccaaaatagcatggggtaaaccaccccatcatccagtgacttccctcccttaacatgtggggattacaattcaagttgagatttgggtggggacacagagcctaatcaattcatttggtaagcagttcttattactagaaaatttatcaagcgtaaatacagcatatatatctccgaaaaaaatacttttgaaagacaaagacatgtcatttatagagcttaaatatttgcatacttaatgtggtac

SEQ ID NO: 703375 - DNA, 1038 bp, Homo sapiens
ttactctgataaacgaaggctactttcagcatatatggaaactgttaatagtccagccatcatggacggtttgataggtttcagcctccctcccatgccataggttctatatggagaagagccatggtctcaatgtattaattatatccaatcatatattgaacagcatctataggcaatgactgggacatagggaacacactcaaccaggaaagagatcaatctgttctattacagcaactacagaagctaatcaatgctaatgaaaattgagttgaagacattctagatagtctctgggaaattagtgtatcracatgatcaaaaagaatactagaatattttcagcagtactataatgtaaattgaatacttctatttactgggtagaatgttcagtaagcatgtcttgccacgtttcccaggcaatgcaggtgctccatgtaactgaaacattacattgcaatctgatggggcatctagggcagtaatgcaaaagatattaaatagaacagaccctttagagtctcattagatctaattggctttggagtcatacccagattacaatgatgctacccaaacattaaaaatcttgttgcatatgaaactttagttaagctacaaatagaattatactaacacacctaacttctatgagaaatagtcaattcttccagagatatgaggctattctaacaatactacagccagacttacaataagccctcaacaggattcctgagagaattcagtcctaaaaaaaaaaaaaaaaaaacccattatgtgtaatacatcagcttctatacgtctaaaatataccagatatgttccctgggagaattaagaaaacagccactgtcatcattttctatagagcttaattctcttacagaactgcagttaagcaaaagtagccagtcaacatttggccgcttttatgagtcagactgcaaaatttatttgtgcccttaaactagagttatgttgggaagaaaataaccacaagagcaatgcaacttactctaacatgcttta

SEQ ID NO: 703376 - DNA, 1038 bp, Homo sapiens
ttactctgataaacgaaggctactttcagcatatatggaaactgttaatagtccagccatcatggacggtttgataggtttcagcctccctcccatgccataggttctatatggagaagagccatggtctcaatgtattaattatatccaatcatatattgaacagcatctataggcaatgactgggacatagggaacacactcaaccaggaaagagatcaatctgttctattacagcaactacagaagctaatcaatgctaatgaaaattgagttgaagacattctagatagtctctgggaaattagtgtatcaacatgatcaaaaagaatactagaatattttcagcartactataatgtaaattgaatacttctatttactgggtagaatgttcagtaagcatgtcttgccacgtttcccaggcaatgcaggtgctccatgtaactgaaacattacattgcaatctgatggggcatctagggcagtaatgcaaaagatattaaatagaacagaccctttagagtctcattagatctaattggctttggagtcatacccagattacaatgatgctacccaaacattaaaaatcttgttgcatatgaaactttagttaagctacaaatagaattatactaacacacctaacttctatgagaaatagtcaattcttccagagatatgaggctattctaacaatactacagccagacttacaataagccctcaacaggattcctgagagaattcagtcctaaaaaaaaaaaaaaaaaaacccattatgtgtaatacatcagcttctatacgtctaaaatataccagatatgttccctgggagaattaagaaaacagccactgtcatcattttctatagagcttaattctcttacagaactgcagttaagcaaaagtagccagtcaacatttggccgcttttatgagtcagactgcaaaatttatttgtgcccttaaactagagttatgttgggaagaaaataaccacaagagcaatgcaacttactctaacatgcttta

SEQ ID NO: 703377 - DNA, 591 bp, Homo sapiens
acttctttttccctctgacttttcataactgtcaaaatgccaactccaataaagccaattattgactttgttcttacctaaacccaagtcgccaaatacatacagaaagtcacatataacagggtacagtgtttctacaataaaygcatcatcaccaacctcaaatgcaccatcaaaatacctgggaatcctgctacagttctctggtcatgcactaacctacccccagcaatgactattttcaacctctctatttcctgcctcaatctcacctattttttaaggaaaaaagaagccatcagaaagcaaattaatcacctttatgataccaaacatacacaattaatgatatatgtaccccctcctcaccttcctcctgccacaacacagaaactgttcatcccaaggaccatccctttatggctgatatgaagccttatggatcattcctttcctatcttgcatttgacccttctagaaccttctcactgactttgaaggaattaaaaacacaaaacaaaactatttgtttaatttttttttaaaaactaagtatgtaaataaaaaagtaataaaaaaattttcctcatt

SEQ ID NO: 703378 - DNA, 1405 bp, Homo sapiens
tggtatctccacgaggggatggactttcatctgttcgactcactgcctggagcatcgcaggtgttcaataaatatttttcgagtaaagtaatgaagtcaagattcattctgagtcataagagggacttgggagaaaaggagcggagcagccgttatcccgagcccgaatcctgccccycgctcctccatctactggctggatgacacccttcagaggctgtttccttttttggacagtttccgacggtggggcggccaaggtgaatcatgggctccccagcacctgggacagagatgacccgcgctgaggccaggccggctccagcactgaccttgagctcttgggagacccgggccttctgccggtacacggagtacagggcggcggtgaccacagaggtggtgcccaggaggatgaactggcacagcgagggccgccctccgctctccatgacggcggcgagccccggtggccgactgtggcgccaaggataggcctggtgacccccgactctccacctccttccgaccaggaccgcacccccccggcctaacctgaccggaaactcgaaatcagtcgcccagcgatgacgcacgacgccggaaccggaagcggggcaaggggttgtagagggaaccggaaggtggggttgcccgggtgacaatcaagctgctgcggcctccagggaggtcctgtctccccagccgggtgtcggagagcgattggggagctgagcgaccacccaccgctccatggccgtccccttcgaaacacggcgcactggccatgactgactcgcccatcgccctggtttccgtccctctggtttcctggggttactgggctgtttgatgggttattccatgtcttcgccattagattggcaggaaataaaataattgtgtattaaactcttatgagtaatatacgtttaagtttcagagcaaactctcaagacttggaatttattctggccactttacagatgagaaaagtgaggccatagaggttagggaatgatgtgctcgaagtctagtgagtgctagagaggaattcacccaactccaaagccctcaactctaccccaggagggcagattatatcaccaaagtagccccttaatctgccatcaccacatagaacaacatatttattaaataataattacggctacgcttagtgcctattatgtgtcaggttcgaggcgggggaggttttgcaggcaccatcccactgaaccttcacaacacagctataatgcagattaccgataaagaaactgaggctcaggtaagtaacttgctcaaggttatacagctaaaagcaataggtatggccataaaacccaggggatccttctcagagactgttccctgatctctgtaatgcatctcctttctaaaa

SEQ ID NO: 703379 - DNA, 658 bp, Homo sapiens
cacgcccggctaatttttttttttttgtatttttagtagagacggggtttcaccgtgttagccaggatggtctcgatctcctgacctcgtgatccgcctgccttggcctcccaaagtgctgggattaccggcgtgagccactgtgcccagccctaacaatatttttcaaaaccagtatctattgtagtcagctacactttgtttgaagttgagtaatgtcacttcagattcttggtctcctgttaagcgtaagtaaaaataaatttagcacattttcatcaaaaagtgcattcagagtacaagttgcatttttataatatactattctcattcgtttgatggtttgttcatacacatcatgcctagaatgacgcctggaatgataaaggtcgtctgatatttaaaattaaaaagtttaagtcttatgatttgagatgattttttttttgttttcatgcttctacacagcttgaaatttttataatcggcattatttttaataaaagccgaagttattaccaaaacacatagggccttatatctscaaggagttggcagtggtgttggctgatggaggctaatgcacctttaaggctgcaagcttccatgcgaccatcacatgctggtggacagggagcctcggcaaggagactgaatt

SEQ ID NO: 703380 - DNA, 1747 bp, Homo sapiens
ctgacataaaaacgaaatcactgcttcagactccaggcctaaaaatatcagggtaggccctagtacacacttactatccttaatcaaacttttcttactttctttctttcttttctttctttctttctttctttctttctttctttctttctttctttctttctttctttttctttctttctttctctttcttccttccttcctttctctcttccttccttcttttctttccttccttcctttctctctctctctttctttctttctctttctttctttccttctttgtttcttctttctttcttcctgcacttaccacaagtgtcttctacaaccattcaaatgttttctgcagcaagccaagtgcttcttctccaggcctacatttttcctgggggagagaagacatctctcctcagtttcagattacagcaaagacaccatgaactatctcagttttatgttacccagtcaaaaggaagacagtaatatttgctacgatttttggttgcaagtaacaaaaattaactttcggtaacttcaaatggacttcaaatctccaacattgaccttcatgcctactgtatatgaatgttcaataaatgtttcttgagtgactactaataggggatctttttatttggtatgtagctatgcaccaggcactgtgaagaacaatttatatgtattatctaacttaaatgtcacagttattatccgtattttacaaatgaggcaacagaaattgttcagtgtcatagagctaataagtggtaacgtcaccagaactgtggcttatctagagaaagccagcaaatgggataattccttaaacacgtgatgtgctacaaagaaatggctgctgccacttttattttagttcaattgtctttgaactacattttatcagcaatctaaacatatcataaactagaaacagaacagaaatgggaaattgtttctctacctattacatctatatctatttacttaaacagtttatccacacctatattttttctcttgtggtcagggaaacttttgaagggagcaaatactatcacctacaagatggactagggctttgggactcagtcagagtctatgattttagggagcaggaggaaatagaattttacatctatattttatttaygaatatagcatttccacatgcataagccaattcctagacagaaatgtaacattgaaatgcatccatgaatccttttctttaaaaagaaagggaaaaaatttgacaattgctaattggttaattagcgcttaactaaagtgactccaaatttgagcactcccagatgaacagtaggaaaagcaagcaggaaacaaatgtaatgccttgaagtgaaatgcacacggctgttagtcagacaaacagctggcctgttttcttgcccatcctttttgaggagtgatttcctaaaataacatgtgaaaatgccctgaacaaaggagataaccaataaatattaattcacttgcctcttccaacccgcctccatcccctgtgtgcaaagatctgaggctactccatttctaatcagaaagaatgcaagttgtgcattcatttgttcaacaggatttcctgggtgtctgctacatatcagacaccatgctacacactgagaaatagcaataaaccaaacaggcatggtccttgttcttggtgaactcacaggaatagactttaagtaaatgattacttaacaaccttcatgatgtgaag

SEQ ID NO: 703381 - DNA, 1532 bp, Homo sapiens
agagatatggtataaaagaaaggttaaattttataatgtctagtttttttcaactttaggattctaagaaaaaaaacgataaatgccattgtaatgctcacaaggattgttcatttatattgtatttgtgggattcagctgaaaaataacttctaaaattccagctctgattggtaattcattctgtcgtttctgaggtattggcttgaacgcctatatttgatttctgtgcttgagtaaacccacccactggccagactgaaccccagtgtgtttgacattttcccttttgaacagcatccagcataatgtagcttactggaaaaaatctacacagtgtgactcagaaagtcatgcaagcatttctttctgtggaattctttatttttttttcccaaaatgaaaatagatcacattatttgaggataaacaaatctgaaagtgtttccagtaatatctttttatgtataagctgctgaagattaactagcagttcttggctaagatcttgcttcctacctaaatatctcagtaaatgctgtcctattgaaataaaattcaacttttcaaagtttccaactggaaatagaaaatgaagtcctacttcccagaaggaggagtcatgctttctttttgtttaaaatgtccgtaaattatccaacacaggcccagccacgcagtgtacatttaatgccctctaaatgaaactatgtaagataaaattacagcttatgaaaaaccatgtaagctacatggtttaacaagatctggattcttcttcctttatcttcctttgttttctgataaatttcgggaaatactcccaaataagcacatgtattgtcaatactcataatttaaaatttattatttgttttaatttttattttaggtttgggggtacatgtgaaggtttgttgttacatagataaacatgtgtcatgggagtttgttgtacatattattacatcacccaggtagtaaacccagtaccctaatattgtttttaaggagttgtattttagatatkgttttataattattaatggagtgttattagctgaacatgcacatttgagatgttctttaggtagaaggatctgtatgcaactcggcaagtacttttagaaggtattgactattgtaatgttggcagtataaaaggaaggaagacaggaccataagacttgagagaatggtagtggaaaaagaaataagctacagaatgtttgatctgatcaataaataataaaatagtagctacatgtattgagtatctacattgtatatattagatactaggttaggtggtttgtatatacactgccttttatcgccaccctacaatacagcattatcatctccaatttacgggtgaatgttctgaagctgagaagagctgggattcatagtttgtcccacgataaaacttactttcttcaacctataccatgttgtctcagacgtatcataaataaaaccaggacagacaaagaataaaaatgaaatcttaaaattctcacaatgtaaca

SEQ ID NO: 703382 - DNA, 1532 bp, Homo sapiens
agagatatggtataaaagaaaggttaaattttataatgtctagtttttttcaactttaggattctaagaaaaaaaacgataaatgccattgtaatgctcacaaggattgttcatttatattgtatttgtgggattcagctgaaaaataacttctaaaattccagctctgattggtaattcattctgtcgtttctgaggtattggcttgaacgcctatatttgatttctgtgcttgagtaaacccacccactggccagactgaaccccagtgtgtttgacattttcccttttgaacagcatccagcataatgtagcttactggaaaaaatctacacagtgtgactcagaaagtcatgcaagcatttctttctgtggaattctttatttttttttcccaaaatgaaaatagatcacattatttgaggataaacaaatctgaaagtgtttccagtaatatctttttatgtataagctgctgaagattaactagcagttcttggctaagatcttgcttcctacctaaatatctcagtaaatgctgtcctattgaaataaaattcaacttttcaaagtttccaactggaaatagaaaatgaagtcctacttcccagaaggaggagtcatgctttctttttgtttaaaatgtccgtaaattatccaacacaggcccagccacgcagtgtacatttaatgccctctaaatgaaactatgtaagataaaattacagcttatgaaaaaccatgtaagctacatggtttaacaagatctggattcttcttcctttatcttcctttgttttctgataaatttcgggaaatactcccaaataagcacatgtattgtcaatactcataatttaaaatttattatttgttttaatttttattttaggtttgggggtacatgtgaaggtttgttgttacatagataaacatgtgtcatgggagtttgttgtacatattattacatcacccaggtagtaaacccagtaccctaatattgtttttaaggagttgtattttagatattkttttataattattaatggagtgttattagctgaacatgcacatttgagatgttctttaggtagaaggatctgtatgcaactcggcaagtacttttagaaggtattgactattgtaatgttggcagtataaaaggaaggaagacaggaccataagacttgagagaatggtagtggaaaaagaaataagctacagaatgtttgatctgatcaataaataataaaatagtagctacatgtattgagtatctacattgtatatattagatactaggttaggtggtttgtatatacactgccttttatcgccaccctacaatacagcattatcatctccaatttacgggtgaatgttctgaagctgagaagagctgggattcatagtttgtcccacgataaaacttactttcttcaacctataccatgttgtctcagacgtatcataaataaaaccaggacagacaaagaataaaaatgaaatcttaaaattctcacaatgtaaca

SEQ ID NO: 703383 - DNA, 1055 bp, Homo sapiens
tatggtaggggttgctgatgtggagaattctgataccaacttagtcatccagtattttgtgtaacttgcttttcctgtctgaggtctaaatactgaaactttagaccagggtatatgttatccattctacatctgcactttcagatatgtggcataaccttctttttttctgagacggagtctcgctctgtcatccaggctggagtgcagtggcgtgatctcagctcactgcaagctctgcctcctgggttcatgccattcttctgcctcagtctccggagcagctgggactacaggtgcctactaccatgcctggctaatttttttttgtatttttagtagagatggggtttcactgtgttagccaggatggtctcgatctcctgaccttgtgatccgcctgcctcagcctcccagagtgctgggactacaggcgtgagccactgtgcctggctggcataaccttctaaccaaagattcagttgtttcttccttttgggaaaatcttcctgggtcacatggttgcattcttttcttgctccatatgctggatggctgtgcctctcctccatggctgttatattgtccttattgctttaatcccctccttgggattatctcactctttgattttcagctatgtccatcgtgtgtgtgtgtgtgygtgtgtgtgtgtgtgtgtgtgtgtgtgttctggttttaacgttgtattgtgtttttgttctttatttcttttcttggctctatcttttaaaaaatccattccacttcacactcattaggagagctactatcaaaacaaaacaaaacaaaacaaaaaacagtaagtcccaaatgttggcaagggtgtggagaaattggaacccttgtgcactattggtgggaatggaaaatggtgcaggtgctgtggaaaacagtatggcagttcctcaaaaatttaaaaatagaattagcatatgatccagcaatcccacttctgggtatatactcaaaagaattgaatgcagggactcaaagagaaattcgtacacctatgttcatagcagcgttattca

SEQ ID NO: 703384 - DNA, 1055 bp, Homo sapiens
tatggtaggggttgctgatgtggagaattctgataccaacttagtcatccagtattttgtgtaacttgcttttcctgtctgaggtctaaatactgaaactttagaccagggtatatgttatccattctacatctgcactttcagatatgtggcataaccttctttttttctgagacggagtctcgctctgtcatccaggctggagtgcagtggcgtgatctcagctcactgcaagctctgcctcctgggttcatgccattcttctgcctcagtctccggagcagctgggactacaggtgcctactaccatgcctggctaatttttttttgtatttttagtagagatggggtttcactgtgttagccaggatggtctcgatctcctgaccttgtgatccgcctgcctcagcctcccagagtgctgggactacaggcgtgagccactgtgcctggctggcataaccttctaaccaaagattcagttgtttcttccttttgggaaaatcttcctgggtcacatggttgcattcttttcttgctccatatgctggatggctgtgcctctcctccatggctgttatattgtccttattgctttaatcccctccttgggattatctcactctttgattttcagctatgtccatcgtgtgtgtgtgtgtgtgtgtgtgtgtgtgtgygtgtgtgtgtgttctggttttaacgttgtattgtgtttttgttctttatttcttttcttggctctatcttttaaaaaatccattccacttcacactcattaggagagctactatcaaaacaaaacaaaacaaaacaaaaaacagtaagtcccaaatgttggcaagggtgtggagaaattggaacccttgtgcactattggtgggaatggaaaatggtgcaggtgctgtggaaaacagtatggcagttcctcaaaaatttaaaaatagaattagcatatgatccagcaatcccacttctgggtatatactcaaaagaattgaatgcagggactcaaagagaaattcgtacacctatgttcatagcagcgttattca

SEQ ID NO: 703385 - DNA, 1268 bp, Homo sapiens
tacactgtatagaatgaatttataaataaatgcaaaaatggcttttactgaaactattgatcccccaagaacatatttcatttgcatatctatatataaaaatcatttgcaccgatatcagttacctgcaatttacagagttttaacatagctctaccacactgaaaggggcaaacmccatagaatcccatagcccagaatgatgtgatttaggcacagatttccatggaagacacccagtaatcctttcaatccatgtcaaaatcttttacaatttttcttgacacatggatcttaaacagaagcattttgctgaattaaacctattctcctttaagataaactcttccctgattataacattatatattcaaattataaagcacttagataataaagtataaagaaaataaaaatcttcataatcctatcactccaaggtagttactattaatgcttaaagtatattcatatggttttttctatgtatttgtgtgtgcatgaatggaaatatattaactgttttcaacccagttttaataaactttgctatagaaagttatctatatatatctaattgtgtttatatattccacattgtaagtcacttttttgcttaagatcataaacatttttccttgtcatcatttttaatagccataaaatattccattatatgttagaaccataattaataaatccaccactattagaaatttaggttgtaaccaatttttagttattataaataaaacaatgcacccgtcttatgacaaccttttttttgaagtggtaccattttgctgaaaaaaccaaacatctcacatggcgtctgagtttccagaggatgttgcgatctctagagtgcctgattgcgcctcttctgctttagctcacaagcctacctattgcatcagtggcagacagggatttgaattagaaccagaattatcagctacccagaacaaccacccttgtcattttcctgagacaccatgaagatttagtcacgtttggaagtttaaaaaaaaaaactaagatcatcatgagctttgacagtcaaggccatttaattcaagataatttttaatataaaaatgtttataaggaaaacatatattatttagggcttagtttcttagaatgaagagcctgaggaaatggagaaaatagctttcaggtgggtaacaaattgtcaaatttttttcttgattttcaaaccctgaattttttatatatgagatggtgtttgattagaaacagttaac

SEQ ID NO: 703386 - DNA, 439 bp, Homo sapiens
atttattttagagatagagacrgggtcttgctctgttgcccaggctagagtgaagtggcatgatcaagactcactgtagccttgacatcctgggctcaagcaatcctcccacctcagcctcccaagtagctgagatcacaggtgtccaccaccatacctggctactttttggtggaggggagtagagacagagtcttgctatgttccctgggctggttgtgaactcctgggctcaagcaatcttccctctttggactcccaaagtgctgggattataggtatcagccactgtgcctggtcaaattactacatttctaatgatgtatttttacaatttgggaaagtttgggcaacttctgtgtagtcataaatgtttttctttttcttttcttttctttttttttaaattgagacagagtctcgctctgttgccaggctg

SEQ ID NO: 703387 - DNA, 2512 bp, Homo sapiens
tctgccctccagaactatgagacaatatatttctattgctttaagccacccaatttgtgtcactatattatggaaaccctagcaaattaatacaccttacctattcattattattatttttgagatgsggtctcactctgttacccgggctggagtgcagtagtgtgatcttggctgactgcaacctctgcctcccaggctcaagcgatcctcccacctcagccttgagtagctgggaccacaggcatgtgccaccacacctggctaatttttgcatttttggtagagacagggtttcaccatgttgcccacactggccttgaactgctgacctcaaatgatccgcccgcctcggcctcccaaagtactaggattacaggcgtgagccactgcacccggcccctactcattattaatgtatgtgaaatatttaacagtcctaggcacctaggaagggtcagttaatactggatattatgctgtatatgccttttctacaaccttcagtgttccttgaaatgagataatatatatgaaggcacgttatatactgtgatgtgtaggcaactgcttctataatattaactcaattaacactgatttcttccatgtcaccctgatgtgttgggaccctctgctatatactcccacaccattgtgtcctatttattattgattgattgattttgggaagtcctgttttattttattttaggtttgggggtggtacatgtgcaggtttgttgcgtgggtaaattgcgtgtctctggggtttggtgtaagaatgttcccatcacccgggtagtgggcatagtacctgatatgtagcttttcagccctcatcagcctcccaccctctccctctagtagtccccactgtctatagttcccatctttttgtccacatgtcatgttctatttattaagagcgtcccttgcaattgcttaattatttattgataataacttgcttaatgactttcctgccagacttcagattccacaaggggataccttggtttcttttcctagcctatatccatatagttcagcgttgtgcctggtattgagtaggtgccgaataaacagtgttgactaaagcaataggttggtgcaaaagtaatggcggtttttgccatttctttcaatggcaaagatgaccattacttttgcaccaactcaatatgaaactggaagacccattctaattctcttttataattctactgtgcaataccttttaggcttcttagaggggaattaggatgggctgcagaattattagggaaagactcaacttgagggtgactagaagaagggatgtaagcagggtgtattttctcccatatctctttcaatgacatcttttctttcacagagaacaatagtcaagggacgacacagtcaaacgtggatatttgggtgagtggggtgaagcctggatttgggaaacagctggtacgtataactatgccattttcctacccaaacattaacatgtcttcctgtgatttttagggtagggtagttctatccaggggtaattttgtcctctgtcccaaggtcatctgtcaatgtctggggacacttttggttgtcataccttgggggtgatgtgtgtgactggcatctggtggatggagaccagggatacagctcaacatcctacagtgcccaggacagcctcccacaatcaagaagtgcctagtgccacatgtccatagagatagagaaatacaagcgtagggggaaagtgcctcagctggcattcaaagacctacatcaagcacctagattctcaatgccacacgcaccttgtagcaccttaataaatatcgttgccttctgggctccccactccaacacttgtgcatattccctatttcttacatttcagtaagagtcaatctaattagcttaatttttttggaaggaaaatctgagaagaaatggaagcagagaggactttgcaagaagggctactcaactaattcaaagcgtggagttgagcatctggaatgcgagttttgcttctccaggaaagggtcaaatttctgaatttgatataggtaagagaggctgagtagagtctttatgaccctccataaagaccataaagacgtctgggtcctggctttgtcagggtttctgaatgatgaaatctgtgggctctcaggatcacagaccctctacaccaacattctacatgagaaggactccattttcaaaaatgcaaattcaagggacaagagaataaaccagctctcttcttcttttcaacttcccttggtatgatggaaagtatttaagagcatattcgctatgccaccatggctaggggatagaaaaaacctcggttattttcctactctactctcacatagtaacaagaacacggaatacttcatctctggtcaccaaattattgtgggctccttttccacactgaccacacagttctccagtggaccccagctgggtgttctacaattcaattatgacattatctgac

SEQ ID NO: 703388 - DNA, 2512 bp, Homo sapiens
tctgccctccagaactatgagacaatatatttctattgctttaagccacccaatttgtgtcactatattatggaaaccctagcaaattaatacaccttacctattcattattattatttttgagatgcggtctcactctgttacccgggctggagtgcagtagtgtgatcttggctgactgcaacctctgcctcccaggctcaagcgatcctcccacctcagccttgagtagctgggaccacaggcatgtgccaccacacctggctaatttttgcatttttggtagagacagggtttcaccatgttgcccacactggccttgaactgctgacctcaaatgatccgcccgcctcggcctcccaaagtactaggattacaggcgtgagccactgcacccggcccctactcattattaatgtatgtgaaatatttaacagtcctaggcacctaggaagggtcagttaatactggatattatgctgtatatgccttttctacaaccttcagtgttccttgaaatgagataatatatatgaaggcacgttatatactgtgatgtgtaggcaactgcttctataatattaactcaattaacactgatttcttccatgtcaccctgatgtgttgggaccctctgctatatactcccacaccattgtgtcctatttattattgattgattgattttgggaagtcctgttttattttattttaggtttgggggtggtacatgtgcaggtttgttgcgtgggtaaattgcgtgtctctggggtttggtgtaagaatgttcccatcacccgggtagtgggcatagtacctgatakgtagcttttcagccctcatcagcctcccaccctctccctctagtagtccccactgtctatagttcccatctttttgtccacatgtcatgttctatttattaagagcgtcccttgcaattgcttaattatttattgataataacttgcttaatgactttcctgccagacttcagattccacaaggggataccttggtttcttttcctagcctatatccatatagttcagcgttgtgcctggtattgagtaggtgccgaataaacagtgttgactaaagcaataggttggtgcaaaagtaatggcggtttttgccatttctttcaatggcaaagatgaccattacttttgcaccaactcaatatgaaactggaagacccattctaattctcttttataattctactgtgcaataccttttaggcttcttagaggggaattaggatgggctgcagaattattagggaaagactcaacttgagggtgactagaagaagggatgtaagcagggtgtattttctcccatatctctttcaatgacatcttttctttcacagagaacaatagtcaagggacgacacagtcaaacgtggatatttgggtgagtggggtgaagcctggatttgggaaacagctggtacgtataactatgccattttcctacccaaacattaacatgtcttcctgtgatttttagggtagggtagttctatccaggggtaattttgtcctctgtcccaaggtcatctgtcaatgtctggggacacttttggttgtcataccttgggggtgatgtgtgtgactggcatctggtggatggagaccagggatacagctcaacatcctacagtgcccaggacagcctcccacaatcaagaagtgcctagtgccacatgtccatagagatagagaaatacaagcgtagggggaaagtgcctcagctggcattcaaagacctacatcaagcacctagattctcaatgccacacgcaccttgtagcaccttaataaatatcgttgccttctgggctccccactccaacacttgtgcatattccctatttcttacatttcagtaagagtcaatctaattagcttaatttttttggaaggaaaatctgagaagaaatggaagcagagaggactttgcaagaagggctactcaactaattcaaagcgtggagttgagcatctggaatgcgagttttgcttctccaggaaagggtcaaatttctgaatttgatataggtaagagaggctgagtagagtctttatgaccctccataaagaccataaagacgtctgggtcctggctttgtcagggtttctgaatgatgaaatctgtgggctctcaggatcacagaccctctacaccaacattctacatgagaaggactccattttcaaaaatgcaaattcaagggacaagagaataaaccagctctcttcttcttttcaacttcccttggtatgatggaaagtatttaagagcatattcgctatgccaccatggctaggggatagaaaaaacctcggttattttcctactctactctcacatagtaacaagaacacggaatacttcatctctggtcaccaaattattgtgggctccttttccacactgaccacacagttctccagtggaccccagctgggtgttctacaattcaattatgacattatctgac

SEQ ID NO: 703389 - DNA, 590 bp, Homo sapiens
tgtcgtgtcacgaggacattcaaacagccctgtgggaagacccatgtgacaaggagctgaggcctccagcaaacagccaggtgagtgagccatctcagaagcagagcctccagccccggccaaaccttcagatgatgcagcccctgcccatatcctaactgcagcytcatgggagaggctgagccagaaccagctggagaaaccactccctgacttctgaccctcagaaacagtgccaaatcatgaatgtttattattttaagctgttaaactttggggataatttgttatgtggcagtagataagcaacacaagtaaaaggcattgctttactaagtgccttatgtgtattaatgtattcaattctcccaacaatgttatgtctttccagatgaagaccatgaggcacagagaggtttgttaacttgcccaaggccaaacagctggtaagtgggacaatcctggaggaacattgagtccagaaaggagatcagacttgcagattttttttttttttcgagatggagtctctctctgccacccaggctggagtgcagtggcacaatctttgctcactgcagcctccgcct

SEQ ID NO: 703390 - DNA, 590 bp, Homo sapiens
tgtcgtgtcacgaggacattcaaacagccctgtgggaagacccatgtgacaaggagctgaggcctccagcaaacagccaggtgagtgagccatctcagaagcagagcctccagccccggccaaaccttcagatgatgcagcccctgcccatatcctaactgcagcctcatgggagaggctgagccagaaccagctggagaaaccactccctgacttctgaccctcagaaacagtgccaaatcatgaatgtttattattttaagctgttaaactttggggataatttgttatgtggcagtagataagcaacacaagtaaaaggcattgctttactaagtgccttatgtgtattaatgtattcaattctcccaacaatgttatgtctttccagatgaagaccatgaggcacagagaggtttgttaacttgcccaaggccaaacagctggtaagtgggacaatcctggaggaacattgagtccagaaaggagatcagacttgcagattttttttttttttygagatggagtctctctctgccacccaggctggagtgcagtggcacaatctttgctcactgcagcctccgcct

SEQ ID NO: 703391 - DNA, 1381 bp, Homo sapiens
gttgaccattttttttcaacagcagacactcaatttgatgcacacaccaatcttctcctttgttctagaacaatagtagcagcaatgcatcagaaattgtgggatcttaatgcaagccatgatgttttcaattgtgatggcaattttcactctttccctcagactggcttcttccaggggcttggcckctggacctgggctcatttttgtggctatgtcaatatccttcgtgatggcccagcttggacccaatgggtaatgatctgctgttgtgattactattcattttgcaattttatttcaatcaaaagagtaaggcttaagggttgtggccctacccaactccccagggctgagatcttaactccctgggctgggggcccctctcgaacacacgtggaactgatttagtagccagacagcctaacggcagaaagaattgcactaaagaagctgacttctctgctggcctgtgtttctagactgtgtatatagctaacagtatggagtcattactggatgccagacacagccaaaagctctacccttatctcatttaatcctcccaacagccctatgaagtaggagttatttttaagccccattttacaaaggaggaaactgaggcacagagactcagagccactgaacttataaatggcagagtcatgattttctctcagtaactctttccccatgatcgtcactaaattttttaaatattggacaatagccagggtacaaagaagtgtttaaaggagggtacaggcctctagacaatctgctataatgtaaaataagccaagtagcctctgttgaacaaatctagaatctgtgttctgagtgagataaaaaggggcattaaaaaaaacataaatgatttgaaaagtattatacattatattgaacaatcttcaagatccggtatacaatggaaagggaaaatcataaaacagtacatgtagtatgatcacacatatgtaaaaacaggagagacttatatttacctgtgcacaaatatgaagcaacgtgcaaaaaaattcctggaggaatgcacactaaaccacacttacctctggggagggaaacaagatggagagaacggtgaaaaagagaatttttctatttaactctgtggaattatggtttgctctgactcttttacagtaagaatggactcatgtattatttaaattatttttgtaaatgcatctgaatcaaaaagatcataacaagtaccaactagcgtctgaataaactgggatttggattgtaagatgatgcagctgctttggaaaacaatttggtggttcctcaaactgttaaatgtagagttaccacaggacccaggagttccaccgaaaaacatgttcatagcagc

SEQ ID NO: 703392 - DNA, 601 bp, Homo sapiens
gaagaaatgaggacagrctgggttctattctcaatggagctggggagaaaactaagctcctgtctggtttctttatgaaatggggtacaaagttgtctactaagagtgaaaggtgtgagataaagatgggtgacttaaagagagttgtaagctaaaactcactgtcttgaagaatgggaggaaagattgacagatgacagttattagaatggaagctctatgagatcaaggaatttttctcccctgtgtctccttggtgtttagtgcttcataggtgcccaataaatatttgcagaatgagcaacctcaggataaattattgttttcattttatagtatctaaaatatgatgtggaaataagttaaatctattaacattattataatgaaattgctaacatctcataccatatcatctctctctcctgtttcctataatgctacctaaatagtccttgcgaagttgggatctggataaaatgactaccaaggagggattaaaagtacaaaggtttagtctgaaaattgcctgtacaagatgggtctaggtcatgttcccaggctttactttggttatggtgaagtggtttgcgagtattgt

SEQ ID NO: 703393 - DNA, 1043 bp, Homo sapiens
tttcacctggccttacagctctctcattttttccacgtatctagattcagtcccttctagatatttgtttaatgtttctagattaaggatcgtttttccttgatagagaaaacagaaaagctgagagctgagaattctgcctttcctcgtatctaacattataccatctgccacatgcactgggcctatccttccttgttctcgatccaaaagaagcagctttcaagacactattttgctgtctttagagcattttttgttgttgtttttcagattcagcctctttcctgcattatacccacacgttctagctagacttttatcygggattacatgtcattttttcagtcttatgtgtcctaaaatctggcctgttagagagttccctgtgctgccacactgattccccttgacactgtacttgacaaacacaggttgaacagaatcactcaatttaattattttttcagtggaataacttctaattttattggctacagttttttttttttttttttaatgagatgaagctcttgtcgcccaggctggagtgcaatggcatgatctcagcttactgcaacctctgcctcctgggttcaagcaattctcctgcctcagcctcctgagtagctgagattacaagcacctgccaccatgcctggctaatttttgtatttttagtagagatagggtttcatcatgttggccaggctggtctcgaactcctgacctcaggtgatccgcccacctcagcctcccaaagtgctgggattacaggtgtgagccacggcgcccagcctatttttcagtctccctttcttcagtagtcaaaagcactttgggggatcttcgggtgtggaatcaagtgcaggtttccagggaatctgccttcccaaagtattgggttcaggacgactgtgcccagttcaaccttgccttgctctccactccaaccacgccccaagaggctcctctacgatttccatcagctccctgccccctcccggtaagattccttcctgtgggtcctgacgaaggcagca

SEQ ID NO: 703394 - DNA, 1043 bp, Homo sapiens
tttcacctggccttacagctctctcattttttccacgtatctagattcagtcccttctagatatttgtttaatgtttctagattaaggatcgtttttccttgatagagaaaacagaaaagctgagagctgagaattctgcctttcctcgtatctaacattataccatctgccacatgcactgggcctatccttccttgttctcgatccaaaagaagcagctttcaagacactattttgctgtctttagagcattttttgttgttgtttttcagattcagcctctttcctgcattatacccacacgttctagctagacttttatccgggattacatgtcattttttcagtcttatgtgtcctaaaatctggcctgttagagagttccctgtgctgccacactgattccccttgacactgtacttgacaaacacaggttgaacagaatcactcaatttaattattttttcagtggaataacttctaattttattggctacagttttttttttttttttttaatgagatgaagctcttgtcgcccaggctggagtgcaatggcatgatctcagcttactgcaacctctgcctcctgggttcaagcaattctcctgcctcagcctcctgagtagctgagattacaagcayctgccaccatgcctggctaatttttgtatttttagtagagatagggtttcatcatgttggccaggctggtctcgaactcctgacctcaggtgatccgcccacctcagcctcccaaagtgctgggattacaggtgtgagccacggcgcccagcctatttttcagtctccctttcttcagtagtcaaaagcactttgggggatcttcgggtgtggaatcaagtgcaggtttccagggaatctgccttcccaaagtattgggttcaggacgactgtgcccagttcaaccttgccttgctctccactccaaccacgccccaagaggctcctctacgatttccatcagctccctgccccctcccggtaagattccttcctgtgggtcctgacgaaggcagca

SEQ ID NO: 703395 - DNA, 1043 bp, Homo sapiens
tttcacctggccttacagctctctcattttttccacgtatctagattcagtcccttctagatatttgtttaatgtttctagattaaggatcgtttttccttgatagagaaaacagaaaagctgagagctgagaattctgcctttcctcgtatctaacattataccatctgccacatgcactgggcctatccttccttgttctcgatccaaaagaagcagctttcaagacactattttgctgtctttagagcattttttgttgttgtttttcagattcagcctctttcctgcattatacccacacgttctagctagacttttatccgggattacatgtcattttttcagtcttatgtgtcctaaaatctggcctgttagagagttccctgtgctgccacactgattccccttgacactgtacttgacaaacacaggttgaacagaatcactcaatttaattattttttcagtggaataacttctaattttattggctacagttttttttttttttttttaatgagatgaagctcttgtcgcccaggctggagtgcaatggcatgatctcagcttactgcaacctctgcctcctgggttcaagcaattctcctgcctcagcctcctgagtagctgagattacaagcacctgccaccatgcctggctaatttttgtatttttagtagagatagggtttcatcatgttggccaggctggtctcgaactcctgacctcaggtgatccgcccacctcagcctcccaaagtgctgggattacaggtgtgagccacggcgcccagcctatttttcagtctccctttcttcagtagtcaaaagcactttgggggatcttcgggtgtggaatcaagtgcaggtttccagggaatctgccttcccaaagtattgggttcaggacgactgtgcccagttcaaccttgccttgctctccactccaaccacgccccaagaggctcctctacgatttccatcagcwccctgccccctcccggtaagattccttcctgtgggtcctgacgaaggcagca

SEQ ID NO: 703396 - DNA, 1043 bp, Homo sapiens
tttcacctggccttacagctctctcattttttccacgtatctagattcagtcccttctagatatttgtttaatgtttctagattaaggatcgtttttccttgatagagaaaacagaaaagctgagagctgagaattctgcctttcctcgtatctaacattataccatctgccacatgcactgggcctatccttccttgttctcgatccaaaagaagcagctttcaagacactattttgctgtctttagagcattttttgttgttgtttttcagattcagcctctttcctgcattatacccacacgttctagctagacttttatccgggattacatgtcattttttcagtcttatgtgtcctaaaatctggcctgttagagagttccctgtgctgccacactgattccccttgacactgtacttgacaaacacaggttgaacagaatcactcaatttaattattttttcagtggaataacttctaattttattggctacagttttttttttttttttttaatgagatgaagctcttgtcgcccaggctggagtgcaatggcatgatctcagcttactgcaacctctgcctcctgggttcaagcaattctcctgcctcagcctcctgagtagctgagattacaagcacctgccaccatgcctggctaatttttgtatttttagtagagatagggtttcatcatgttggccaggctggtctcgaactcctgacctcaggtgatccgcccacctcagcctcccaaagtgctgggattacaggtgtgagccacggcgcccagcctatttttcagtctccctttcttcagtagtcaaaagcactttgggggatcttcgggtgtggaatcaagtgcaggtttccagggaatctgccttcccaaagtattgggttcaggacgactgtgcccagttcaaccttgccttgctctccactccaaccacgccccaagaggctcctctacgatttccatcagctmcctgccccctcccggtaagattccttcctgtgggtcctgacgaaggcagca

SEQ ID NO: 703397 - DNA, 1444 bp, Homo sapiens
ggtcatttctctaacagcctcatagacaagatatagcaatgtgggctggatgacaccagtttggtgcatatagagtcggcttcatccaaaggctgagaaaggtccctaatgatgtgccagatggctgtcttccatgtccagttccatctgacattttgctttctaatatcacataaatgtacaggatgcccatttatcagttctgcagaaatctcaggagaaatgtrtcagctggataaaatattcaaaagatgtctccataacgtgccaaataagtaaggtgatatttaacaagatgcatacaaagtcttgaattgggttatgaaaaagatcagttgcacaagtaaaagatgaaggtatcagacttaactaccaccattgtggaaaggccagagttcatttactggtaaataagagccccagtgaagatgctgctaaaaagacttctgcaatctctgggcataggatgaaggtgtgagagagagggtctctccattttgggttgtttatatagtgtttaattatagactctctttaagatatatcttggaaaattagagggtaagcagaatgggcatccttcctaggacaaaatgacagacgatctggaggcgctgtgaaaagagcaaacttagtgaattgtgagacgtgtcctcaaatatctaaaggtctgtcatgtaaaatatacttactgttttccatcttcctccaggaagaaaaactggaatcagtggttagcggccaacccattgaaggccgatagaaagaagttttcaggacttaaagtacacagccctgcagtgggcttcctggacaggagagagctccttcgtcccatggataattatagagcagccacctgtgagggaggagcggagggaattcctgcactggctcatggctggaccagatgaccccggagggttcttctaccatgtgtattgtatgatttcaatagtgacagttcccatttattgagcttatactgtgtgccaggactgggataagggctttgtgtgcataatcccactgcagctgcatggcagatagaaactgaggcttaggaagtctatgataattgctcaagcccacacaatgggaagtagaggagtggcattttgatcccaagtctgagtttaaagtgtacattcttaacttctatgttctatatgatctctggcgtacatacttcattctttcatccaataacaaatgtccgtgaatgccttgttcttcccctcctctccctggcaaactctgtcatccatttagactgagtgcacctgctgtctcctctctgaggctttccctcgctttctccacacacaattaattgcctgcctcctgtgttctcacaagaggcatgttgtattctatttggctacgttggttttccccaatggaccatgagctcccagttacctaaagagctggaaccagtgtt

SEQ ID NO: 703398 - DNA, 1289 bp, Homo sapiens
ttatagctttaccagctttggggaagatttaccagctagttgtctgcatggagcttcttgccttttttggagccagatggtttcttcttcccggagattgaggggtttaccaagaaaaattaggatgcacaaagtgccagcaggtggcagcaggagcacacattatgtgagaaatgctagcgaaagcctctccaggaccggggaggtagctgagcttacactccatggttttcactgctgctgaggacccgaggaataaaaattcctggataatgtacagtgaggtgtcctggacagagcacaggcattagaatcagacactcctgagtttgaatcccaatgtagtccttatacaattatttacttttctgcgaaattttctcatctgtaaaattgaatgaataataccaacctcacagaggtggtatgaagaaaagatgaagtgaaataatgttagtaaagcacccacaaaagggcctgaaataaaataggtatccaaaaatattccttctcttttcttttatgtcccyattattataaaacacagctggatggtcaatgacttctcaaattgtatttatttgtttgttcatccattcacattcatttgtaactatactccctacaagagatttaagccggtttctctaaatatttgtaatacatgaattttgcatgcctgatccaaacaaggatctcaatgaggactcattgttatcactcccacacccccgccaccaccgcccccaaaaaacagtaatgcaataaaagctgttcaacaaagatagcagactatgggttttgaggcatgcctctctgacactctgccacaatttgggaatgggttttaggaaatagatattctttaggtttccttccataactatttgttctcaaaaggtacttgaaggcagtgagttaaaggttgtaccctttcatccatcattagacatggctggttgctgtgcattcataagtcagcagagcaggggaagggttgagatcttctgtgattctaaaggagtctctctaaatacaggtagccatgaacacagaaacacagataatattattttgtcacataatataatgggatattgtcagaaaaggacaccaaccttatagataatggtcaggagtaataagacttcaaagtggatgattaagcatgcaaggaacttgggttgtttgccacaactatgtaggtgcaaaaagtaaacaacaaaagtcagtacatcagagcaagagagtttattattcacagcatagcaaacagcaggaacatcagc

SEQ ID NO: 703399 - DNA, 643 bp, Homo sapiens
ttttaaaaataactaatttacacaggttctaactaygtacatctctcatgtcattttaatcagttttatggtttgctatcatagatgatgttattaactattatcttaagagtataatcataattttcctcaaataatttcagggaaattactcccaatctatatcctatttacaatgtgtgtgtgtcatataattttaaaaagtatacatgtattttttgcaaagaactaaaagtaagaattaaaacatgaacattgcctctgtatgagagctatgccatttgacatctctttcttcatttttctttccaatcggaaaaaaagtgtttaaacttcaaggaaaaggaatcttctacttgcttgatggtatctttctatttaaagatacttagttattttcacccagagctttcacggcattttcacactatctcatcagctagtcaataaagaattatgcgcagagctataattctttttttttaacttttacatgtttttttctaaattgagccatgattcacacttttgtaatataggccttgatttataaactcaaacccagatgtttgatatttctccatatagttttgttaagcattgcatctattttacacttcagatcaggagtatagactccatg

SEQ ID NO: 703400 - DNA, 654 bp, Homo sapiens
tgggctcatattctcaggatctcccgagggctgtgtcatgggtcatggtcactaatatttggctcagaataaatctcttcaaatattgcacagtgttttactctttttgtcagtagaagtcttatttatcatcttctttgtctgaatgtatarcatatgcagtcaagtatatcttccatgcaatatactaggtgtgcgatattggctaacttagaaatcttgccctgtcacaccaactggagttgcagtcactgcagcctagaacttctgggctcaatgggttctcctgtctcagcctcctgagtagctgggagtacaggcccatgccaccatgcccatctattttttttttttttttaattttttgtagagatggaggcatcttgcttgcttgcccaggctggtctcaaattcctggctttaagcagtcctactgcctcagctcccttaagcactggggttacaggcatgagtcactgtgcctgactagtatcttgaaaatgtaatcacttcccttttactctaaaatcatgtgattcttcattaactaaagattgatgtctattcactaagaaaatgattttgttttatttttcctcaaactttaagattatttgaaatatttgtgccatgtaatagtaggagctccgagaa

SEQ ID NO: 703401 - DNA, 2140 bp, Homo sapiens
caagcaatccacctgccttagcctcccaaagtgctgggattgcaggtgtgaggcaccacgtccagctgaggctggaagggttttgaggttcatactagaagaagcctagattgccttgaggagactgtttgtaagaacatggacattaaagttgttatggtctcagacaaaatgaggaacatgtaatttatagctaggttgggaaaacactgagcttgatacaagttttatatcctcatggagcagggtataaaactgagatttccttataccatcacccaccatactgatttctacatctgccagttcccttactacatttagtatatctcccaagaagagaaagcagcattccaatcacagtacagtgtaaacacctacagagaaaataaacgttgtgttaattagccaggttttcatcctgctcttggagcccatgggctgtagtattgagcaaagaaatgtcattttctaatggtcagagttaccactggaacaaaggtatgctatgccaaccttaatggccactccattttctactccaggaaagggcaaagtcttcattaaataattttgattcagcaagtctgcttctgaaggacaataagaacttgttgttccaggaacttgttgaagtagaatttattttgttccaggaacgaatttaaggagtttatatacatattaatatattttaatactcattgtggttttgtgaggtaggcatattgtggtctccactttatagttgagtctattgaggcccaaactattaagtaatttacccaaggtcaaatcagtcacagagccaggatgcaaacccagacaatcagactcttaagttcatgctcctcgtcattttgctacactgccttttaaagaagagaagaaaattcctattgtatacctgatttcactttttaaatttgttttatatgttacttgttttttaattcgacaaatatttattgaggacctattatgtgcatctactattttgaactccgggaatatagaggtgagcaaaacagattacacaattcttctgtcatggaactttcattctacttcagtgaaacaaaaataaagtcatcaaatatatgatgttttagttggcaaaaagtacttggcatgaggaaaagcaagtaaagggaagggcataaaactgacatattcaaaaaccaaaagttccactgtgagtaggactgagtgagtgaatgtttccaattgcagaagaaattgttaggccatgggattgtgtgtgctctgggaccattgtaaggactttgagagagagagaaataatcacaggatcttggagtagcataatttgacttatatttttaaataattcctctgcatattgtgaataatagactggggtgagacaggaataacaagggctgatggaagaaatccactttgaaagctattgtagtaatcaacaagaaagatgatggtgctttggacatgaaaggtagcaccaagagtagcaaaaaatcatcaaaatgtgaaagtaggttgaggaaatcactgatgaaacttacaactggattaaatgtgtggtataagataaatagcagacttgggtatgtcttcaaggtttttagttttggcattagaagaatggaactgtcatttgccaaaatggtattgttgctagaagtacaaatttgaggggaatatcctaagctcagtttagaacaattaaacttgagataaattctrcacatttaagcagagtggtcaattaggctgttggatacaagtctggacttcaggagaaagttctggtcttcagatgtattaaaactacaattacttttgctccaacctaatacaatttagagacctgcatatgtccttagtttattagtcaagggtctccaaagaaacagaatcagtaggagaaatacatatatatatatatatatttatattattacaaacatataatacatacataatatatatgtatacatatatatgtataatttatgtataatttatgtataattatacataatacatatatatgtatacatagtatacataatatatgtataattttctattctatatctgtgtatctctctctttgtctctctctgtctctatcatctctgcctcagtccacccc

SEQ ID NO: 703402 - DNA, 3046 bp, Homo sapiens
  misc_feature 1118, 1119, 1120, 1121, 1122, 1123, 1124, 1125, 1126, 1127,1128, 1129, 1130, 1131, 1132, 1133, 1134, 1135, 1136, 1137,1138, 1139, 1140, 1141, 1142, 1143, 1144, 1145, 1146, 1147,1148, 1149, 1150, 1151, 1152, 1153, 1154, 1155, 1156: n = A,T,C or G
  misc_feature 1157, 1158, 1159, 1160, 1161, 1162, 1163, 1164, 1165, 1166,1167, 1168, 1169, 1170, 1171, 1172, 1173, 1174, 1175, 1176,1177, 1178, 1179, 1180, 1181, 1182, 1183, 1184, 1185, 1186,1187, 1188, 1189, 1190, 1191, 1192, 1193, 1194, 1195: n = A,T,C or G
  misc_feature 1196, 1197, 1198, 1199, 1200, 1201, 1202, 1203, 1204, 1205,1206, 1207, 1208, 1209, 1210, 1211, 1212, 1213, 1214, 1215,1216, 1217: n = A,T,C or G
atatatttactgatgaacatatttcaagtactatttggaccgatttcagtccttttctgccatcttatgttttgattcggcaaaaaggtgaaactaagcataattattgaggttccaaaaattgaaatcaaggaaccaaagggcttaccttgttttgtggttaatgataagaagtcaatgcttttagaggaggataattaaaatgttccagattagcaaatgctagtgcttgaatttaaagcaatttgcacttttattaaccttctaggggcatgaagtgctggtcttttgtactttaaatagttttttccttattataagccataggtcaatatgttctcttgatgattatttaatgttaaaaaggccaaataactacagtcagttactgattgaactccttgttctactctttttcccccttctcactactgcatttggctagtcttaaaataaataaataaatatataaatgcctaataactaactgacaagtgttatgatggggttgtgtcagaataaatccatcataaattgaaaatttcataagtcaaaaatgcatttaatacatctaccctaccataatagcttagcttagtctagcttaccttaagtatgctcagaacacttacgttagcctatagttggagaaaatcatctaacacagagcctactttacagtaaactgtagagtatcttatgcaatttcttaaatactctactgagagtgaaaaaaagaatggttgtatgaatgcttaaagtaatgtaaagtcagaaattatcagccagggaccatctgtaatttagaaattcctaatttgtattcaattgattaaaaagctaatataaattagccactttttgagaaaacttattctcatgtttttgttttcttggataagcttcatgtattggctacattgatgactacattataaaaacagaggcaacaaagttcttgagatgacagtcaacatttttaaccattgtcaaataaagtaattaagcatgagaagaagaaaaaatctggagatgtcagagcggtttcatgttattgtcctaaggtagagcagtacataaaatgcagtctgcaggctggtgccagatctgtttatcannnnnnnnnnnnnnnnnnnnnnnnnnnnnnnnnnnnnnnnnnnnnnnnnnnnnnnnnnnnnnnnnnnnnnnnnnnnnnnnnnnnnnnnnnnnnnnnnnnnacatgaactcattcttttttatggcagcatagtattccatggtgtatatgtgccacattttctttatccagtctatcattgatgggcatttgggttggttacaaatcttttaagttttaaataactgctgggtcatcgccatttttttagacccctaccaaatcttttcatgcattgttaaaatgtccacctaaatctaaaatattttttctcaccaatttctgtttttacagggaaaatgtagatggtttcgaatctggatgcttgcaacaagaagaatgcaaaagtctttttatatttcaaatttaaacttctctgagaattggatgagcaacaaacttagaacttgtttaaacacttgcaaattcccaagacactgaattgttgtgagaaaatatgttatttgatttggttcttagtaagttagaagcaagtccactataaatatctgatctattctttttaaagtattgtttcttttacactttctaatgtgcttttatatatggttgacttacagttgtagtccttaaagccaagaaaacaaaaacagttaatgcatacattttcataatcttattgagaataaggtaacaggcatgtcaaatcctatattgatatccacgtaaaaaaccattgatacttacctcctgaatatggaacaggttattctgcataagaaacctacaggaagatgacagctttggaaaaccgaggcactttgagtctagtgtttctcctattcaactcaaaattttctccacagtatttcaagcgggatgctggccaagtaaaagaaagttaggatcctttttctatgtagttttcatatcacttagcaatttaaatacaaaacactaaatatactctatcaaaacacaagggttagaaatatctgaaattcatgaaatagggctaagaaattcaaatgctgacaagagccaagtcagtctctcttcataggaaatttcaacaaaataccaraacaaactaagaagaaaggaaatttcaactttagacatatcaggatcagaattcttggtttgttccctgccttagttatacttttcttctctttccaattctaatttagtttaattaatattccaaaaaaagttatgaaattataatttaattccataatgtcggttggtttgcaaaaattagtggcataaaaagggtttattagatttcatgatgtttttcagattgtctagggtcagctggacccctcagttccagagagcattacttgaggaaatttaggcaaacatatttagctggaagttggactatagctgcaccatcaagttggcctcagttacatggctgatacctcagctagggtgaatggaacagccagagactggctggtcctctctctccaacaagattcaacttcttacttggtgcttggctttcaaaacagcaaaagtggaaactgtcagatctcttaagctctacacccaaaactgatatagggtcaaagcaagtcacagggccagcacagattaaaagagaggagtcacagaccccatcttttgataaaggagaagcatacatagaataggaatgggaggaattgctggttcccatttttggagacaatctaccaaaaaattactctctcccattagtttattcatttaatgtaattgtaaaatcaaacacatctccctaccctgttaaagaaattctaaaccttatcaaataagtacgaaaattcatttgtggctataggtgcttccatgaaccatctatttcagatacaggtaaaactgatcgcgcatctagaaaagattcagaaatttctacaatttacagcttaa

SEQ ID NO: 703403 - DNA, 614 bp, Homo sapiens
tagacgtgtgttcccgtaacaacaaagttcgcaacatgtatacccaaaatggacatacctaaaagtacaaaaagaaatacaagacctagcttgagactttttacatctttttctgcagtaattgrtaaaacaagtagaaaaagaaaagtatagaaattggagcaacattaattgatatttatagaatattatattcccaaacagcaagaagcatattcttcttaattataaatggaaaattcaccaagaatgaacaataaatcaagtctcaataagtttaaaagagtcaaatcatatagattatactctttgaccataatgctatcaaactgtaaataagtggcaaaaagatatctgaaaaatcttcaagtattagaagttaaacaattaattttccaataaatcatatatttatagaagaaatcccagtaagtgttttaaaaatatttctaaatgaatgattataaaaacacagtatttctaaattaacagggtgccacagaatgtttcaaagaaaatacatattttaaatgcttatattagaaaaagtgaaagatgcaaaataaatgataagctgccactttaagaagatatacaaagaaaagcaagttaaa

SEQ ID NO: 703404 - DNA, 678 bp, Homo sapiens
cacatatcctggcttcttgtcaggttaggatagagcctcctgagtcattagctgtgtgatctatattgtactatattgccagtaccttttggctcatcacatagcttggtactatcttgctgatgcttaatgctatttcagtgtcatgtgacgaaattgaacatgctgcataattaatagatttaatawatatatgatacctatattctaaaacatttgtgaaactcaaaaaattgtcagttcaatgctggtcacaagagagtcaaagtgtaagagttttctatccaaaaaaattctgaccaatcttatatcttgtttagggatcatctatagggaagtatatgcatgtatgtatgtgtgtatatttctgattggaacattttctcatctcatgtaattaaatacttaacaattctttaaagaccatattaaatgccactttttgtagttttctctcatctgaatatgtgcactttgttagttatctgaatcactgtaatgtttttgcctctcaattgaatttacaacaatttctgttatattttatttaactattatctaactaaaacattgcctgagagttaaaacaacatcagattcaactttttattgtctataaaaatatcaaatgcatttttcaaagataataatgtatgaaatttggcttttaagattatt

SEQ ID NO: 703405 - DNA, 1307 bp, Homo sapiens
ctcagtttctccatgtaacaaaccttcatatgtaccccttgaacctaaatgctggaaagaaaaaaaaaaacgaaaatgaagtaatgtatgtaaattgctgagaatcatgttcagcatagagtaagtgttcaacaaatgtaagcctttatcatattattcatataatagtaactgcctcccttgcatatgtaattaaacagctgaatagtttgattttcttctcataactaaattgtgattttctctctgtttctgattaggtgtgtgatattgaataaatggttcaccgtttctagaccttggtttctactgagaaataaaacaaatggataaagtcctcctaatatcatttctgagcctgtagtttggaatctcaagagaaacaaagtcaaagacattaaaagaaatgatgtgatgtaagggtaatgaggaaaactaaatatatttaggcatatttgaaattttgaatgcatcaaaatccaacctatgtatcagtcagcagaagcccagtgaacagtttgtgtggtttgacaaagcgtactagatttcagtatatttcaaactttttctcttaagtatgtctgctaattgcttttacacttccattatatataattctttcagagatgaatttgacattatgcattaaattagaaaaaagtcaataacttatagtcaataagaagctaarcaaaagtttatgtgtgttttattggtgtctctgagatgatttataagtagtactcttcgaatgaaatgaaagttaaagatgaaagccaacatataacctttatttctgatggacattaaatgggaaagcaatttggtctgaggggcagtttggcagttagaaaatttgtaaattccagaatgtaaccatcagtttataaggtattaacaggcagtgccacatgagattcaaatgagaaaacaatagagcagagcagcaaacttatgcacatgatatccggaaacttccaagaagaagatgagaaagctgcccaagttattcttccttaggttattatttataagtttatagatagaaccattcattccacatttagaggccaggaagttaaaggactgaaagaatactaaatatgcttaggaaaacaattctttctcatggcaaacaagtccaaccacgttttacaaatgttggagtggataatttagtctttcttatttcattattaaattgaatggagaggcttagcaaaatatatgaagacacatgctttgtgtgataaggttagtttcagaaaggaatgaggaataagatttttttttccaatttatatttt

SEQ ID NO: 703406 - DNA, 1772 bp, Homo sapiens
cactggacagggcagagttagattataatgcagactccagaaagggataacatgtagtcttaaggctatgttgtggagggggctgcccctatacattgtaggatgtttctcagcatccccaccttctaccaatgatatgccagcattacccctctccagccttgacaatcaaaaatgtctccagacattgccaartgttccctgaggggaaaaattttcctcaattgagaaccacaggctaactcttacctgagtaatgtgtgacagggttgcttctgggcatcagaaagaagtttacatatttgtactggttatttcttcttaaaactctttaaagatcatggaattttaaatattccaatttgaagcttctgctttctttctttatatatcatagaagagaagggcagagaagaagagaggtaaaatattaacattttggagaatctgggcaaaaagcatacgggatttttgtactattcttgcaacttttctgtaaatctgaaaattttttaattaaaaaaaagccagtttattaattgagaaagaaaatttttcttcctttaggaaagaagcaactcctaacccaaatttggagaccagggggaattaagcatgacattgcaatggcaagtctcaagttaagaacacttgggtttgaccttgcttttgtttcttaaatagtagaataatattgaataaataaatctcttaatttctctctgcgtcagttctcttaaatataaaatatagagttgttgtgaggaatcaaaaggaaacagttataaattacagagtgaaacagcagtgataaactatatatattgcaaactttttttcaagtaagtaaacagaagctcagagaagtgaatacttaaaaatgacatgagaaagtggcaaacctgaagtttgaacctggctcttctgactccaagataactcttttttcttcatacaatttttgttttataactatcctcactcagtcccataaactggaatgagtttggttttaaggagtcttgaggcaggcttatttcaaggctggatcctggttcttgtgtcgttgctgcaagaggaggaaaaggataattgagacacatatgtcaggtcttctcatttcaaatttgttgacctaaatgactgtgataaatgctaccttgagaattttaaacaaatgtcatgctggactcctctcctcaaattcatttattccttctaaagtctcccagccttgacccacaaaattcttagatctctgatgtggacccttgttcagatctctgttattctgtatattatgggtcaatatgattttggcatgacaatcaccaaggcctagattctacttgaacacattctgaaatggaagagtaagtgaaccttatatttaattttatattcagagtcttcaatagtaataaccaataaataagaaaagcacaaacagaaaaataccagagaaaaatgtccaaaacatgagcaaacatttcacagaagaggaaatatatatggccaattaacatatgaagaggtgtgtagtaccattagtgaccaagaaaatgcaagtaaagattataatgacgtacccattcacttggcaaaaaatttaaaatgcggcaattctaatcattagtgagatatggataggatataatgctagtaggaatattaactgatagggcagctttgcagaagggtttggtattttttctagtgttaaacaatcaaatattttataaattaacaattcaatttctggatatatgtat

SEQ ID NO: 703407 - DNA, 1772 bp, Homo sapiens
cactggacagggcagagttagattataatgcagactccagaaagggataacatgtagtcttaaggctatgttgtggagggggctgcccctatacattgtaggatgtttctcagcatccccaccttctaccaatgatatgccagcattacccctctccagccttgacaatcaaaaatgtctccagacattgccaaatgttccctgaggggaaaaattttcctcaattgagaaccacaggctaactcttacctgagtaatgtgtgacagggttgcttctgggcatcagaaagaagtttacatatttgtactggttatttcttcttaaaactctttaaagatcatggaattttaaatattccaatttgaagcttctgctttctttctttatatatcatagaagagaagggcagagaagaagagaggtaaaatattaacattttggagaatctgggcaaaaagcatacgggatttttgtactattcttgcaacttttctgtaaatctgaaaattttttaattaaaaaaaagccagtttattaattgagaaagaaaatttttcttcctttaggaaagaagcaactcctaacccaaatttggagaccagggggaattaagcatgacattgcaatggcaagtctcaagttaagaacacttgggtttgaccttgcttttgtttcttaaatagtagaataatattgaataaataaatctcttaatttctctctgcgtcagttctcttaaatataaaatatagagttgttgtgaggaatcaaaaggaaacagttataaattrcagagtgaaacagcagtgataaactatatatattgcaaactttttttcaagtaagtaaacagaagctcagagaagtgaatacttaaaaatgacatgagaaagtggcaaacctgaagtttgaacctggctcttctgactccaagataactcttttttcttcatacaatttttgttttataactatcctcactcagtcccataaactggaatgagtttggttttaaggagtcttgaggcaggcttatttcaaggctggatcctggttcttgtgtcgttgctgcaagaggaggaaaaggataattgagacacatatgtcaggtcttctcatttcaaatttgttgacctaaatgactgtgataaatgctaccttgagaattttaaacaaatgtcatgctggactcctctcctcaaattcatttattccttctaaagtctcccagccttgacccacaaaattcttagatctctgatgtggacccttgttcagatctctgttattctgtatattatgggtcaatatgattttggcatgacaatcaccaaggcctagattctacttgaacacattctgaaatggaagagtaagtgaaccttatatttaattttatattcagagtcttcaatagtaataaccaataaataagaaaagcacaaacagaaaaataccagagaaaaatgtccaaaacatgagcaaacatttcacagaagaggaaatatatatggccaattaacatatgaagaggtgtgtagtaccattagtgaccaagaaaatgcaagtaaagattataatgacgtacccattcacttggcaaaaaatttaaaatgcggcaattctaatcattagtgagatatggataggatataatgctagtaggaatattaactgatagggcagctttgcagaagggtttggtattttttctagtgttaaacaatcaaatattttataaattaacaattcaatttctggatatatgtat

SEQ ID NO: 703408 - DNA, 1772 bp, Homo sapiens
cactggacagggcagagttagattataatgcagactccagaaagggataacatgtagtcttaaggctatgttgtggagggggctgcccctatacattgtaggatgtttctcagcatccccaccttctaccaatgatatgccagcattacccctctccagccttgacaatcaaaaatgtctccagacattgccaaatgttccctgaggggaaaaattttcctcaattgagaaccacaggctaactcttacctgagtaatgtgtgacagggttgcttctgggcatcagaaagaagtttacatatttgtactggttatttcttcttaaaactctttaaagatcatggaattttaaatattccaatttgaagcttctgctttctttctttatatatcatagaagagaagggcagagaagaagagaggtaaaatattaacattttggagaatctgggcaaaaagcatacgggatttttgtactattcttgcaacttttctgtaaatctgaaaattttttaattaaaaaaaagccagtttattaattgagaaagaaaatttttcttcctttaggaaagaagcaactcctaacccaaatttggagaccagggggaattaagcatgacattgcaatggcaagtctcaagttaagaacacttgggtttgaccttgcttttgtttcttaaatagtagaataatattgaataaataaatctcttaatttctctctgcgtcagttctcttaaatataaaatatagagttgttgtgaggaatcaaaaggaaacagttataaattacagagtgaaacagcagtgataaactatatatattgcaaactttttttcaagtaagtaaacagaagctcagagaagtgaatacttaaaaatgacatgagaaagtggcaaacctgaagtttgaacctggctcttctgactccaagataactcttttttcttcatacaatttttgttttataactatcctcactcagtcccataaactggaatgagtttggttttaaggagtcttgaggcaggcttatttcaaggctggatcctggttcttgtgtcgttgctgcaagaggaggaaaaggataattgagacacatatgtcaggtcttctcatttcaaatttgttgacctaaatgactgtgataaatgctaccttgagmattttaaacaaatgtcatgctggactcctctcctcaaattcatttattccttctaaagtctcccagccttgacccacaaaattcttagatctctgatgtggacccttgttcagatctctgttattctgtatattatgggtcaatatgattttggcatgacaatcaccaaggcctagattctacttgaacacattctgaaatggaagagtaagtgaaccttatatttaattttatattcagagtcttcaatagtaataaccaataaataagaaaagcacaaacagaaaaataccagagaaaaatgtccaaaacatgagcaaacatttcacagaagaggaaatatatatggccaattaacatatgaagaggtgtgtagtaccattagtgaccaagaaaatgcaagtaaagattataatgacgtacccattcacttggcaaaaaatttaaaatgcggcaattctaatcattagtgagatatggataggatataatgctagtaggaatattaactgatagggcagctttgcagaagggtttggtattttttctagtgttaaacaatcaaatattttataaattaacaattcaatttctggatatatgtat

SEQ ID NO: 703409 - DNA, 1029 bp, Homo sapiens
tagcttggcatttacatcacgtgtttttctttttggatattcaccctttcagtattagttcacaagagctccctaggtattaaagacagggaacaaaataatgcagtgtttaagagcttgtgctctgggctcagatggcttgcgtacgaattctcactcaatgttttattaattttgtaaccacaagcaggtaagttagcatttctataccttagcttcctcatttgtaatttgggcatatgatatgacaatacctcacaagattagtgtgaaggtgtaagggtctttagttctgtacctgacatagagtagaagcyctatatttgagatatgatcacttggtaatggacgtcaggtgaacaaaattcaattatggtccctagtttgtgaaactgcatcattggtccatgtgtgacccacttctaccttcctcagtcatacatttaaaaaaaatagtggtgaattatgcataacacaaaatgtaccatcttaaccatttttaagtgtaccagttcatagtgttaaatatattcatgttgttgtccatccaatctccagaattttttcatctcagaaaacttaaagtctatacccattaaataatgactcctcatttccccctccctggcaaccattgtcctgtgttctgtctctatgagttttgctactctaggtacttcatgtaagtggatatcttttcatgactggcttatttcacttagcataatgtccccaaggttcatgcatgttgtagcatgtgccaggactcccttcccttttaaggctgaatggtattacagtgtatgtatatgccacattttgtttatccactcatctgttgagaggcacttgagttgtttgcatctcttggctattgtgaataatcctgatatgaatatggttgtataaatatacatttaaaaaatatatcatgaacatttgtgcaactaccacacaattgaaggactggaatattaacaatagacatcttcctacgttctccagaaaaaaataccattctaaattttg

SEQ ID NO: 703410 - DNA, 1029 bp, Homo sapiens
tagcttggcatttacatcacgtgtttttctttttggatattcaccctttcagtattagttcacaagagctccctaggtattaaagacagggaacaaaataatgcagtgtttaagagcttgtgctctgggctcagatggcttgcgtacgaattctcactcaatgttttattaattttgtaaccacaagcaggtaagttagcatttctataccttagcttcctcatttgtaatttgggcatatgatatgacaatacctcacaagattagtgtgaaggtgtaagggtctttagttctgtacctgacatagagtagaagccctatatttgagatatgatcacttggtaatggacgtcaggtgaacaaaattcaattatggtccctagtttgtgaaactgcatcattggtccatgtgtgacccacttctaccttcctcagtcatacatttaaaaaaaatagtggtgaattatgcataacacaaaatgtaccatcttaaccatttttaagtgtaccagttcatagtgttaaatatattcatgttgttgtccatccaatctccagaattttttcatctcagaaaacttaaagtctatacccattaaataatgactcctcatttccccctccctggcaaccattgtcctrtgttctgtctctatgagttttgctactctaggtacttcatgtaagtggatatcttttcatgactggcttatttcacttagcataatgtccccaaggttcatgcatgttgtagcatgtgccaggactcccttcccttttaaggctgaatggtattacagtgtatgtatatgccacattttgtttatccactcatctgttgagaggcacttgagttgtttgcatctcttggctattgtgaataatcctgatatgaatatggttgtataaatatacatttaaaaaatatatcatgaacatttgtgcaactaccacacaattgaaggactggaatattaacaatagacatcttcctacgttctccagaaaaaaataccattctaaattttg

SEQ ID NO: 703411 - DNA, 1284 bp, Homo sapiens
gcctttaaatctcactgacagaaagcttagcaactactctgagattctagaggtcactggaacttctctcttcaaacaggaatcttcctcacactgtgaggcacagaaggacaggtctgcccagtgaggagggtttctgggtgctcccttccacgtgggtgctgccctgcagagctagctaccccgagagcctgtccatggagaatgatggttactgcccggacggggcacagagaagtggctgttagttcttacaagtggttagaaattcaggactaaggctttcacttgccactaattataaatacctaggaagagccaccaaaccttgggtttctgattgctccctacctattggctattcccagagagcccatattcacatggtttcctaaatcctgtgtacactcactctcccacgggtcccccggtcccattagtaatgctacttgctgaacacttcgctttgtctcaatctatctgtagtttcaacatcaactggacttgttggggaaggtgatggcccaggttctctggaaaattgatgtaattattcacctcatgccaagcatgcagaaaacaaactgtaataattcaccaaccataaaacaagcacatgcacctctttgctcagaactttacttcagggctcagctagatttcagcgattactgacctcttttataaaatcaaagtgaaaaatgtgcagcttttggtaaaaagcatgttgacttgatagtccttcaaacatgggtgcttgcctgggaggctgtgggtgagcaggtccattatgcagaagacccagctgtggtcaggtgtcagaattactggctttgcccattcacctcagtcagctttctttttttttcctgtttcttttttagagatagggtctcactctatcactcaggctggagtgtagtggtgcaatcayaactcactgcagcctcaatctcccgctcctgggctcaaccaatccttctacctcatcctcccgagtagccatagccaggactgcaggcacacaccaccacaccgagtgcattttaaaaacattttgtagcgacaggatcccattatattttctgggctggtctcaaactcctgggctcaagccattctcccaccttggcctcccaaagtgctggaattacaggcatgagcccctgtgcccagcctcagtcagctttcacagtctaactttgtgccaagaagttagtaagatctgaaactagtcaaagtagcttccatttattcacagttttaaaaacatttttcaagttt

SEQ ID NO: 703412 - DNA, 1253 bp, Homo sapiens
gtgggtgccagggactgggtatcgtggaagaaattgattgttgagtggcatgaaaaagctttttagggaaatagaaatgttctatatcttgattgtggtggcgattgtcgaaattcatagatttatacacttaaaaggataaattttactgtatctaaattatatacctcaattttgttaagatatatatatatttttttttttttaagcactcctttgaaaggattaaggacgcctaacttgaaggaaaagcatttctgcacaggtgtcagtgtattgcactgtggaacctgtgtggtaaaggcaaagggggtagtgcttatctcttgatcctaaatatgtgagaccagattaaagtgaaatctgggaggcaatgaatgttaaatgagttgttatgtaatttgcatagaggtgatgctgagagatttagaaaggatcactgtgggttgcttgctcactttcttgctctcctattccgtagctttccaaatggctgtactcaacggtggcttggtgtttaggggatttaaggggggcaaaaagaaagattaataatctcctcctctccctctaaccctactgccctaagatatccttagcaaacttacatctcctttcttttctctgtgttcattccattgtgcgcacacatacacattcatggattttctctttttgtttagggaaaaaaattataatgtacatactattctacaactttttgttgttttattgaacattatatgattcctaaattatccccaggtgaatacaaatagatatgacacattttaaaaaaataaaataactggccgggcgtggtagctcatgcctgtaatcccagcactttgggaggccgaggagggcggatcaggagatcgacaccatcctggccagcatggtgaaaccccatctctactaaaaatacaaaaattagctgggtgtggtggcgtgcgcctgtaatcccagctactccggaggctgaggcaggagaatcacttgaacccgggaggcggagattgcagtgagctgagatcacactgcactccagcctgattgcagtgagccgagatcakgccactgcactccagcttggcaacagagcgagactccgtctcacaagaaaaaaaataaccgtgtgagtactattccatagaatgaatgtttcataatttaattcttctatagacagacattaaaatattttccagatttgggccaagagtagcagtttaaaaaacatttagctttta

SEQ ID NO: 703413 - DNA, 920 bp, Homo sapiens
tgtaaaagctgactctcgtgctctggagaaaggacaataaagcttctgagctgacatacgcacctgttacctgtggtcccctgaagccagtgagccctgcttgtttcctgacccaggagtgatggcagttatgagatggtgaagtcaggccaactgcagcatcccagcctaggagggtgggacagcacagaggcaggaaattttagagcccctcaagccagagcaaggaccaatcacctcctctttctttgcctaggggacaaaacttgttcctgagcaaagarctaggcatacattcagcaacacacagtctactcaaaaaatattagaaaaatttgcccttttctggaagaatatctttctgctgttccctgagagctgcagtgtgggacaccccatatatgcccgttctagggttgccatccatgtgcacacaacaatgctctgcagggctctctgtcacctcttctgaatgtcattccaccctcctcccctcctatagcctctactttctctccctcttctttcttctttccttctccccttttctccttaccttcctttttctttccctcctcccattctccttcctttcctgccttccttctttccatattccttcattcactcatgacacatgatggttgagaaaggaaagaagtgggaggcagccctgtatgaccacagagtgcagcacagagccttcgttcagtctgtccaccccttttgaagtcccagctcaaggagttcagctttgcggagtttttccttagtgcctctaaggagagccaagtgctgcttcctctggcctccacttttcttgttcaaaatttcatcacagaatttcctaatttgtgttattatctgattctatggggctctccctactggacagtgaaagcttgaagagcaaggactaa

SEQ ID NO: 703414 - DNA, 1096 bp, Homo sapiens
gatctttatgtacttcatatactatgtacagactgttgagaggaatacagaaatgtgtagtccatgctcctaaactttatggagtgtattaattttgaattcagaaggcacgaaagcaattaattgtaacaacccaaagtagaattagtgttctaatatcacgtgagaacattaatgctgctaatagcccctctctcattaacccttctagcccttatatttcataatacattatatagaagttttttaaattctaccttcagtagttccctatggtttttccaactcaaatgataatttacttaagatcaggaagcagatcttcagagcagtgcttcctaagtgtatacaaaggcccgtgattctgcatgtccagcaatctcccagaggccaagactgctggtcctctgatcatctcttttgtcccctgtagctttggccacactgttcagaaaacacctgaagattcaagattgcaaaattaattttgaaactatcaatcactcttattgcaccaggaaaactagttaggaagttctcaaaacacggtagatacttcaygtgctcaacaaattatagggcaaattggatatgttagaatactgtctctccaacatttaccctcttggtgctattctctgtgcactaagcctaaagattaaacataggaacatatcctgcactttttttattttatttttatttttttgaggcagagtcttgctctgttgcccaggctggagtgcagtggcatgatcttggctcactgcaacctctgcctcccgggttcaagcaattctcctgtctcagcctcccgagtagctgggactacaggcacacgccactgtgcctggctaatttttgtatttgtagtagagacaggtttcaccttattggtcaggctggtctcaaacttatgacctcaggtgatccaccctccttggcctcccaaagtgttgggattataggtgttagccactgcgcctggcctatcctgcactttttaaagaggatgaaacatgtgtctttgtattttaactctggtctctccacagaattgctcagttaacatttcctctgggttattttattttat

SEQ ID NO: 703415 - DNA, 1769 bp, Homo sapiens
tttacattaaaaacataagactttctaaaaattgttggcagatcattttccacctgtgtaccctactttaaagaccactgattttaaaaataacattttggtctcagtgcaatattataaaattagattttataatataaaataaaatgatcttcattatattccttatttcggatcccctttaaaccagctgcttctgaaagaagtcatataacttgttaaattaaatataaccagtgacactattcacaatgtctttccttttagcataagcaaaggaggatggaagaaaacaaaaacagagcagaaggaaaatgaatatattcaaatctgctaatgaaagcagaaaattcaaatggatgctcagatcatttttcttatagaacacacttcgttttctccttatgctactggaaattgttacatggaattttccaactactgtcagatatactacccttctagaaatttaactagaccctctctgccactcctagaaaattgaattttaggttactttttttttttgagatggagttccyctcttattgcccagtctggagtgcaatggcatggtcgcagctcactgcaacctccgcctcctgggttcaagcgattctcctgcctcagcctcccgagtagcgggattacaggcgcccgccaccacgcctggctaatttttgtatttttagtacaccatgttggccaggctggtcttgaactcctgacctcaagtgatccacctgcctcggcctcccaaagtgctgggattacaggcacaagccactgcacctggcctgggttacttctttataaaaaaataaaggctgtttccttctccctggaaggtacagcaagaactccaggtaggagagcaaagacttttttttttttttaatggctccctacatcttaccacaaatattttcattcactctctctaatggaccagcggtgatacttttaagttcacatgtctcttttctgtccatattgtcattgtttatatacatatgaaaaacacatataaattatttcctttcaaagcatcagcccttcaaagagactacatacttttaaaacaataactactgagaaaatagtatcttgctttaaagtagtgtggtattcccaagtaacaaatagccacttgttttaatccttacctcaaatttttcaggaacatgaagtttaggagatggaactcctacaaggtagtcaattgtaaccattattactattgtgagaaatacagcaaaatcactgattgtcgatcgcacctatgttaaagggattatgttaatataaacacagaaatactatgtgttctttctaaataattcacatcttttattgataaaattgtcactacaacgtacaaatggagcttttaactagtgacaatgttaacagtgaaacacatttatatttaattctttccaaaaatataagaaacacatttcgcaactaacctagcaactcttatggtaccatcatcttcctactgtgagctcaggcacgtaatatacatttttcactacgaataatttctttattaaccagttggcatggagtattaacctcaaaaaatatattactgttttgaaataaaccaaggaaataaaaaccaaaaatatgaatattaccagaattccaaaattatatcacagttaccttggtaggaaagtaacgcttggtcttaaattgcttgaggaatgaagacagaaaaaatgttgtgaaaaacaagatgacacaccaaaagagcacat

SEQ ID NO: 703416 - DNA, 1769 bp, Homo sapiens
tttacattaaaaacataagactttctaaaaattgttggcagatcattttccacctgtgtaccctactttaaagaccactgattttaaaaataacattttggtctcagtgcaatattataaaattagattttataatataaaataaaatgatcttcattatattccttatttcggatcccctttaaaccagctgcttctgaaagaagtcatataacttgttaaattaaatataaccagtgacactattcacaatgtctttccttttagcataagcaaaggaggatggaagaaaacaaaaacagagcagaaggaaaatgaatatattcaaatctgctaatgaaagcagaaaattcaaatggatgctcagatcatttttcttatagaacacacttcgttttctccttatgctactggaaattgttacatggaattttccaactactgtcagatatactacccttctagaaatttaactagaccctctctgccactcctagaaaattgaattttaggttactttttttttttgagatggagttcccctcttattgcccagtctggagtgcaatggcatggtcgcagctcactgcaacctccgcctcctgggttcaagcgattctcctgcctcagcctcccgagtagcgggattacaggcgcccgccaccacgcctggctaatttttgtatttttagtacaccatgttggccaggctggtcttgaactcctgacctcaagtgatccacctgcctcggcctcccaaagtgctgggattacaggcacaagccactgcacctggcctgggttacttctttataaaaaaataaaggctgtttccttctccctggaaggtacagcaagaactccaggtaggagagcaaagacttttttttttttttaatggctccctacatcttaccacaaatattttcattcactctctctaatggaccagcggtgatacttttaagttcacatgtctcttttctgtccatattgtcattgtttatatacatatgaaaaacacatataaattatttcctttcaaagcatcagcccttcaaagagactacatacttttaaaacaataactactgagaaaatagtatcttgctttaaagtagtgtggtattcccaagtaacaaatagccacttgttttaatccttacctcaaatttttcaggaacatgaagtttaggagatggaactcctacaaggtagtcaattgtaaccattattactattgtgagaaatacagcaaaatcactgattgtcgatcgcacctatgttaaagggattatgttaatataaacacagaaatactatgtgttctttctaaataattcacatcttttattgataaaattgtcactacaacgtacaaatggagcttttaactagtgacaatgttaacagtgaaacacatttatatttaattctttccaaaaatataagaaacacatttcgcaactaacctagcaactcttatggtaccatcatcttcctactgtgagctcaggcacgtaatatacatttttcactaygaataatttctttattaaccagttggcatggagtattaacctcaaaaaatatattactgttttgaaataaaccaaggaaataaaaaccaaaaatatgaatattaccagaattccaaaattatatcacagttaccttggtaggaaagtaacgcttggtcttaaattgcttgaggaatgaagacagaaaaaatgttgtgaaaaacaagatgacacaccaaaagagcacat

SEQ ID NO: 703417 - DNA, 1461 bp, Homo sapiens
tacaaaaattagctaggcacggtgatacgtgcctgtaatccctgctactggtgggctgaggcaggaagatcacttgaacctgggaggcagaggctgcagttagctgagattgtggcactgcactccagcctgggcaacagagagagactccgtctccaaaaaaaaaaaatcaagcttcaacaatattaatgaagatgcaaaatttgaaaaatatataaaaaaaagtctacattctattatacatctaggatttaaagaatataagatccaatgtaataattgcctgattcaaatatatagtggatcagttgccaatcaaatttaaactggccaatccaattcaaacagaagaccaaaayatacacatgtgaataagctatctcagtgaacaaaaaatactgaatttgatcaactatatttttgttcattgaatgctgtgacaaaatctcatctgaaacaaccatgtcactatcacatggctagttaagtagttatagctagttacactatcacactgcaaaaaaaattcattttctgaggctctgacatctctgtaaaaacacattttaatattaggagaaaagagaaatacttacgagtagctggtcagtttatctaagttgttgtgcatattaaatgcatatgtttctcctaaatcaaagagcttctccaaagcctcgtagatgaatatgatgcaaataagggctgcaaaagcctcttctgtaaatcgagtaatataacacacaaggctgcttgcatctgttgcaaccaaaacaatgcacaaaaaagaagtccacagaccaatactggttcttaaagacagataagaaagttgataatctctgtttagaaagaaaaatatgaatatgataaacatatgtggaatagtatttgtacctaaaatttttcattgcaagcaatgggaacagcaaccccccacgattcttaaaagagaatgaattacagaatgacaaaataacatctagaaataactctatatctttttctgcttcggctgaagactagcttattagtagatttattattaataaattaattagtattaattattaatagtttattacacttatataaaagatttacagtgaaaatctaccaggcgataaatatttcaaaatcattacagctcactttataaatcagttatgagtaaatgacaggtatggtgtctatatgaaaaaacaattgcatcttactccctctaaagatccagacatcatatgtatcaatacagtaaccagctccaacatcattaccatcactaccactaccctcctctcccaccattatcaccacagaaagtgatttcttattttaaacttcaagaaattaccagaatctatacttcgggtcactgcattctctattagtctatgtggcatgccagattggaatcagattaagcttgtttagtgagtacagaatcagaaaaagagagct

SEQ ID NO: 703418 - DNA, 558 bp, Homo sapiens
gggattacaggcgcctaccaccatgtccggctaatttttgtatttttaatagagatggggtttcaccatgttggccaggctggtcttgaactcctgacctcaggtgatccacctgcctcggtctcccaaagtgctgggattacaagtgtgagccaccacgccyggcctcaactgtgtatttttaatcctgctaccatccttaattgtttgtaatagtttttcagtcaaataatctgtaagtaagagatagtattattcctccttttctaaatcttatacatgtaattgttttctgttgtctaattgtattaactaaaatctctagtacagtgttaagtagcatgggctttaaataggcatttttaaacttgtttctcactgtagtcaaatgtctctagtatttctcccattaagtaagataatgacattggagccaaaatatacatttcatcatgttaagaaagtaacattatttcttttttattgacatttaaaatataaattgatgtagaattttatcaaatgccttttcagcatctctggcaaatgattatatta

SEQ ID NO: 703419 - DNA, 1694 bp, Homo sapiens
gacaactttgtggctttgtacttactcgctcttccagatcaacgacagagaataattggccattctgtagatggcttcacgagagaagaacttacaacccatgttgggttttttctttttttttttagttcgaaaaggatgttcctgggggaaaatataatcacatttatatttcagatgaaactgtctgtgttggaggttttcaatttgtagcctaaatggttgactcagacatgtctacacatagaacagccaaataataattaagagctatcagtgaacaccaccacactagatattatcagtgtttacccgtagtgtctgctcatatttacaaatcactttataatgttcatgaaagtattttccctcaattatttatttctaactagtcatgtagcatgagtggataatctttcttttttaaaaattgctgattacattccctaaagcaaaaccaactatgtaattaatttagagttgtttttccttaaagaaacattaaacatcaaaatcatgtccttttccacctaagcaaacaaaaaagtacataattcttacaaaaaatgctttaaaataccatttatttccattttgtggtgagttaggagagaggggaggaaataggaagggagaaggaagaagcaggaggcaggggtggaaagtagagacctggataaagggatgagaagacataaaaaggaaaaggaaaacataaatgatcaaggaatgagttgagaggggaaacaaagccggggagagaatgagaaagaaaatggaggaagaagctgggcgcagtggctcacacctgtaaatcccagcactttgggaggctgaggtgggcggatcatctgaggtcaggagtttgagaccagcctggcaaacatgatgaaaccctgtttctactaaaaatacaaaaattagccaggcatggtggtgcacacctataatcccagctactcaggaggctgaggcaggagaatcgcttgaacctgggaggtggaggttgcagtgagccgagatcgcgccactgctctccagcctgggcaacaagggtgaaactccacctcaaaaaaaaaaaaaaagagggacatttggataaagtgaagagcagaacctacctattagggaagggaagtggattgggtttcctaccctgtctgtagactccatgaagaaccatgtctctccagccagaaagatattcttgcttaagtagctccttacaacctacttcttcataaattttgtagattctttcttaaaaattgaaatataatttacacaccatagaattcatccttttaaaatatatagctcaggatttgtggtaagttcacaaggttatgcaatctccaccactaattaattcaagaatattttcatacttacctaggaggtgaaataccatcatcacaaaggtgattttcccagggtgaggcttattcattgcactctggatgtgctgatccctgcaatttccccaaatgtggagaactcaactgcataatctttggcagtgggaaactgtgttcacactctcttctgtaacaacaacaacgaaaaaaatatatatatatatttatcasccctaggaaatcatgtgttttactacattagcagtaactctccatcttttcctccctctagctcctggaaaccaataatctcttttctgtctctatagatttgca

SEQ ID NO: 703420 - DNA, 1220 bp, Homo sapiens
cctggcaagggccttgtagcaagggacagttggcagagagcctgttgtgggctgctgagaaggcatgcagatgggttgcagatcggccgcccctggggcctgaccccaccaggaacgggccagggcagaactcaaccaagggaaattccccttaaaacctcaatgcaccaccacctgccccagttcatctgggagaaacttcagccacttctttttgatcccaagttttctgctttaaacctcaggggtaggtaatggaaaaaaaaatacaaaaaacaaaaaaacagattagtgctaagaagctaaggatcacacagcaagtttttggatgggtctgcccaccttcgttagcgcgaaggccactgtcccgtcatcctcagtggaaaggtcaagcagcttctggtaaaatgcttcatcataaggcccatctatttgtaaggtttttctgaagaagaaagcacaataaaaacaggatgacaaagccgcacggaggttgtttcttaaactgctaacagtctacaaagcccagcaccactaaacatcacacattttgttttgaaaaacacataacagatctatctccctcatgttaaacatcaaggtttttaacagaactcagcaagaccagaaccagcgagccttgaagctgagccttctcctgttcatgacaagtagcatcctgcgtcagagatgcaaggaagaccagcgaggaaggaagaggatcctggccccgactggacaccgcgggtgtggaccccaatgacccgcagtgaaagcccaggacagaggctgggctgacacagaacgacctgcaggagcgctgctcagctgtggagcaacactgccctctgcaggctcagccccatcttggggtttcgaattagcaaggtcacagacgtgctttcttttctagaaacaagtgaccctgttcctcctttacaaggcactacattccagagcaggcctgggcacctgggagcggaggactggggtaggaagtggccggcatgcttcatcctcctgggaagctgtgccttgggaggcgcattcttaccctgcccactcccacagtctcctctcagggctgcccaasagggggaccgcccgacctcacctctcctcgggaaactcttccaggtatcgctcaacccggttgtacagagggtagaggccttcgatgtccagcaggtccaacatctgcacctggagggttttgtaca

SEQ ID NO: 703421 - DNA, 1886 bp, Homo sapiens
tttttttgagacagagtctcactcttgtcgcccaggctggagtgcaatggcgcgatctcggctcactgcagcttccccttcccgggttcaagggattctcctgcctcagtctcctgagtagctgggactatgggtgcccaccaccactgccagctactttttgtatttttagtagatgcagggtttcgccatgttggccaggctgttcttgaactcctgacctcaggttttccacccacctcggcctcccaaagtgctggaattacaggtgtgagccaccatgtcccgcctctttaaggacactttaatctttaagggcacattgattattatagccttgcaaacggtcacatgaggtgattcatgaataaggaatgtgttttaacttttaccaggtggggatgagttagattttcattgaactgcaagatcttatttttagcctgaccgtaaagatggaaggttgggggaggtgatatttaattggggagtaggagaggagaggtgatattattaaaactgcttgtttatttgaaaacttctagcgtttaattgctgtaggaatgagtaatttcattgggatactgtttaattctgttttgataaggatttttcattaatctacctattttactaatgtcacacttttctaggccttcctgaatatttaatttgttttaatctcagaacctaactttccaagggcttagccaggcttcctccatttttttttttttgaggcagagtctcactctgttgcccaggctggagtacagtggtatgatcttggctcactgcaaccttygcctcccagattcaagtgattctcctgcctcagcctcccaagtagctgggactagaggtgcctaccaccacacccggctaatttttatatttttagtagagacggggtttcatcatgttggccaggctagtcttgaactcctgacctcaggtgatccatctgccttggcctcccaaagtgctgggattacaggcgtgagctaccgtgcccagcacaggtttcccctttcattcttgaaccatttttgcatagacatgtgagtgtacagtaaagccggtagacaggcctgaatgagttgtgctcccaaatagagcaaacgggggcaattcaacccatggtgtctcatcttctggaaatacgggcttgtgttttttaatagtatcgtctttcaaagtgactgtcaggattgaatactttctgagattagggttttgagaaataatttaaggggcaataatttcatccatcctcatagccaaagggcagactctatgtttagagaagcaaaattctagcccatgattcagtgtatcagtaagactctggagaacgggactttgttttgcagtatccagagccatatcttgtgaagctggaagctcaccttgcaaatgcctgagttttgggtttaggaagcctacagccgcatacaggtgccctaatcctgtgaaagcatctttacacagctgataccaaaaagttgtatgttgtaaatgttaaaaattaggtagtcttgattcacttgaatcattaaaaaagtgatttttaaaatataattccattttaagattgaaacaaatcaaaccccttagattaaaacccagattgttgctttcaacaactatttcagttgggtttactgtatagaaataagtacattgtatcttttttttctacacagtgaaaataaactaaaatttccctccggttcagtattaactggaacgctttctgtactgaaggttttagtcctcaatcaaacaggaataacgtgggctgaggtaatcatatttctttgttttattacacattaataagcaattaaaaatgtttggtttaatagagaattgttagtacagtt

SEQ ID NO: 703422 - DNA, 1836 bp, Homo sapiens
taccaaagtacatgtaaaactttgttctctgaaatatattgttgcctcatctcctttttaaattaataatattaaattactatgtaaaattaacctaactgtgggaaaatttacaacagattctgaattaaaggattcagaatcttaaagattttcgtttacagaagggtttcattatgtaggcaaatgcaggttttttgttttgttttttttttgagatagagtttcattcttgtcacccaggctagagtgcaatggcaccatctcggctcactgcaacctccacctccctggttcaagtgattctcctgcctcagcctcccatgtagctgggactacaggcacgtgccaccatgcctggctaatttttgtatttttagtagagacggggtttcaccatgttggcccggctggtcttgaactcctgacctcagatgatccacccgcctcggcctcccgaagtgctgggattacaggtgtgagccaccgtgcctggcctgcaggttttttaaattaaatttttttattttgagataatcatatattcacatgaagttttataagaaatgatacacagagatcacttgtacccatgacccaggttcccccattggtaacaagttgcaaaactatgatataggatcacaggctaggtgtgacactgataccggcaggaatatgtgcatcaccacagggaccactcaggttgcccctttacagtcatatttacttgcttcttatccccagccctccatygcaccaaatgcagggattttaaggctgtatctttgaaaacaattaagagataaattcacggtgaaaaaattttattttccatacaggccaacagatgttctccagacagtcaagttattagatctttcctctaatcaattaattgatgaaaatcagctgtatctgatagcccacctgcccaggtaatttgcccctaaatgcctgatacaatagtgttcagtcaattcttagtgaagcagttttcatatgctatgtatgctttctcaatagaaacgtggtaacaatgatggaatttctaaattgagtaattccctttgggaaattttcatttgaattcatttagaaaatttacttgtgaaccctgtataatgtggactatgtctgtaccagataatttgaagaatgaataatttgaccctggtgataatgcggaaagtcttcattcattaaactccgggcagtagaccgtgtctctttcctctgagacgcatttagcacctgacatagcagtaggtactcaagaaccattaggtgactatggagtcattagaatacaggataaagagttcactttgcatgtcctaagttggactttatggtttctaagtattttacatgggattaaaaacccagggtgtaggaaaaaaatttacaaaccgagtctggttgataccccatagcattttacattgttctgtgtaatcaaattgtacattttgaatttcaggttagaacaattaatcctctctgacactggaatttcttctctacattttccggatgctggaattggtatataagattagtaaagttccccactgcccccccacactatacttcagctactttcacttctactgtgtaacttcattcctctttttatagggtgcaaaacgtccatgttcccatccttgaagtacctggtagtaaacgacaatcagatatcacaagtaagagctgctcggagtatgcccagcacactgttgcctctttccactctcatggcagagtttggaggttccttctaccaaaaaagtaaaaagaaatttaaatcgaaagagaaatacctcctcagagtga

SEQ ID NO: 703423 - DNA, 690 bp, Homo sapiens
catcataccacttatcagaatctgtaataatcatgcttacagagtaattgttatctttttcccagcactgaaatttaatctgaagaacaggaggcttgcttatcttgtttactgctacatactatacctggctccaggcatagtgcctgtcacatagtaattgtgcaacattttttttttttcaagacggagtctcgctctgtcacccaggctggagtgcagtggcgtgatctcggctcactgcaacctctgcctcccaggttcaagctattctcctgcctcagcttcccragtagctgggactacaggcgcccacgaccacgcccagctaatttttgtatttttactagagacggggtttcaccatattggccaggctggtcttgagctcctgaccttgtgatccacctgccttggcctcccgaagtgctggaatcgcaggcgtgagccaatgtgccctgccaaatgtattttgattcaaagaattgatggaaactcctgggtcatgtcctagaaggtggcccaagagatcagggaacacttagcattaaatatttctttcaatcagcttctttttttctttgtaatttttagagatattttaaaaaataataattttctgaaaaatgtatcttcttacaaaatataaggagtctttaagtggcaaaggaaaattcttggaattttcct

SEQ ID NO: 703424 - DNA, 1450 bp, Homo sapiens
tgcattttaaaaatagctgggaaggatatgtaataactttaggattgtagttactgctgaagagagaggtagagaatttggttgttgagggatgtaaatacagcatctgtgatattaaatgaatctttgttaaagaaaggaacagacaaggcaaaatatgaatatttaaagatttggatgtgggtaaatgagcctttgttatgtttttctatatatgttcaagtatttgtgaaatattttatgcaataaataaaagatcacaaatrgatgatgaactcacagctggttttaagtaaagactgaataattccagtcaggaaaacacgaacaaaagaaaatgtgaaactttggtcctgagatttgtggcttgttaaatgaaagttgatcatatctcaggtttggaaacatgggaaagttgatcgaatctcaggtttggaaactctccttttgattgttctttgttgttcccaggagaagttccaagaaacttctgggtgcttccaagcatgcttgcatttttaaggctcgagtctggcagatgaataaagactggggaaatgtgtgttcagttttgatttagaattagtaggaaaataaactcagaggtgttcaaagatgagcacaaaaatttctgcctgaaaaaaatgccatgggtgagtgtcctaagataaatgttttcgcatatgtctgcatactttatttccggagttaaaatgcagttccccctccttctttaaaaaaatctattctaataaattttgttgtggcaaagaaaaaaaacttgtttcaagttaaatttttcatgtaatgcatgtttcacatacatatataaagaccctccaaaaaccattgctcaggtaataatttattaagtcaatttaaactaaacattactaccattgcaaaagcatttgctctgaaaagggactgaaaaatgcatcataaagttacatagttcagcaacaatatcaatattgattatataaagtaaaactactggcaaacgtcatttaagcttaccctgtaatttttaataactttataaggagcaaatgtgtcaccttaaaaatgtaccagtggcatttacaaattccttcaaactcatttacaaatacagtaataaaaattcctgagctcccttttcttacaccagtattcaccaatcaacatccatgcggtgttttatttgacccacatcctctttccttttcttaagaaaatattttatcacattcgtaaaagtatctgtgcttcaagtcagtttgtaagtatctgtttttaatgtgaacctgatgataacaagagaaaaatgcttaacattagcaggggcagcaggaattgaggggtggtgtgggggacagtggaggagatgtaaatacaagaattccagtttaggtgttgggacttccaaggtagaatacatctgacaatatcaaaaacagactcagtt

SEQ ID NO: 703425 - DNA, 1547 bp, Homo sapiens
tattttgtaaataacttaaagttattcatcttggaaataatttaattctaagaatactcatctaactctgaaagaattccctgattttgaatatttttattccttcacaaatagtgaaaattgagaagatttgttttttttttttaaagtaaatagtcaagacaatttctcggagggcagctactacttacctgtaagaagaggtattccctcaccagatggcaagaagggaaggagataggtagtctcttagcaagcaaggactgctggtagagaggtccctcagaggtcatcatttacctcatatgctctgtctccagagcaaagatgtcccagtggtttttctgtgttcaaaaaacaactgttgattatcctatcattctgattctacccatgctttaacaagagtaggcttccaccaatttacacacaagttctgttccccaaatttgattgattagaaataagcttccaaagagaagtattgttagacctgtgtactttggccagttcataaaatacatttaaaccctagtaggtaactgaagtataacattaacaggcttattaactgcattctgggagccacatgatacaattgagagaaagagaaaactcttctctctttttcttgagtgcagggctaagctttgacaaaatttggaaatgggtaatgtttgcttttggactctccctcctgaattaacatgcccctaaaatctgtagcccaaggttataacccagaccaaagctctgacagatggctctcagttcacatctttccaattatgtgtagtgagcaaagcacacaggactcctaaaatgggaagggcatgaaaggacgactgtgatggaagatcaaaaggggtgatagatgcctttctagagaatggaagcacatgtcattgatttgactatcttctttcacaatcatattcctcaaaacatggtctgctttacctgagtcattttagacaaatgttgtatctccaactgtacgatgatttgtggagaaacagattgcaaaactggacctgagaagacctttaaaaaagtatatttagtctcatgctgagaaggttttcttgtagcatgcattatctcttctcgtctcctccaaggcctttttctcttttattaatttaaaatattttatttgaagtttgattgatgccgcataatacactaaatatatcttgctaaatatttatgttaaaagagttaytagtacacagaggaaacaggacagtaagttacaccacatgatcagaacatgaattcaagatattgcatcactatttttgttgacattggccatctcatggtgctggctcctcatttatatttagaaatcactcttatatttcctgagcgccacatctttttggaagatgggtgcttttaggttagactgtaagaggctcaaaaacatgctatatgatgttatacacgctttgtctgtatgtataaatgtatgtttccttttctgtaaaaaagttccatagctgtcagattttcaaaggtatctgtgattcaaaaacaaaaga

SEQ ID NO: 703426 - DNA, 842 bp, Homo sapiens
tgccagccgcgcccgcctccgggctcctcgcccctcctcccgcgcgctcccctcctcagcggccgccggaccccctcagttcacttctcccagttaacgcgttcctcggacgctgctagtttgagcgcacaggcattgggcggggctcacgggggagccgcttaataaccgaccaacatgaaactcaagggctgccccttcctagcggggacccctgcacagacccgaaaataaggggttttgctctgcccctcctcagttcacgtgggcaccttggaacactgaagaaggcattttccgaactcactgtcctacggacttattctccgcactgttttcgcctccttcgccctgttctcgtgactgacaggagcaggggtcacaagcaggcagcccgagagctctgctcacctggaaaagcatttttgtgtagcttaaatgtgaaggcctcaggcagtggcctgttgtcctcctccacatgcgcccatcttcactctttcatgtgactggcctgtttttgaaggcaggaccctgtcacccttggctaggccaggtatgttctgcaccgaaaatggccctgccctctgcattggatggctagctcttaggttggtttattttagcaaataagcgttacagggtaggcgaactggctgcatcagaaccacaattacccctgtgtctctgggtgggataaatggcggatggcattctggcagctcagccccacttatctcagaggttatagatctgaggtggtttagatccacccccaaatcacgmacattttacataagccgtgctagagttagcataaaagtctcacagaaaaatttggaaac

SEQ ID NO: 703427 - DNA, 2097 bp, Homo sapiens
  misc_feature 1116, 1117, 1118, 1119, 1120, 1121, 1122, 1123, 1124, 1125,1126, 1127, 1128, 1129, 1130, 1131, 1132, 1133, 1134, 1135,1136, 1137, 1138, 1139, 1140, 1141, 1142, 1143, 1144, 1145,1146, 1147, 1148, 1149, 1150, 1151, 1152, 1153, 1154: n = A,T,C or G
  misc_feature 1155, 1156, 1157, 1158, 1159, 1160, 1161, 1162, 1163, 1164,1165, 1166, 1167, 1168, 1169, 1170, 1171, 1172, 1173, 1174,1175, 1176, 1177, 1178, 1179, 1180, 1181, 1182, 1183, 1184,1185, 1186, 1187, 1188, 1189, 1190, 1191, 1192, 1193: n = A,T,C or G
  misc_feature 1194, 1195, 1196, 1197, 1198, 1199, 1200, 1201, 1202, 1203,1204, 1205, 1206, 1207, 1208, 1209, 1210, 1211, 1212, 1213,1214, 1215: n = A,T,C or G
taaccggttatttttgacatgtttattgatattgtatcttattcttaatatccaaatcagtcatgtgaaacaataaaatttgttcattttagaaatgcttaacacatggcttatttatgagagtgtggactgggcagtttctggaactattaacaatgcagagctttaaccaccagggatctgaaggggtaagagggaggagggcaagaatgttaccataacacaaagagagaactgcacaaagagagcctccatataagctgtgagtttttatcaaagcacagcaccagagtgcaataagccttcaaagagggagctgagacaaacgtaccaatttcattcaccttcctcccttccttgtcctgctggtactccactttgaccatcagtcactagggaaaaaagaaaaggagtcttttgatttagtaaagatatgtcagtcttgggaacaaaagtgaaggtagattaatggaagttgcctacacctgttttgcaccataacatctaccattgtcctctcttcagttaaaaaattgtgtaacagaggacataaaaaggcctgttggttaccaaatttttctggtataatggtaatacagtcatatatccacatgcaaattaaaatgttacctaccactgtactcttaatatagcagacagatataggtcagtgcaattaatatcatagyacttctactgtcctcaattctgcaattgcttattagcttaaattggcaattattgttgcttccttcaactgatattattttcatattccctttatgttcaactagcattttacctaacatgactttttagcttgtagagtgattcatacctttatttctgcaggagtttcgtctctgacggtctggtctttattgccacagttatccattggtcaggattattgagcaagaaaagtaggcaccccaattaattctcaaggtttcaaatgatattctctgtttctgtaatgtccagcagcaatctactttaccactggtaattagaattccctggccagtgtcattcatcatctctgctcattcaacagcaataaggagcaatatatcacagtccagtctcatttccgatttcatgaagccgttcatnnnnnnnnnnnnnnnnnnnnnnnnnnnnnnnnnnnnnnnnnnnnnnnnnnnnnnnnnnnnnnnnnnnnnnnnnnnnnnnnnnnnnnnnnnnnnnnnnnnnaagctcgtacccaaaatattttttataacactgtgtccaagtgtgaaaggaataggaaatgaaattgtcattggcctaactgggatcaagtgatcataaataagcaactctgtccaacatcagaatgaaatttctttcactggaacatcggcaacagattaaatgtaaaggaatgggggaaattaaataaacccaagtatttatgctatattgttttaatgacatgagtaatacaaattttcttatgcttttcacttataattcatatttttttagtttttcatatgttctaagcctatcttgaatttcttttcattggaacattttctcagttaaaatataaagttacatgaaactagtggctgtaatattaactaaatatgtggtcctaaaatatgtttgcatattgtagaaatttatttccaaaatttctcatttgtttgttgtgaaacaaaactttttagtatttttttcactgtatttaaatttaggaagtcacttcaatttcactttggtctacctttacttcattttattttatatttgattacttttaaattttaaaattcttaagatgcaaatttcagagttagttaatgtctatgtttcttttacatcatgttatcaaatggtaatatttctctattttttcttctgtacaaattcataggtgatatttctatctatatcttaattatactataatagtaaattgagtattaatttttaatctaaatattgaaatgtcacattctgttgtttgtgtttttatattgttttgttttgtttttctttctttcttttctaaacactatacatgtgttcctaaaatgtctgcattatagtttttctttattagggtcatactcatgatagagttgg

SEQ ID NO: 703428 - DNA, 1935 bp, Homo sapiens
ctcaaaggagaaataaagaagaaaatatttgagcagattctgtggggtcatatgtgtgtatatttgaatcactgggagagcaaagaagtttaattaagccaaagttacttccaattgcagaggaaagtacaccaaatattagaagggccacaaattcctacatatccaccasgcaacattttaccaaaataggatgataagttcataggataggctgttccatgaaatacctgtcaggttgcgtttgtgaaagctgaagttttttaatgaatttatttgcatttctgagtttatttttcctatatacatcttggtatgtagtttctagtagaagtgtgatgtccttttgtgagattatcataataatatctgacttctcttgagtgaaggcctcaaagtacataatacaaataaaaaaggaaagatataaagaaaacttatgtaaatctttacaaactttgtctaaatctttacaaacttccccagcagaaggcaggatgctactaagagtgccatgtgcagaatgttcgtgtgcagcacacgcatacacacacaatcagtggtctcagcagagcgaagtcattcgcattggccctagataaaagcatccctcacagatggggatgataactttgatgaagcaccttcactgttggaaactctgaccttctagtcaccagccagattgtttacaaacagataatttaaaaatagcctcataaaccaaccaaatcattagtgctataatgccttttaagttatagatacttttaggatctatctagagaaaaatagatgaaatgaagctataatattaatcagctatgaacagtatattttcagcattctcatcattcttttctttatagttttaaatgcactgttatctatttcctgttcttcagtaggtaaaattatccaacattcttcgtactgtgacagtatttcactcaatttgccatttaaccttaaattttgtcatagggtttttcactctctacagatagacttttcctttttactgagcttatgagtcttttagaaatataaagatatacgatagcttatattttcaaaaatgtacctgctttgtgatatatgcaaatatttattttctcatgctgaataagataaaagtttaaaatactgtgagttaaaaaaacaggtcaatcttagctaatattccaggcggaaaatataataaccttgacattttaattgagttcttggaaaaataatagaattggaaagtggaagatacagttagggtatttaaagagcaagtggatgcaaaagcaaggtgaaaagtgctgcatgtcacacatttgactaggttttacaaagtggttaggaaaattgtgacacctgttcatgaaaggaaaatacatggagtccatgaaatctagaagaatgataacaagagatagttctcttaagggggtggcagtgagaatgaaaagagaaattggatgttgcaaacatgagagtgagatgatgaagagagtgtgtgtatatactggggagtcagaggacatagttatagactcacagtcattgtaaaaaacaatgaggcagccagaaaaagagaagtgttggaaaaaaaataagaaattaaacatttttaaccattaaatatatttattttgaaaaatctgatattttgcatatcttttaacaaaaacaaagtctcataaatgtggttgagagaaaggtttgcttggggaaacaagacatctattgatcaatcaattgatcagtctatttattttactatcttgtgttgtgtatgggtatatgtgaaatggggataatgcagggtagagagaataatgaggtctgtaaggggtaaggttttatgtaattcacaagggagatccacattgataaagttaaatttgagtagagatctaaagggagtgaggtagcaatacatga

SEQ ID NO: 703429 - DNA, 1935 bp, Homo sapiens
ctcaaaggagaaataaagaagaaaatatttgagcagattctgtggggtcatatgtgtgtatatttgaatcactgggagagcaaagaagtttaattaagccaaagttacttccaattgcagaggaaagtacaccaaatattagaagggccacaaattcctacatatccaccacgcaacattttaccaaaataggatgataagttcataggataggctgttccatgaaatacctgtcaggttgcgtttgtgaaagctgaagttttttaatgaatttatttgcatttctgagtttatttttcctatatacatcttggtatgtagtttctagtagaagtgtgatgtccttttgtgagattatcataataatatctgacttctcttgagtgaaggcctcaaagtacataatacaaataaaaaaggaaagatataragaaaacttatgtaaatctttacaaactttgtctaaatctttacaaacttccccagcagaaggcaggatgctactaagagtgccatgtgcagaatgttcgtgtgcagcacacgcatacacacacaatcagtggtctcagcagagcgaagtcattcgcattggccctagataaaagcatccctcacagatggggatgataactttgatgaagcaccttcactgttggaaactctgaccttctagtcaccagccagattgtttacaaacagataatttaaaaatagcctcataaaccaaccaaatcattagtgctataatgccttttaagttatagatacttttaggatctatctagagaaaaatagatgaaatgaagctataatattaatcagctatgaacagtatattttcagcattctcatcattcttttctttatagttttaaatgcactgttatctatttcctgttcttcagtaggtaaaattatccaacattcttcgtactgtgacagtatttcactcaatttgccatttaaccttaaattttgtcatagggtttttcactctctacagatagacttttcctttttactgagcttatgagtcttttagaaatataaagatatacgatagcttatattttcaaaaatgtacctgctttgtgatatatgcaaatatttattttctcatgctgaataagataaaagtttaaaatactgtgagttaaaaaaacaggtcaatcttagctaatattccaggcggaaaatataataaccttgacattttaattgagttcttggaaaaataatagaattggaaagtggaagatacagttagggtatttaaagagcaagtggatgcaaaagcaaggtgaaaagtgctgcatgtcacacatttgactaggttttacaaagtggttaggaaaattgtgacacctgttcatgaaaggaaaatacatggagtccatgaaatctagaagaatgataacaagagatagttctcttaagggggtggcagtgagaatgaaaagagaaattggatgttgcaaacatgagagtgagatgatgaagagagtgtgtgtatatactggggagtcagaggacatagttatagactcacagtcattgtaaaaaacaatgaggcagccagaaaaagagaagtgttggaaaaaaaataagaaattaaacatttttaaccattaaatatatttattttgaaaaatctgatattttgcatatcttttaacaaaaacaaagtctcataaatgtggttgagagaaaggtttgcttggggaaacaagacatctattgatcaatcaattgatcagtctatttattttactatcttgtgttgtgtatgggtatatgtgaaatggggataatgcagggtagagagaataatgaggtctgtaaggggtaaggttttatgtaattcacaagggagatccacattgataaagttaaatttgagtagagatctaaagggagtgaggtagcaatacatga

SEQ ID NO: 703430 - DNA, 1935 bp, Homo sapiens
ctcaaaggagaaataaagaagaaaatatttgagcagattctgtggggtcatatgtgtgtatatttgaatcactgggagagcaaagaagtttaattaagccaaagttacttccaattgcagaggaaagtacaccaaatattagaagggccacaaattcctacatatccaccacgcaacattttaccaaaataggatgataagttcataggataggctgttccatgaaatacctgtcaggttgcgtttgtgaaagctgaagttttttaatgaatttatttgcatttctgagtttatttttcctatatacatcttggtatgtagtttctagtagaagtgtgatgtccttttgtgagattatcataataatatctgacttctcttgagtgaaggcctcaaagtacataatacaaataaaaaaggaaagatataaagaaaacttatgtaaatctttacaaactttgtctaaatctttacaaacttccccagcagaaggcaggatgctactaagagtgccatgtgcagaatgttcgtgtgcagcacacgcatacacacacaatcagtggtctcagcagagcgaagtcattcgcattggccctagataaaagcatccctcacagatggggatgataactttgatgaagcaccttcactgttggaaactctgaccttctagtcaccagccagattgtttacaaacagataatttaaaaatagcctcataaaccaaccaaatcattagtgctataatgccttttaagttatagatacttttaggatctatctagagaaaaatagatgaaatgaagctataatattaatcagctatgaacagtatattttcagcattctcatcattcttttctttatagttttaaatgcactgttatctatttcctgttcttcagtaggtaaaattatccaacattcttcgtactgtgacagtatttcactcaatttgccatttaaccttaaattttgtcatagggtttttcactctctamagatagacttttcctttttactgagcttatgagtcttttagaaatataaagatatacgatagcttatattttcaaaaatgtacctgctttgtgatatatgcaaatatttattttctcatgctgaataagataaaagtttaaaatactgtgagttaaaaaaacaggtcaatcttagctaatattccaggcggaaaatataataaccttgacattttaattgagttcttggaaaaataatagaattggaaagtggaagatacagttagggtatttaaagagcaagtggatgcaaaagcaaggtgaaaagtgctgcatgtcacacatttgactaggttttacaaagtggttaggaaaattgtgacacctgttcatgaaaggaaaatacatggagtccatgaaatctagaagaatgataacaagagatagttctcttaagggggtggcagtgagaatgaaaagagaaattggatgttgcaaacatgagagtgagatgatgaagagagtgtgtgtatatactggggagtcagaggacatagttatagactcacagtcattgtaaaaaacaatgaggcagccagaaaaagagaagtgttggaaaaaaaataagaaattaaacatttttaaccattaaatatatttattttgaaaaatctgatattttgcatatcttttaacaaaaacaaagtctcataaatgtggttgagagaaaggtttgcttggggaaacaagacatctattgatcaatcaattgatcagtctatttattttactatcttgtgttgtgtatgggtatatgtgaaatggggataatgcagggtagagagaataatgaggtctgtaaggggtaaggttttatgtaattcacaagggagatccacattgataaagttaaatttgagtagagatctaaagggagtgaggtagcaatacatga

SEQ ID NO: 703431 - DNA, 1935 bp, Homo sapiens
ctcaaaggagaaataaagaagaaaatatttgagcagattctgtggggtcatatgtgtgtatatttgaatcactgggagagcaaagaagtttaattaagccaaagttacttccaattgcagaggaaagtacaccaaatattagaagggccacaaattcctacatatccaccacgcaacattttaccaaaataggatgataagttcataggataggctgttccatgaaatacctgtcaggttgcgtttgtgaaagctgaagttttttaatgaatttatttgcatttctgagtttatttttcctatatacatcttggtatgtagtttctagtagaagtgtgatgtccttttgtgagattatcataataatatctgacttctcttgagtgaaggcctcaaagtacataatacaaataaaaaaggaaagatataaagaaaacttatgtaaatctttacaaactttgtctaaatctttacaaacttccccagcagaaggcaggatgctactaagagtgccatgtgcagaatgttcgtgtgcagcacacgcatacacacacaatcagtggtctcagcagagcgaagtcattcgcattggccctagataaaagcatccctcacagatggggatgataactttgatgaagcaccttcactgttggaaactctgaccttctagtcaccagccagattgtttacaaacagataatttaaaaatagcctcataaaccaaccaaatcattagtgctataatgccttttaagttatagatacttttaggatctatctagagaaaaatagatgaaatgaagctataatattaatcagctatgaacagtatattttcagcattctcatcattcttttctttatagttttaaatgcactgttatctatttcctgttcttcagtaggtaaaattatccaacattcttcgtactgtgacagtatttcactcaatttgccatttaaccttaaattttgtcatagggtttttcactctctacagayagacttttcctttttactgagcttatgagtcttttagaaatataaagatatacgatagcttatattttcaaaaatgtacctgctttgtgatatatgcaaatatttattttctcatgctgaataagataaaagtttaaaatactgtgagttaaaaaaacaggtcaatcttagctaatattccaggcggaaaatataataaccttgacattttaattgagttcttggaaaaataatagaattggaaagtggaagatacagttagggtatttaaagagcaagtggatgcaaaagcaaggtgaaaagtgctgcatgtcacacatttgactaggttttacaaagtggttaggaaaattgtgacacctgttcatgaaaggaaaatacatggagtccatgaaatctagaagaatgataacaagagatagttctcttaagggggtggcagtgagaatgaaaagagaaattggatgttgcaaacatgagagtgagatgatgaagagagtgtgtgtatatactggggagtcagaggacatagttatagactcacagtcattgtaaaaaacaatgaggcagccagaaaaagagaagtgttggaaaaaaaataagaaattaaacatttttaaccattaaatatatttattttgaaaaatctgatattttgcatatcttttaacaaaaacaaagtctcataaatgtggttgagagaaaggtttgcttggggaaacaagacatctattgatcaatcaattgatcagtctatttattttactatcttgtgttgtgtatgggtatatgtgaaatggggataatgcagggtagagagaataatgaggtctgtaaggggtaaggttttatgtaattcacaagggagatccacattgataaagttaaatttgagtagagatctaaagggagtgaggtagcaatacatga

SEQ ID NO: 703432 - DNA, 720 bp, Homo sapiens
tacacttcttgcataccaagcactgtgggagggaacgttacccaaccaacagaataaagctcttcctggctttttacatacaaccaaaatatactgattgcatacatcagacagtgcattttctatgcttagattggaaattaataatgaactgtcttaaaattatctttccaactgagatagtgaaatatctgcagtgtcctaatatattttgttaagttcaggacacttataaacagtgcactggcattctcctagaaaactgttacagtgtgaaaagggatatctatcaaatgttattttttaacaaataattaagctgctcagtggagaaatgtaattatatatttccaaagtcctactacttatarttttctaagacaggagttttgaattgtgaaaaataactacacataccaggtcagttcttgctcttataatatttcattaaggatcctttaaagtgtagaattttcattttgattataccaatgagggtcattaattatcctatttattttgtatgcttgtgcatttatgtatatatgtatacatatgaataacacatacagaatattccatttattcaacaggacttattcttggtgctgggaaatacaaatgaacaaaatataaaagtccctgacttcatggtgcttatattctagggtgggagctaggcaattaacaagttaaataagctatatgtgtatttaggta

SEQ ID NO: 703433 - DNA, 1596 bp, Homo sapiens
acaccattcgatattcccaccaaatgtgtacaaaatttctctacatcctggccaacccttaccttttatttggtaatatcgtaacaggtgtgagacaatatttcattgtaattctgaactgcctttccctgatgattactgatattaagaaccctttcatgtatctagtggccatttgtatgtcttcttagcaaaaatgtctattcaagtctattacccatttttaattgttttgtttgtttgctatctcaaaatcaggcatatatgatcaagtgatctttgacaagggtgtcaagaccacagtgggtgaataggacagtttcttcaacaaatgatggtgagaaaactggacacccacatgcaaaaaaaataaaattggacccctatcttacaccatatgcaaaaatcaactcgaaatgaattaaacacttaaacagtaatatctgaacctgtaaaactcctggaagaaaacagagaaagttttttggcattagtcttggaaagcatttcttgaatttgacacaaaatggacaggcaataaaaccaaaaatagacaagtaaaactacattaaaccaaaaagttctgcacagcaaaggaaacaatcaacagagtgaaaaggcaacttatggaatgggataaaaatatttggaaaccatttagataaggtgctaatataaaaacataaaaatcttctaaaattcaatagcaaaacataagccaattaaacactgacatattagtctttaaagtcattagacaacagaaaaaatatgtttgtatttcatgcattgacctttgtgaaatagtctatattttctatcagaatagtaaagaaagacaatttccaattagtgctttctagcagtctcatcaccttgtattaatatctaagtatctggggggaggagaaggatgaataggtgaaatgcaggagaattttagggcagtaaaacaatactcgtatgatattgtaatcggctgagacacaatgatagttatacatttgtcaacatccacagaactatacaactccaagaataaatcctaatgtaaattattaattttagttaatattcattgatcaattgtaacaagtgtaccacattaatacaaaacgttaatgataggagaaactgcatggtaagaggaagtgttctgtactttccatacagaaataaatgggaactttctgtaactttctgctcattttttctataaacagactgctctaaaaatagtctacaaatttaaaaaactattttgacatctaataacaataccatctactcaaagttactggtattcattaacaaaaaaaggagaagtttacttttgtcttgggtttttacacccttcttttgaaatttagtatcaacrctgcttttctaaatgtaaaaaaagttatacttcatcagtatgatatatgtactagtctgctgggtttcaataacagaataccacagactagggggcttaaacaacagaaacattattttctcacagctctgaatgctggaaattcaaaattaagatgttggtagggttgttttctggtgaggcttctcattttggcttgcagacagccacattcttac

SEQ ID NO: 703434 - DNA, 641 bp, Homo sapiens
gacacaagtatacaaatattcaactgctaaaactgaagagatggccctatactcaaactgaggaagaaacagccttagccctgtgagtctgtgtgctctgggcctgtggaggcatctctgtatcatcttcgggtccttatcttttgttgaaggataaggcatattcatagccagataggcctatggtccttttctgtagaatcccagaagtctgaaagccttcctttattttgtcctgtcttgtctcctttaatccaaaatggcagtatctctgctgctataatcccatcatagtattatggatggaaagattgtccaacgatacagtgagtgtcctctccaaaacatgctttccagtatttattatgcaatataaacaggctgagaattttcagaatcttaatttctggttccctttagcttaaaattccttgtataattcatctttctccttttgagttgactgtaagcggtaaggagaaaccgggccacatcttcaacacttcgcttacaaatctcctctgctaaatattcaaggtcatcactcacaagttctaccttycacaaagcactagaatacaattcagccaaggtttttcttttctttttttctttttttgccactttataacaaggactac

SEQ ID NO: 703435 - DNA, 946 bp, Homo sapiens
atagaaaatgcacaaaatatattgaagaaatagaatgttataattaggaatcaatccaattatatttagtaagttcaaatgctatatctagggtaaatatgattagtgcttacaaccatctggctctcctttggggctcacagagaaaaccaacttttctcataccttttcattaagatagagaattaagatttgttcttgtactagtgatgtgggcagagggatgtaccttgcttctaggctaagtcatttaattgcaaaactctttatgtcttcacctgtttcaaagagatctcatctttacagagagtaagttaacataaaagacaatgcagtctccattatcttgggccccttttaattttgtgaagctgaaccaaccaaaacatgaattggatactgggtgagaaaaaattagtgattttgtagaactaatctgatgtgttttttttgtttgttcctgcaacatatcctttcctacaattaccaatactttctrtctagatacttcctgttctaggctaccatatacccattattaatcatatactatggtatttaattatctccctcatctactgtttggtagcataaacaaccaattatcaagagttctatattactaaaaatataattataaattatactgaatttggccaggcgccgtggctcatgcctctaataccagcactttgagaggccgaggtgggtggatcacctgaggccaggagttcgagaccagcctggccaatgtggtgaaaccccatctccactaaaatacagaaattagccaggcttgttggtacacgcctgttaattccagctactcaggaggctgaggcaggataattgcttgaacctgggaggcggaggttactgttagcgaagatcgtgccattgcactccagcctgggcaacagaatgagactatgtctcaaaaaaataa

SEQ ID NO: 703436 - DNA, 613 bp, Homo sapiens
ttttggtttcaatttccttaaagagaggagaaaagggcagcggtggcctttttaatctctcgcatgacaactcacagagtgcttccaagtctttcatgtactctctgaggtgggtgccacaggctctgcttcacagggggggaagctgaggctcaagttagaaaccatggcgaaaccagctaaagccagacctgtgagtgtgtgacatgggctgatggagctaggctctcaagagccaagcacgtggctcccgaagctgagaaatggactccaccgagcaggtctgatgcagaaacatcaaaatacattcgacttttcatttcccttraactactacatcctagccattccttcagatcgacaggattccagaaatgttacaatgatctgaaatctctttcaaacggaaagacagaaatcacctaacacccacatcctagcacttgggaaactaactccaatctgaagccacaggagagcctaactggttatgcacggcagctgatttaggaaagaaaaggatcacaagcccacaacaaaaaggcatgttgttgataatcaaagacattctctgccaacagggaccctcagagctgctcccatctcgcccacc

SEQ ID NO: 703437 - DNA, 609 bp, Homo sapiens
tctactaaaaatacaaaacttagtcaagagtagtggcgcgtgcctgtaatcacagctactcaggaggctgaggcaggagaatcgcttgaacccaggaggtggaggttgcagtgagccaagattgcaccactgcactccagcctggggaacaagagtgaaactctgcctcaaaaataaaataaaataaaataaaataaaataaaataaaataaaataaaataaaataaaataaaataaaataaaaayaaataaataaaaacatgagtcttgaaacaaaaagttcaatactcagatcagatgataaggccaagagaattttccagaatatagaataaaatatatagaacagacactttaagagaaaagtaacagaaaatattgatacaggaggtctcacatgcaattaagatttttagaaagacagaaacctgagaagaggaagttgcttaagaaaattataattgcttttatttgaggaaggatatatgtctttaggctgaaggacccacaaaaggaaccacaaagtcagacacatcattgcaaaattttataacatcaaggacattaatgttattttgttcatcatggatttttttgcattaattttga

SEQ ID NO: 703438 - DNA, 609 bp, Homo sapiens
tctactaaaaatacaaaacttagtcaagagtagtggcgcgtgcctgtaatcacagctactcaggaggctgaggcaggagaatcgcttgaacccaggaggtggaggttgcagtgagccaagattgcaccactgcactccagcctggggaacaagagtgaaactctgcctcaaaaataaaataaaataaaataaaataaaataaaataaaataaaataaaataaaataaaataaaataaaataaaaataaataaataaaaacatgagtcttgaaacaaaaagttcaatactcagatcagatgataargccaagagaattttccagaatatagaataaaatatatagaacagacactttaagagaaaagtaacagaaaatattgatacaggaggtctcacatgcaattaagatttttagaaagacagaaacctgagaagaggaagttgcttaagaaaattataattgcttttatttgaggaaggatatatgtctttaggctgaaggacccacaaaaggaaccacaaagtcagacacatcattgcaaaattttataacatcaaggacattaatgttattttgttcatcatggatttttttgcattaattttga

SEQ ID NO: 703439 - DNA, 667 bp, Homo sapiens
gttctgtttaggaagcttcatgggacataaagcataagctgtatggagagtacaaatacagagaaggatgactatgttgtactttgagtatgatgtagttagaaaggtttacatgtacgaaattcagtcttaagggagttccaaacaggcaatgaaagaacaatagctgctaccacaaaattgcacttaagtacatagcccacaaactgtaactataacacaactacacaattgaaaatacaaaataaccagctaacaacttcatgatagaatcaaaatctcacatatgagtattaactttaaatgtaaatggttttacttcccaaatgaaaaggtgcagatcaacaagatagatttaaaaaaaacacaacaacaacaacaaaaacaaaaaaaatccaagacccatccctcttccatatgtaagggactcatctcaaaygtaatgacacccttgtcctcaaagtaaaggtttggagaaaagacctatcatctaaatggaaaacaaaagacagcagaggtcactattcttatattagataaagataaaacttactttttttttttttttgagatggagtctcactctgttatgcaggctatagtgcggtggtgctatcttggctcactgcaacatccgcctcctgggtttaagcgattctcatgccac

SEQ ID NO: 703440 - DNA, 1113 bp, Homo sapiens
tcgatggcactgtcaagaagggagcaatggccaagacccttccagggaaattattgatttctgcccgttcgggattctgaagtaaccagcggcactgcaagcttaaccttgttaacgtggaacccaagtgaaatctctcaccgcttccagcgtgaggcgggaccagcagtgcaagttcggctctctcagttaggactcacccttgtcctgggmatctgccggaatgtgacaggcggccaagccacgtgctgtgcctctgagacgatgccggtgaactaaggagtgacacacctttgcaagtcagggctttcggcagcctcccccagctgatcatcatgtatttctgtttctctgataggaccccgccaacacgcatattgacccaaggaatcttcgggatggactctgcttctgatcacatcttcacctgctcgaggatcacctgtggcacgtcgggctctgaatgcaagccccaggacaccccatttcatgcgtctgcattcttaacctcactgcgcattaacatgcatctcaatgcatccaaaataccgcacccccatcacatcagagagcattaaaaataagccagctcaatgcacaaaaatgagggcgacaatcggaaacacaatgatgtttctaaagaatgtccaaccttaactgcagcttttcagtttccaaattctctcttctttatctcgtcatttccctgaatcactggggcccaacaacaccattctcagtcagatgtctgcctgagacacatcatttcaaattcaccggtaaaatgtttgcagttaccagaagtgaccttgttttacacaccaacgtgatgaatttatgtgggtggcttagtggagctgttcatttccagcttggtaatattttaattaattaaaagggaaaaatcaatgaacaaagattctgtttcctatgatattttatattttctacttttattcaaaattaagggttttaacatttttttcggttagtcacaatttttgtctccctccctctccctggttctctctctttctctctattcccccaccctgccccacctctgattctctctctccatcttaaaatgtatatctccaggggcatttaggg

SEQ ID NO: 703441 - DNA, 1278 bp, Homo sapiens
ataatcccatttcaacacccttaacttaatcacacctgaaaaatccattttgccaggtaaggtaacatattcacaggttaggataattgatatttggacctcttttctgggggagtagcattattctgcctcccatgggggtgttgtttatttcatttggaatctcatggataagcctcagatactgtgagaaccacatacagacagaaacacaagcctgaatagtaggacacattattggtcacacctgggtgagacatggtggactcttggctcatatggcctagatttcattccccaccccaggtcctattcactgtgtgattttgaccatgtaaatttgygtcctcagaactcagttttcttatctgcaaattaagtctattaacagaacctattttataggattgctgggctgattcaatgaaataatgtgtatgtggtattatgcacagtaagcattaaatattatttataatagaatagaatcattatatattatttattaatgatggtcatagtaagcattaaataaatattattaataaataacatgtatatatgtatgcatataaataaatacatgtgatacatataaataaatgtgtattatttattaaagatggtcataaatatgccccaagtaaacaggaaccagaaaccagagacaaaaaataaaatacgcatccctaatatctttctgcagctgccacaggtgatcgggaggagatggagagagaagagaaatgtgctggctcagaggctggcttggggttgctgacctccataaaggatcaaatccgaagcagccaatacccctctcacaaacaggccaaagagcctctgggcaggaccttgtgctttaaaagaacacccaactacaaacaccaaagcacaaagattttgtttcctttttttttcagtctcataagaaagttttttgaaagtgtgatcattgattgagtgcatgaaaactaaagaaagacgaatgggccaatgagcgcccccaggccagatggagctagggactgtgagctctgtggcatgactgtgctggatcgaaggaaaggaggaatgagaaccatggcctctgcccttgcatttgcctaatgttaaaaaaaaaaaaaaaaaaaaaaagcaaatcatgtagtatatgtggacagacttacatcgccaaatacctgcataccctttctctgttttatcttctgctccagtggtatcatcttgggaggtgcttagaattacttgaaatcccagattttttttaatgaggta

SEQ ID NO: 703442 - DNA, 633 bp, Homo sapiens
taatgaccacatggtcttgaaagcaaatgtrtcgattatatgttgaataagtcccaactctcgttatgaaaatccccttttgaaaatttcaatgtaaaccacaatttctttaatttgtcattcaaaatcactatttccctcacccctgtaagcatatctatattagtaaatacctaacagttttccatattatctctgagagttcccaaaggtaacattttcccccttttggtagtcttccaggctgtgtgtttaatttctctgtgatgaacatcctaagaaatgaatcaatggatgataatttgttttgcaatttagatttttccccattttagtgtcttaaagcctaaagagtgacagcagaatgtgaagattttgaattatgaataatcttccttattgttccgactttatctgtctctttactatttaacccaagttcatttaatggaaattggatattcaaccatggacctgagtgctacactatttcacatgcttttacatatttttgcattaaagaaaacaaggcatctgcatatctataattagctaatatattcagcactggctcccacaaacaagatgcaggtgtacatagggcagaggcattttatacatagtgctgtcgtg

SEQ ID NO: 703443 - DNA, 633 bp, Homo sapiens
taatgaccacatggtcttgaaagcaaatgtgtcgattatatgttgaataagtcccaactctcgttatgaaaatccccttttgaaaatttcaatgtaaaccacaatttctttaatttgtcattcaaaatcactatttccctcaccmctgtaagcatatctatattagtaaatacctaacagttttccatattatctctgagagttcccaaaggtaacattttcccccttttggtagtcttccaggctgtgtgtttaatttctctgtgatgaacatcctaagaaatgaatcaatggatgataatttgttttgcaatttagatttttccccattttagtgtcttaaagcctaaagagtgacagcagaatgtgaagattttgaattatgaataatcttccttattgttccgactttatctgtctctttactatttaacccaagttcatttaatggaaattggatattcaaccatggacctgagtgctacactatttcacatgcttttacatatttttgcattaaagaaaacaaggcatctgcatatctataattagctaatatattcagcactggctcccacaaacaagatgcaggtgtacatagggcagaggcattttatacatagtgctgtcgtg

SEQ ID NO: 703444 - DNA, 651 bp, Homo sapiens
tttagccttgtaatgtaaatcagcaaattccctggaaataatatattgttttaaatacagggttcaagtaagccttttttttttttttttccctaaaattttgtctctgttcttctggctttttaactgttctctgatatctgcaaataactgctgttttattttatttaccttttataagtaaacatggtttagacgtttatccccaccaaatctcatgttgaaaggtaatctccaatgatggaggtagggcctggtgggaggagtgtgtgtaatggcggcagatccttcatgaacggcatggtrctgtgttcttggtaatgagtgagctctcactctatgagttcacaggagagctggttgtttagaagatcctgtcatctcctgccttgctctttgctccctccctcctgttccctctctcaccatgtgacatgcctcctccccctttaccttctgacatggttagaagcttgctgaggccctcactagaagcagatgctggctctctgcttctcatacagcttacaaactataagccaaaataaacctctttttaaaaacaaataacctggcctcaggtatctctttataacaatgcaaacagactaacagaagcgctcttagcaaagattagtttgatatcagtta

SEQ ID NO: 703445 - DNA, 743 bp, Homo sapiens
  misc_feature 591, 592, 593, 594, 595, 596, 597, 598, 599, 600, 601, 602,603, 604, 605, 606, 607, 608, 609, 610, 611, 612, 613, 614,615, 616, 617, 618, 619, 620, 621, 622, 623, 624, 625, 626,627, 628, 629, 630, 631, 632, 633, 634, 635, 636, 637: n = A,T,C or G
  misc_feature 638, 639, 640, 641, 642, 643, 644, 645, 646, 647, 648, 649,650, 651, 652, 653, 654, 655, 656, 657, 658, 659, 660, 661,662, 663, 664, 665, 666, 667, 668, 669, 670, 671, 672, 673,674, 675, 676, 677, 678, 679, 680, 681, 682, 683, 684: n = A,T,C or G
  misc_feature 685, 686, 687, 688, 689, 690: n = A,T,C or G
tgccttggcctcctaaagtgttgggattacaggcgtgagccactgggcccagcctaattttctcttaagtttatttctattcattttgtagacaattgaatgtttaacaataatttgatttttataaaaaatagtcatctcatgccattgattctaattttctcaggcaaaccatttcatttttactattttgwgtgccaacactcccttctacagcttcaaatactctagatactgttatcacctgttgtcatcataatgaaataaaagtacaagtgagggttgtgttggtatttcagacaagatctggtgtgttgatggtggtatggccataaactgcgttgggatttcagagtggctatcagacaaacttgttctgactttgtttaaatctctgtgactccaccagttacctagacagaaatatgcctatctatcatgaacctccagaccttaaggggtgattatgtgattgattggtgatcaggggctttccatgactcagtaaagagactggtgtgccatttggaagtctataaatgattcctgtggtgattaactgattagttcctcatggaggctgattcaccnnnnnnnnnnnnnnnnnnnnnnnnnnnnnnnnnnnnnnnnnnnnnnnnnnnnnnnnnnnnnnnnnnnnnnnnnnnnnnnnnnnnnnnnnnnnnnnnnnnnaaatgttgcagtaacctgctctgttgtgcctctctggttccaattccgtgttt

SEQ ID NO: 703446 - DNA, 743 bp, Homo sapiens
  misc_feature 591, 592, 593, 594, 595, 596, 597, 598, 599, 600, 601, 602,603, 604, 605, 606, 607, 608, 609, 610, 611, 612, 613, 614,615, 616, 617, 618, 619, 620, 621, 622, 623, 624, 625, 626,627, 628, 629, 630, 631, 632, 633, 634, 635, 636, 637: n = A,T,C or G
  misc_feature 638, 639, 640, 641, 642, 643, 644, 645, 646, 647, 648, 649,650, 651, 652, 653, 654, 655, 656, 657, 658, 659, 660, 661,662, 663, 664, 665, 666, 667, 668, 669, 670, 671, 672, 673,674, 675, 676, 677, 678, 679, 680, 681, 682, 683, 684: n = A,T,C or G
  misc_feature 685, 686, 687, 688, 689, 690: n = A,T,C or G
tgccttggcctcctaaagtgttgggattacaggcgtgagccactgggcccagcctaattttctcttaagtttatttctattcattttgtagacaattgaatgtttaacaataatttgatttttataaaaaatagtcatctcatgccattgattctaattttctcaggcaaaccatttcatttttactattttgtgtgccaacactcccttctacagcttcaaatactctagatactgttatcacctgttgtcatcataatgaaataaaagtacaagtgagggttgtgttggtatttcagacaagatctggtgtgttgatggtggtatggccataaactgcgttgggatttcagagtggctatcagacaaacttgttctgactttgtttaaatctctstgactccaccagttacctagacagaaatatgcctatctatcatgaacctccagaccttaaggggtgattatgtgattgattggtgatcaggggctttccatgactcagtaaagagactggtgtgccatttggaagtctataaatgattcctgtggtgattaactgattagttcctcatggaggctgattcaccnnnnnnnnnnnnnnnnnnnnnnnnnnnnnnnnnnnnnnnnnnnnnnnnnnnnnnnnnnnnnnnnnnnnnnnnnnnnnnnnnnnnnnnnnnnnnnnnnnnnaaatgttgcagtaacctgctctgttgtgcctctctggttccaattccgtgttt

SEQ ID NO: 703447 - DNA, 1713 bp, Homo sapiens
tgaagctgctggggccgcccacgcttcattgttgcgtggagacctgggctacttgagccgcgcagaagaccggcctgggaagctgggcgtggggatgtcctgggggtcgggggagtacagtcacacagtgcttcttgctgggcgcgggacgatatagatctagctctgagattgtcatgggtaccgggagagagatcagttctctctgcttctgtcttggtgccgaaccggctttggctcacaggcaacatcgcctccctccggcgcattttcgctcggtgtatgtttaagaaaggaaggctcagaaatgcgcctagggagggacaacaaatgcaactcgatgggggacctgtggtaggaggaagcggtctgtgggtggcgggctttcttctctctccacgcggtgctctgggtgcaatctgctcaaatgattttggtcttctgggagccctagagttatggagtaatttactaataaatacggtgctagctcacttggtgctctgagcccgctgtcaackgcactaaaagcaaccatctccaaggtgccataaagagctcgttgcatatccggcggagtccaccagaccaggaacccagctctctcggtaacccctaccagctgtgtcagttacagagtgtccatttgcacagagtccagaggtcgacgcactcacagctaagcccagccagggacatggagcattgcgttaacctcgtgttagagctatccccaaaaggtacagcatcttcgctgaatctggcttccaaaggtcccgaggattcccaaacctagaatatatgtttggcaacgcttcacactgaaaaacaaaaacatttcccaccttcagtctctttttgggcccttagcaggtcccatctggggtgacgagcagtccctgtctgccctggacacttcgggtatatgcctgtgccctggtgtccacctgccataacatttctccaggacaaaagtcatgcagttcctcccctagctgttagctcccagcgcccagtcggggctagtcctaaccctgacttcatcctagtgaggactgggcaagtaagtacacacctctctgggccttggtttcctcacttctacttgaagcatgtagactggaataaacagtgttcctcctctgatactggggaaaaaatgcttgaacttagtggagatcgtgggataagggcagccagtcagagggttaatgagcatgacttgggtgagtgttgtgggcttacctgcctgacaccagccactgatagataactaaaaagtgtgagggtggtgacagctgggtcagaatggcgtagcaagatgacctgtccatacaacagttcaaatgcctctcaacagtgggcttcaccgcaggccaaccactacataaggcagagagccagctgcagctggagtccaggattggcaggtctctcttgtcctaggctattcagggctgctcagcttcctctttctccatgctccagagaggtttaaatagcaccggttctatggtacctccccctagaccaatccggctctgtgccctttgggaggaggggggtgcttttttttcaaacagtttattggcatttcctccacagtcgttagtacattcaagtttctcacttcagttgattttggtaatttatctccttcattaatcaagtatagagttgaagatcatactttttaaacttcagaatctttca

SEQ ID NO: 703448 - DNA, 1713 bp, Homo sapiens
tgaagctgctggggccgcccacgcttcattgttgcgtggagacctgggctacttgagccgcgcagaagaccggcctgggaagctgggcgtggggatgtcctgggggtcgggggagtacagtcacacagtgcttcttgctgggcgcgggacgatatagatctagctctgagattgtcatgggtaccgggagagagatcagttctctctgcttctgtcttggtgccgaaccggctttggctcacaggcaacatcgcctccctccggcgcattttcgctcggtgtatgtttaagaaaggaaggctcagaaatgcgcctagggagggacaacaaatgcaactcgatgggggacctgtggtaggaggaagcggtctgtgggtggcgggctttcttctctctccacgcggtgctctgggtgcaatctgctcaaatgattttggtcttctgggagccctagagttatggagtaatttactaataaatacggtgctagctcacttggtgctctgagcccgctgtcaacggcactaaaagcaaccatctccaaggtgccataaagagctcgttgcatatccggcggagtccaccagaccaggaacccagctctctcggtaacccctaccagctgtgtcagttacagagtgtccatttgcacagagtccagaggtcgacgcactcacagctaagcccagccagggacatggagcattgcgttaacctcgtgttagagctatccccaaaaggtacagcatcttcgctgaatctggcttccaaaggtcccgaggattcccaaacctagaatatatgtttggcaacgcttcacactgaaaaacaaaaacatttcccaccttcagtctctttttgggcccttagcaggtcccatctggggtgacgagcagtccctgtctgccctggacacttcgggtatatgcctgtgccctggtgtccacctgccataacatttctccaggacaaaagtcatgcagttcctcccctagctgttagctcccagcgcccagtcggggctagtcctaaccctgacttcatcctagtgaggactgggcaagtaagtacacacctctctgggccttggtttcctcacttctacttgaagcatgtagactggaataaacagtgttcctcctctgatactggggaaaaaatgcttgaacttagtggagatcgtgggataagggcagccagtcagagggttaatgagcatgacttgggtgagtgttgtgggcttacctgcctgacaccagccactgatagataactaaaaagtgtgagggtggtgacagctgggtcagaatggcgtagcaagatgacctgtccatacaacagtycaaatgcctctcaacagtgggcttcaccgcaggccaaccactacataaggcagagagccagctgcagctggagtccaggattggcaggtctctcttgtcctaggctattcagggctgctcagcttcctctttctccatgctccagagaggtttaaatagcaccggttctatggtacctccccctagaccaatccggctctgtgccctttgggaggaggggggtgcttttttttcaaacagtttattggcatttcctccacagtcgttagtacattcaagtttctcacttcagttgattttggtaatttatctccttcattaatcaagtatagagttgaagatcatactttttaaacttcagaatctttca

SEQ ID NO: 703449 - DNA, 639 bp, Homo sapiens
gtgcatagattatatgcaaatatgactccattttacatcagaggcttgaccattcaaggatttgtgtatcccatgggagtcctggaaccattcccccatggataccgaggggtagctgtacatttattggtgcctgccttcttgcctggtgcctgtttgttctttttggattaagagaaataattcctggctgtgcacrgtggctcacacctgtaatcccagcactttgggaggccgaggcgggcggatcacctgaggttaggagttcgagaccaggctggccaacatggcgaaacttcctctctactgaaaatacaaaaattagcgggcgtggtggcagccacctatattcccagctagtcgggaggctgaagcaggagaatcgcttgaacccgggaggcggaggtttctgtgagccgagatcctgccactgcactccagcctgggggatagagagacattctgtctcaaaaaaaaaaaaaaaaaagagaaataattcctgtcacagggagcggaaacatgctgaaataattatttgctgaaattgttttccaacagatggctttaggaatcaggagatttgacactaggacgttaggtgggcaatggatttctagtaatttgtcagctttgttttat

SEQ ID NO: 703450 - DNA, 639 bp, Homo sapiens
gtgcatagattatatgcaaatatgactccattttacatcagaggcttgaccattcaaggatttgtgtatcccatgggagtcctggaaccattcccccatggataccgaggggtagctgtacatttattggtgcctgccttcttgcctggtgcctgtttgttctttttggattaagagaaataattcctggctgtgcacggtggctcacacctgtaatcccagcactttgggaggccgaggcgggcggatcacctgaggttaggagttcgagaccaggctggccaacatggcgaaacttcctctctactgaaaatacaaaaattagcgggcgtggtggcagccacctatattcccagctagtcgggaggctgaagcaggagaatcgcttgaacccgggaggcggaggtttctgtgagccgagatcctsccactgcactccagcctgggggatagagagacattctgtctcaaaaaaaaaaaaaaaaaagagaaataattcctgtcacagggagcggaaacatgctgaaataattatttgctgaaattgttttccaacagatggctttaggaatcaggagatttgacactaggacgttaggtgggcaatggatttctagtaatttgtcagctttgttttat

SEQ ID NO: 703451 - DNA, 639 bp, Homo sapiens
gtgcatagattatatgcaaatatgactccattttacatcagaggcttgaccattcaaggatttgtgtatcccatgggagtcctggaaccattcccccatggataccgaggggtagctgtacatttattggtgcctgccttcttgcctggtgcctgtttgttctttttggattaagagaaataattcctggctgtgcacggtggctcacacctgtaatcccagcactttgggaggccgaggcgggcggatcacctgaggttaggagttcgagaccaggctggccaacatggcgaaacttcctctctactgaaaatacaaaaattagcgggcgtggtggcagccacctatattcccagctagtcgggaggctgaagcaggagaatcgcttgaacccgggaggcggaggtttctgtgagccgagatcctgycactgcactccagcctgggggatagagagacattctgtctcaaaaaaaaaaaaaaaaaagagaaataattcctgtcacagggagcggaaacatgctgaaataattatttgctgaaattgttttccaacagatggctttaggaatcaggagatttgacactaggacgttaggtgggcaatggatttctagtaatttgtcagctttgttttat

SEQ ID NO: 703452 - DNA, 845 bp, Homo sapiens
tcaggcaatcttcctgcctcagctacctgtgtagctgggactacaagcatgtgccatcatgcctgccagttcaagaccagactaggcaacacagcaagacccctcatcactaaaaaaataataataattttaaaaaccaaattttcttaattttagagccagtagaaaacatsaacttcagtcattcattttatatttgaagaaacataaggcccagaaagtgcaaatgctaaaagttaatgctataacctatttactagcaaagctagacttgaaaccaaaaagccaagggtagtgtatttctcaaagtatgtctgttgataatgtgcttcaaactacctgaggagcttgtttaaaacccagagtcatgggtcataatagctttttttttggaaacacaaggtttcactgtattgcccaggctggtcttgaactcctggcctcaagtgatcctcccaccttagcctcacaaagtgctaagattacaggtgtgaactgcccctggccactgttttttttttttaaacatcaggaattttaaaagcatttcctcatttaatctcaaaacgtggccaggcacggtggctcacacctgtaatcccagcactttgagaatcccttgaacccaagaggcagagattgcagtgagctcagatcacaccactacactccaacctgggtgacagagcaagactccgtctcaaaacaacaacaacaaaaaaacccagcaaggtaggtctgatctccattttacagaaaaagaaatacaggctcagaagatgaagtaacttgctaaggatacagagctagtagaaccagaactggaaccaagttctatccagcac

SEQ ID NO: 703453 - DNA, 656 bp, Homo sapiens
caagtagctgggattacaggcacctgccaccatgcccagctaatttttgtatttttagtattgatgggatttcaccatgttggccaggctggcctcaaactcctgacctcaggtgattggcccgcctcggtctcccaaagtcctgggattacgggtgtgagccaccacacctggcctgtttgtttttagacagggtccttggtaaaaagaatttgaggggaaaaaaaaaaagagacaaggttttgctctgttgtctaggctggagtagaatggcacaatcatgacacactacagcctcgaagacctggsctccagcaatcctcccacttcagtctcctaaacacctgggactataggtgtgcaccaccgtgcccagctaatttttatattttttgtagagatgaggtttcactatattgcccaggctggtcttgaactactaggctcaagtgatcctcccttcttagtcttccacagtgccgggattacagccatgagctactgtgcccggcctgtaggttcttcttttacgtattttttttttttttgagacggagacttgctctgtcacccaggctggagtgtagtggtgcggctcactgcaacctctgcctcctgggttcaagcgattctcctccctcaacctcctgagtagc

SEQ ID NO: 703454 - DNA, 1790 bp, Homo sapiens
  misc_feature 1390, 1391, 1392, 1393, 1394, 1395, 1396, 1397, 1398, 1399,1400, 1401, 1402, 1403, 1404, 1405, 1406, 1407, 1408, 1409,1410, 1411, 1412, 1413, 1414, 1415, 1416, 1417, 1418, 1419,1420, 1421, 1422, 1423, 1424, 1425, 1426, 1427, 1428: n = A,T,C or G
  misc_feature 1429, 1430, 1431, 1432, 1433, 1434, 1435, 1436, 1437, 1438,1439, 1440, 1441, 1442, 1443, 1444, 1445, 1446, 1447, 1448,1449, 1450, 1451, 1452, 1453, 1454, 1455, 1456, 1457, 1458,1459, 1460, 1461, 1462, 1463, 1464, 1465, 1466, 1467: n = A,T,C or G
  misc_feature 1468, 1469, 1470, 1471, 1472, 1473, 1474, 1475, 1476, 1477,1478, 1479, 1480, 1481, 1482, 1483, 1484, 1485, 1486, 1487,1488, 1489: n = A,T,C or G
gaggccgggcatggtgactcatgctggtaatcccagcactttgggagactgaggcaggtggatcacttgagatcaagagtttgagaccagcctggccaacatggtgagacctcatctctactaaaaatacaaaaattagctgggcatggtggtgcatgcctgtaatcgaagctacttaggaggctgaggcaggagaatcgcttaggaggctgaggcaggagaacctgggaggtggaggttgcagtgagccaacattgcaccactgcattttagcctgggcaacagggtgagactctgtctcaataaataaataacaaataaaattaaataaatgaaaatagcagctatgtgatgctgagtctgaaaatacaagatattcagatttttatggtatctcctactgttttatcatgttttttaaaatgcagactgtgatagttaattttatacaccaatctgactggatcaaggaatgtccagatgtctggttaaacattatttctgagtgtgtctgtgaggatgtttctggaggagattagcatttgaatctgtggactcagtagactgccctccctaatgtgggtacgcatcatttaatctgttgagggcctgaacagaacaagaggcagaggaagggggaattcccgccccccaccctgcccctttttctggttaaatgcttgagctgggacatttaatctcattttctcctgcccttataccaggattttataccattggctcctctgggccatacatacatacatgtgtgtatgtgtgtgtctgtatatatatatatgtgtgtgtgtatatatatatatccatatcctattaattctgtttctctggaaaacccagactaatacatttacctgttatctcaaggggagttcccagtggctcattcacagccaaagaaaagtgtgttgccattcatatgtgttagcaccagccagaaatggatgaccactgcttctcagtgctcctgacagacagaggtgagggcaagacttcttgtgtggaattttgagcagaatgtctagttgtccaatttttggaaagaaaaatgacctggttctatattgatccatgagcagtggctagtggattggctagctgttcagacttggaaagaaggggccatttacctccttgtatccaattaccagaagggcaccatgttactgttttatcatggggagaaagagtgctagggaatgcatagtattggactacctcgtaggcctcctttgcctgatagttgtggtcaatgaaaatacggtgccaacccaatcgaaagaccaccaaagatgcaaatccctcaggcaagtgactctgtttagggaaggtgctagcaaagagtagggtaaacatgaaatgggtcacagannnnnnnnnnnnnnnnnnnnnnnnnnnnnnnnnnnnnnnnnnnnnnnnnnnnnnnnnnnnnnnnnnnnnnnnnnnnnnnnnnnnnnnnnnnnnnnnnnnngaattccaaatatctgtgttctgtataccaaatcatattccctcagggctgaactggacgtagagctactcttttacaaactaattcacaaaactactatactggaacaaatggaataagaagagtggttcctttagttgcagaaactactcttaatctttctttccaccccaacacaagtagggatatgacgcttctcactgttattagtgggtcaccagaagagagatctcatgagagacaaggggaactaggaggtatatcaaatcctgaagggaaaatatatgtgttttwaaaatcc

SEQ ID NO: 703455 - DNA, 2486 bp, Homo sapiens
ggaaagggaagtccctgaccccttgtgcttcccgagtgagccaatgcctcgccctgcttcggctggtgcacggtgcgcgcacccactgacctgcgcccactgtctggcactccctagtgagatgtacctggtacctcagatggaaatgcagaaatcacccgtattctgcgtcgctcacactgggagctgtagaccagagctgttcctattcggccatcttggctcctccctcctaatctcaaagattttatacttgcaaaagttaggggattgccactctacaattttaagcttctactggcatagaattgccttattttgtcttctagattatattatctttaaaagcaattactcaaaactttattaatgttagcattaaaactcaattaatgcagccatttaaatattgcttacctcaggaaatatacccagattgttgagctaaaaacctacatgtcctccttgatttctgtctttaactaatcttcttgcttctactcttttgtcccttgttattcattctccagaaaccagaatggtcttttaaaatttccaaccaaagcatgttacttccaagttaaattcatcaaatgagttttgtttgtatttaaatattatccaaaacactttaccttaactttcagagccctacacaatttgccattacctccttttccaacctcatgttataacactagccctggtctttgcattggtcaagttagactccactttggtatgttctgaagacccccaaatttgtttgaaatttaaggcctttggatttgctgagcctcatgcctactatatccttgccagagctcctagcatggttacattccactgtcactaaggtcttggtttatgtctcactttctcagagacacctcctcttccttgccctcccaatattaactggtcatgattctttatcatagtacctcatttatttttctcattatcttatttctctttgtttattcattcatttatttgaccaatcattcattcattcatcttacttttcaggttcttctttagatataggtaccagaaaagtagaaagaaaactacctttaaagttcacaactacatccttgatgccaaaagtattttctggtacatactagacactgaataaatatttgttgatggaataagcaaatgaatgaatagctgagggacagtagttataactaacatttagaggcaaattattaaaactgcattctctaaaaaaattttgaagcattttttataagaaactttatgtaatattatacctcaaaagccaaagatgaaccttttttgtctggcaaattaaaaaatcagtttgaactaaagaactaatgacactttttgtaagccagaatagaaacaaatcctgtccctaaagcaaaattatacatatatatatataaaatatgaaatataaaacttccattacattttcagaaatgattaaagatggaaggtaaaatgtagattaagatgtaaaatagctttaattcaaataagaattgatcttcctgttctttgccatgtaagacaatattgtacatagtacattctctctctgtctccctcttccccctctttctaaatctaggtagagaactatggtcacatagtgataattactctttgggcttgccttttctttagcatataatcttttactgtataatatcattttaggataaacattaagaggagttaaaatgatgtgggtcttttcagaaataaacctacattttagatatttaaacaataatgattttaacataatacactgtgatcaccaatgcaaatttgtagtaaatttggaaatagtcgatctctatattatcaatactctgcaatcttgagcatcctgattgagttaaggtaattccattgctcagatgattaaaactcacaatttgttagtttgaataaaactcacaatttgttagtctgaatataagcttagtagttcctttttacctgtgaacagaagacaaattaaccttttaacagttaaccttattatccattgtaaacattctatgggcataatacatcataggtagtgacktaggtgcttagaaagcctattaactctaaaccaatagagtaccacttaatgaactgcagcaataacgatccaaggggttcccttgtggactgaagagctttgctgccctagatgcctaagcactactcaggagaaatttagacacttggaaaaatgcatgccatggaaactgtacctatataagcaatgcaaagtcaagacttaaggtactttttccagataattcaaagtcaaagaaaagtatttataaaatactttaaaataattgagagaagcataatgttatgaagtttttgagagagaggctgttctgtgatatttatttctatagtgcattgcactatgtaccacacagtaggttctcaataaacatttgttgaataggtggatcatgtgaataaataca

SEQ ID NO: 703456 - DNA, 2486 bp, Homo sapiens
ggaaagggaagtccctgaccccttgtgcttcccgagtgagccaatgcctcgccctgcttcggctggtgcacggtgcgcgcacccactgacctgcgcccactgtctggcactccctagtgagatgtacctggtacctcagatggaaatgcagaaatcacccgtattctgcgtcgctcacactgggagctgtagaccagagctgttcctattcggccatcttggctcctccctcctaatctcaaagattttatacttgcaaaagttaggggattgccactctacaattttaagcttctactggcatagaattgccttattttgtcttctagattatattatctttaaaagcaattactcaaaactttattaatgttagcattaaaactcaattaatgcagccatttaaatattgcttacctcaggaaatatacccagattgttgagctaaaaacctacatgtcctccttgatttctgtctttaactaatcttcttgcttctactcttttgtcccttgttattcattctccagaaaccagaatggtcttttaaaatttccaaccaaagcatgttacttccaagttaaattcatcaaatgagttttgtttgtatttaaatattatccaaaacactttaccttaactttcagagccctacacaatttgccattacctccttttccaacctcatgttataacactagccctggtctttgcattggtcaagttagactccactttggtatgttctgaagacccccaaatttgtttgaaatttaaggcctttggatttgctgagcctcatgcctactatatccttgccagagctcctagcatggttacattccactgtcactaaggtcttggtttatgtctcactttctcagagacacctcctcttccttgccctcccaatattaactggtcatgattctttatcatagtacctcatttatttttctcattatcttatttctctttgtttattcattcatttatttgaccaatcattcattcattcatcttacttttcaggttcttctttagatataggtaccagaaaagtagaaagaaaactacctttaaagttcacaactacatccttgatgccaaaagtattttctggtacatactagacactgaataaatatttgttgatggaataagcaaatgaatgaatagctgagggacagtagttataactaacatttagaggcaaattattaaaactgcattctctaaaaaaattttgaagcattttttataagaaactttatgtaatattatacctcaaaagccaaagatgaaccttttttgtctggcaaattaaaaaatcagtttgaactaaagaactaatgacactttttgtaagccagaatagaaacaaatcctgtccctaaagcaaaattatacatatatatatataaaatatgaaatataaaacttccattacattttcagaaatgattaaagatggaaggtaaaatgtagattaagatgtaaaatagctttaattcaaataagaattgatcttcctgttctttgccatgtaagacaatattgtacatagtacattctctctctgtctccctcttccccctctttctaaatctaggtagagaactatggtcacatagtgataattactctttgggcttgccttttctttagcatataatcttttactgtataatatcattttaggataaacattaagaggagttaaaatgatgtgggtcttttcagaaataaacctacattttagatatttaaacaataatgattttaacataatacactgtgatcaccaatgcaaatttgtagtaaatttggaaatagtcgatctctatattatcaatactctgcaatcttgagcatcctgattgagttaaggtaattccattgctcagatgattaaaactcacaatttgttagtttgaataaaactcacaatttgttagtctgaatataagcttagtagttcctttttacctgtgaacagaagacaaattaaccttttaacagttaaccttattatccattgtaaacattctatgggcataatacatcataggtagtgacgtaggtgcttagaaagcctattaactctaaaccaatagagtaccacttaatgaactgcagcaataacgatccaaggggttcccttgtggactgaagagctttgctgccctagatgcctaagcactactcaggagaaatttagacacttggaaaaatgcatgccatggaaactgtacctatataagcaatgcaaagtcaagacttaaggtactttttccagataattcaaagtcaaagaaaagtatttataaaatactttaaaataattgagagaagcataatgttatgaagtttttgagagagaggctgttctgtgatatttatttcyatagtgcattgcactatgtaccacacagtaggttctcaataaacatttgttgaataggtggatcatgtgaataaataca

SEQ ID NO: 703457 - DNA, 2486 bp, Homo sapiens
ggaaagggaagtccctgaccccttgtgcttcccgagtgagccaatgcctcgccctgcttcggctggtgcacggtgcgcgcacccactgacctgcgcccactgtctggcactccctagtgagatgtacctggtacctcagatggaaatgcagaaatcacccgtattctgcgtcgctcacactgggagctgtagaccagagctgttcctattcggccatcttggctcctccctcctaatctcaaagattttatacttgcaaaagttaggggattgccactctacaattttaagcttctactggcatagaattgccttattttgtcttctagattatattatctttaaaagcaattactcaaaactttattaatgttagcattaaaactcaattaatgcagccatttaaatattgcttacctcaggaaatatacccagattgttgagctaaaaacctacatgtcctccttgatttctgtctttaactaatcttcttgcttctactcttttgtcccttgttattcattctccagaaaccagaatggtcttttaaaatttccaaccaaagcatgttacttccaagttaaattcatcaaatgagttttgtttgtatttaaatattatccaaaacactttaccttaactttcagagccctacacaatttgccattacctccttttccaacctcatgttataacactagccctggtctttgcattggtcaagttagactccactttggtatgttctgaagacccccaaatttgtttgaaatttaaggcctttggatttgctgagcctcatgcctactatatccttgccagagctcctagcatggttacattccactgtcactaaggtcttggtttatgtctcactttctcagagacacctcctcttccttgccctcccaatattaactggtcatgattctttatcatagtacctcatttatttttctcattatcttatttctctttgtttattcattcatttatttgaccaatcattcattcattcatcttacttttcaggttcttctttagatataggtaccagaaaagtagaaagaaaactacctttaaagttcacaactacatccttgatgccaaaagtattttctggtacatactagacactgaataaatatttgttgatggaataagcaaatgaatgaatagctgagggacagtagttataactaacatttagaggcaaattattaaaactgcattctctaaaaaaattttgaagcattttttataagaaactttatgtaatattatacctcaaaagccaaagatgaaccttttttgtctggcaaattaaaaaatcagtttgaactaaagaactaatgacactttttgtaagccagaatagaaacaaatcctgtccctaaagcaaaattatacatatatatatataaaatatgaaatataaaacttccattacattttcagaaatgattaaagatggaaggtaaaatgtagattaagatgtaaaatagctttaattcaaataagaattgatcttcctgttctttgccatgtaagacaatattgtacatagtacattctctctctgtctccctcttccccctctttctaaatctaggtagagaactatggtcacatagtgataattactctttgggcttgccttttctttagcatataatcttttactgtataatatcattttaggataaacattaagaggagttaaaatgatgtgggtcttttcagaaataaacctacattttagatatttaaacaataatgattttaacataatacactgtgatcaccaatgcaaatttgtagtaaatttggaaatagtcgatctctatattatcaatactctgcaatcttgagcatcctgattgagttaaggtaattccattgctcagatgattaaaactcacaatttgttagtttgaataaaactcacaatttgttagtctgaatataagcttagtagttcctttttacctgtgaacagaagacaaattaaccttttaacagttaaccttattatccattgtaaacattctatgggcataatacatcataggtagtgacgtaggtgcttagaaagcctattaactctaaaccaatagagtaccacttaatgaactgcagcaataacgatccaaggggttcccttgtggactgaagagctttgctgccctagatgcctaagcactactcaggagaaatttagacacttggaaaaatgcatgccatggaaactgtacctatataagcaatgcaaagtcaagacttaaggtactttttccagataattcaaagtcaaagaaaagtatttataaaatactttaaaataattgagagaagcataatgttatgaagtttttgagagagaggctgttctgtgatatttatttctrtagtgcattgcactatgtaccacacagtaggttctcaataaacatttgttgaataggtggatcatgtgaataaataca

SEQ ID NO: 703458 - DNA, 2486 bp, Homo sapiens
ggaaagggaagtccctgaccccttgtgcttcccgagtgagccaatgcctcgccctgcttcggctggtgcacggtgcgcgcacccactgacctgcgcccactgtctggcactccctagtgagatgtacctggtacctcagatggaaatgcagaaatcacccgtattctgcgtcgctcacactgggagctgtagaccagagctgttcctattcggccatcttggctcctccctcctaatctcaaagattttatacttgcaaaagttaggggattgccactctacaattttaagcttctactggcatagaattgccttattttgtcttctagattatattatctttaaaagcaattactcaaaactttattaatgttagcattaaaactcaattaatgcagccatttaaatattgcttacctcaggaaatatacccagattgttgagctaaaaacctacatgtcctccttgatttctgtctttaactaatcttcttgcttctactcttttgtcccttgttattcattctccagaaaccagaatggtcttttaaaatttccaaccaaagcatgttacttccaagttaaattcatcaaatgagttttgtttgtatttaaatattatccaaaacactttaccttaactttcagagccctacacaatttgccattacctccttttccaacctcatgttataacactagccctggtctttgcattggtcaagttagactccactttggtatgttctgaagacccccaaatttgtttgaaatttaaggcctttggatttgctgagcctcatgcctactatatccttgccagagctcctagcatggttacattccactgtcactaaggtcttggtttatgtctcactttctcagagacacctcctcttccttgccctcccaatattaactggtcatgattctttatcatagtacctcatttatttttctcattatcttatttctctttgtttattcattcatttatttgaccaatcattcattcattcatcttacttttcaggttcttctttagatataggtaccagaaaagtagaaagaaaactacctttaaagttcacaactacatccttgatgccaaaagtattttctggtacatactagacactgaataaatatttgttgatggaataagcaaatgaatgaatagctgagggacagtagttataactaacatttagaggcaaattattaaaactgcattctctaaaaaaattttgaagcattttttataagaaactttatgtaatattatacctcaaaagccaaagatgaaccttttttgtctggcaaattaaaaaatcagtttgaactaaagaactaatgacactttttgtaagccagaatagaaacaaatcctgtccctaaagcaaaattatacatatatatatataaaatatgaaatataaaacttccattacattttcagaaatgattaaagatggaaggtaaaatgtagattaagatgtaaaatagctttaattcaaataagaattgatcttcctgttctttgccatgtaagacaatattgtacatagtacattctctctctgtctccctcttccccctctttctaaatctaggtagagaactatggtcacatagtgataattactctttgggcttgccttttctttagcatataatcttttactgtataatatcattttaggataaacattaagaggagttaaaatgatgtgggtcttttcagaaataaacctacattttagatatttaaacaataatgattttaacataatacactgtgatcaccaatgcaaatttgtagtaaatttggaaatagtcgatctctatattatcaatactctgcaatcttgagcatcctgattgagttaaggtaattccattgctcagatgattaaaactcacaatttgttagtttgaataaaactcacaatttgttagtctgaatataagcttagtagttcctttttacctgtgaacagaagacaaattaaccttttaacagttaaccttattatccattgtaaacattctatgggcataatacatcataggtagtgacgtaggtgcttagaaagcctattaactctaaaccaatagagtaccacttaatgaactgcagcaataacgatccaaggggttcccttgtggactgaagagctttgctgccctagatgcctaagcactactcaggagaaatttagacacttggaaaaatgcatgccatggaaactgtacctatataagcaatgcaaagtcaagacttaaggtactttttccagataattcaaagtcaaagaaaagtatttataaaatactttaaaataattgagagaagcataatgttatgaagtttttgagagagaggctgttctgtgatatttatttctatagtgcattgcactatgtrccacacagtaggttctcaataaacatttgttgaataggtggatcatgtgaataaataca

SEQ ID NO: 703459 - DNA, 644 bp, Homo sapiens
caagtaactcaggaatggaaaactaaacatagtatgttctcattcatatgtgggagctaagctatgaggatgcaaaggtgtaagaatgatacattggactttggggactggggagtaaggatggagggtggcaagggataaaagactacacattrggtacagtgttcactgctcgggtgatgggtgcatcaaaatctcagaaatcaccactgaagaacttattcatgtaaccaaacaccatctgttccccaaaaaactattgaaataaaaaaattaaataaaaaaactccaaaagaaaaaatattcaaaaagctgccaactgagaagcttacagcctgcaaaactatctttcaaatattaaagtgaaataaaaacattcccagaggaaaacatggagggaaatgctatctgatctgtgttacaggcaatacttaagctagttcttcaggctataaagacgtgacacaaaagagtaattaaaatccatatgaaaaagtgaaaagtattggtaaaggtaattatatagataatatgaagcacagtaaaattacacatttcttttcctttcttctcttacgtagtttataaagaaactgtataatacaatatatataaaattatattgttgaccctataacttataa

SEQ ID NO: 703460 - DNA, 671 bp, Homo sapiens
tgtgtttgcatatctgcgggcatgttggtttattctgagacactaattctccactttaccttacagatcaaaacattatatagatgccttgatgaaacttaagccaaaaaagcataacaaagtggtagcaaattaatgattggcaaaaagtcatgaggaatattttacgacaattaatttttgaattattacaattgtaactaacagtactattttctatatcagcttcactgaaatgaacctcagaagtaaaaacaaaaccctcttttcttttctctggtgtaagcaactccttggaaatggattaagtaaacatgagccctgtgcatttgataaatatgtatgtcttatttctcctttccyactgctttccatccagctgcagctgggaaccaagcaataaatactatttatttattttaatagtatgcttagtggaagtattaccaatatttcctatgcttaaaaacatccccaaatgcattttgtgttaggctcagcattttcatcgtaatttacaacttaaaagggtaaattctattactctatgtcaaaccaacaactgggtaagtgcagaatgttaccctgtgaactatgaccaaatttattgctgcagtcattagtacatattgattctgcttataacaacccaaagggaatagtaaagctat

SEQ ID NO: 703461 - DNA, 671 bp, Homo sapiens
tgtgtttgcatatctgcgggcatgttggtttattctgagacactaattctccactttaccttacagatcaaaacattatatagatgccttgatgaaacttaagccaaaaaagcataacaaagtggtagcaaattaatgattggcaaaaagtcatgaggaatattttacgacaattaatttttgaattattacaattgtaactaacagtactattttctatatcagcttcactgaaatgaacctcagaagtaaaaacaaaaccctcttttcttttctctggtgtaagcaactccttggaaatggattaagtaaacatgagccctgtgcatttgataaatatgtatgtcttatttctcctttcccactgctttccatccagctgcagctgggaaccaagcaataaatactatttatttattttaatagtatrcttagtggaagtattaccaatatttcctatgcttaaaaacatccccaaatgcattttgtgttaggctcagcattttcatcgtaatttacaacttaaaagggtaaattctattactctatgtcaaaccaacaactgggtaagtgcagaatgttaccctgtgaactatgaccaaatttattgctgcagtcattagtacatattgattctgcttataacaacccaaagggaatagtaaagctat

SEQ ID NO: 703462 - DNA, 671 bp, Homo sapiens
tgtgtttgcatatctgcgggcatgttggtttattctgagacactaattctccactttaccttacagatcaaaacattatatagatgccttgatgaaacttaagccaaaaaagcataacaaagtggtagcaaattaatgattggcaaaaagtcatgaggaatattttacgacaattaatttttgaattattacaattgtaactaacagtactattttctatatcagcttcactgaaatgaacctcagaagtaaaaacaaaaccctcttttcttttctctggtgtaagcaactccttggaaatggattaagtaaacatgagccctgtgcatttgataaatatgtatgtcttatttctcctttcccactgctttccatccagctgcagctgggaaccaagcaataaatactatttatttattttaatagtatgcwtagtggaagtattaccaatatttcctatgcttaaaaacatccccaaatgcattttgtgttaggctcagcattttcatcgtaatttacaacttaaaagggtaaattctattactctatgtcaaaccaacaactgggtaagtgcagaatgttaccctgtgaactatgaccaaatttattgctgcagtcattagtacatattgattctgcttataacaacccaaagggaatagtaaagctat

SEQ ID NO: 703463 - DNA, 671 bp, Homo sapiens
tgtgtttgcatatctgcgggcatgttggtttattctgagacactaattctccactttaccttacagatcaaaacattatatagatgccttgatgaaacttaagccaaaaaagcataacaaagtggtagcaaattaatgattggcaaaaagtcatgaggaatattttacgacaattaatttttgaattattacaattgtaactaacagtactattttctatatcagcttcactgaaatgaacctcagaagtaaaaacaaaaccctcttttcttttctctggtgtaagcaactccttggaaatggattaagtaaacatgagccctgtgcatttgataaatatgtatgtcttatttctcctttcccactgctttccatccagctgcagctgggaaccaagcaataaatactatttatttattttaatagtatgcttagtggaagtattaccaatatttcctatgcttaaaaacatccccaaatgcattttgtgttaggctcagcattttcatcgtaatttacaacttaaaagggtaaattctattactctatgtcaaaccaacaactgggtaagtgcagaatgttaccctgtgaastatgaccaaatttattgctgcagtcattagtacatattgattctgcttataacaacccaaagggaatagtaaagctat

SEQ ID NO: 703464 - DNA, 1333 bp, Homo sapiens
tgaataaaaccccaatactgcctctttgctaagccgtaaaatacacccaatagaaattacttyaataaaagttgactactagcatacttaaatacactcaaagagcaatatgaaaacttagctaggcccgattcctctctcatgtattacaggaatgaaaatatttcttggcttataggaaaagagctaactgcttttcaaaataaagggaagaggggaacccaccacaaagtaacacattgcatactttttctgtagtatcgttttattttcaataaatataagtacattaatttggaagacatactattagtatcaggaaaagccagacaaaaatctggggtttctagacatttcaaatattgtaaggcaaaaccttgtgcccctttgtcatgctccatcccctcaagactgcacacaaaaggtaataaatctacagtttttccagataaaagaaagtatctactaaccagctaagcacaatgggtgtaataaaatcacagaattagtctggctttcatctgataaaatacctcagaaaggccagtgatgcttttaatgagtggccttgagcaattcatttaacatgttttagcctccatgttactcttttctaatctaaaacattaagacgcatctacttcccagcagtgttgaggcctaatttcatttgattgaaaagcctttgggctttttccatgatcagctgtatttggtttcagaagttcagaactgtcaaaattagtgacagaaaagtgatgtcacagagtaactcttttgcttaaaactctgattccaataattgtagtttgatttttatgctgtaaataagtagtataaaatatctttagtaatgtacatatatgtcacatatcttttgacataggcaaccctagggagctttccatgactaacgtggttttctccaccggcttgaattgcattcaccccacaatgaagaaaacatcaatgattcaatttccttttgtcaaagcccttgggcattatctgtgaagaattaattctcaaatatacttgaccaaatgtaaagaatatgtaatgtgctatgtcatttttgaacataattttctttcaacctcagtataatgactaagcatgccatgccatgtataatcaatatcctcagacaacagagtgaaaaagcaatgtggtacagacatcaagtttacagaaaactgttagattgagaaagaggtatgagtgttctttttaatcagcaaagacctctgcagaaaccacaatggatagcatattaatttgcctcactgaagctgaaaatatacttttgactacagaacaagtatattataaa

SEQ ID NO: 703465 - DNA, 1262 bp, Homo sapiens
ttttaaaaatataaacaacaggccaggtgtggtggctcacacctgtaatcccagcactttgggaggctgacacgggtggatcacctgaagtcaggagttggagaccagcctggccaacatgatgaaaccccatctctactaaaaatacaaaaaattagctgggcgtggtggcagactcctctaatcccagccacttgggaggctgaggcaggaaatcgcttgaacccgggaggtggaggttgcagtgagccaagatcgcgccactgcattctagcctggtcaacaacagcaaaactctgtctcaaaaatgaaagaaaagaaaagaaaaaacccacctgaatgtatgatgagaaaagtataatcttttaggaaatcatatagcctcctctcccccacccacaaaaccgcagttaatagtatatatttcttcacagttatgagctgaatggttattttaaagaagaatttcaggaataaataagtgatttattcacaacttttacaaaacaagtaaatattctaattactgctcgctcctaagcaaaaggaaggaggaaagacaaaagtatacataatttacaagttgatgttttagctagtatctatcatgatgctacagaacggccatccaaccattacccattagagcaaaaaaagtactgtccagtactaaacacaaaatccagggacgacaacccagaaggaatataggatgcaaaaggtagcatggcgctgggcacggtggctcatgcctgtaatcccagcattttgggaggccgaggcgggcggatcacaaggtcaggagatcgagaccatcctggctaacatggtgaaaccccgactctactaaaaatacaaagaaaaaaaaaattagccgggcgtggtggtgggtgcctgtaatcccagctactcgggaggctgaggcaggagaatggcattaacccggaaggcggagcttgcagtgagccgagatggcgccactgcacttgagcctgtgtgacagtgcaagactctgtctcaaaagaaaaaaaaaaaaaaaaggtagcatggttcttccaaarggcatcacaaaatcttgacagaaacacaaagatcaggctgggcagagtactgagcacctgcaatcccagctactggttaggcagaggcaggaaaagttcttgagtccagaaagcggagcctgtaatgtgcaacgatcgtgcctatgagtagtcactgcactccagcctgggcaacatggcgagaccctgtctctaaaaaaa

SEQ ID NO: 703466 - DNA, 1313 bp, Homo sapiens
atgtccactgaggcacaaagagttgatgacagtccaagcactagtggaggaagttccgatggagatcaacgtgaaagtgttcagcaagaaccagaaagagaacaagttcagcccaagaaaaaggagggaaaaatatccagcaaaaccgctgctaaattgtcaactagtgctaaaaggtacttcagttattataacctttttattgttggtatcaatttatcatcttaagttctatttttctcttgcatttaatcattttttctgggatgtcggccgtgaacttcatggatttttcttttcccttcaagatgatctcgtttacatggttttaaccatagggaacttcagtatttaaagtcagttaaatggcaaggcaaattcataacatacatttccatagtgtgtttgtgtgtttatgtattatcagggaaacatatacagggtgtgtatgtaaaattgcagtagtttcatttatggttacttgaccataaatattttttttctgttcagtaacacagaatagagattaggaatctttgaagtagttactgagtgagtgacagtttattttccactactcccagttggtaaagtcagaaatgctgacattagcaacaggtgcatcttggtttcattacattagtcagtggatccatcttgatacrgattttctctttctctagagaatagatggatctggaaagtaggtatttgaatgattttctgttggtactcaatctcttaaaatgattggcatgtcactggacttaaagggaatctgtttgatattgttacattatagaatatctcttggaaaataatttgaaagataaattaaatgtagtgtctttcctgatcctgtgattttatgttcttgctttgttttcatatattttacattgaccaagtcggaagtatacataaaagcgatctgtaacttgtaggcatagtggaatgcctgaatgttgtattacagctttatatgttattttatggtgtgggttaaggggaactcctttctcaaagataaaaaaccattattttgttctagtagaccttgttttcctttggcttagtcagtctacagggttggaaagaaccttctcaggacccttggtgagagatgttggagggatggtgagtggttattccaaggtactagagtattcagtttccctttcatgggggtgtattgctgatctctgttgaaggagctgtttgaaagtcagagagccctgaactttaaactttgagacctgtatactagaccatgctagggtggggaagagggttcagtttgttttgccatcaca

SEQ ID NO: 703467 - DNA, 617 bp, Homo sapiens
tttctgtttgttagttttccttctaacagtcaggaccctcagccgcaggtctgttggagtttgctagaggtccactccagaccctgtttgcctgggtctcagcagcagtggctgcagaacagtgcatattgatgaaccacagatgctgctgtctgatcgttcctctggaagttttgtctcagaggagtacccggccgtgtgaggtgtcagtccaccccctactgagagrtgcctcccaggtaggctacttgggggtcagggacccacttgaggaggcagtctgcctgttctcagatctccagctgcgtgctgggagaaccactactgtcttcaaagctcagttggaaatgcagaaatcaccagtcttctgcgtggctgacactgggagctgtagacgggagctgttcctattcggccatcttggctcctccccttccttaatgtttcttcgcttaattaatctttcttcccaatgtagttcatttcttagtttctttgtctttaatcattttcctgataattcagacttgtggaaaattgctgacacatgtccattcatcctcctggcccttttatttctccttgtcagtatagctcgtatctttgtaatttcctcc

SEQ ID NO: 703468 - DNA, 614 bp, Homo sapiens
ttgagtgaaatttggtatatgcttagagtatttcctataagtagtggaatatatttttcttggccttaactgtcatgttggctaacataactgacccatgacatttgcaagggttctatcctgaggccttcacagatccactgatcaataaatgttttcatactactgctgagttagaggtgctgggcagttggttagaattgctcrttaccttggtgccttgcacaccagcttagatggatagagtgggtcaaattgatgctttatccttacagacctctaacaggtagattcactgccccttataaatgactacaggttgtaactttcacagttcttcacaaattgttaaaagcaagatcttagatctgtgcatgtcagtgtgttcatttatacttcctcggtgctagtggagaactggcagctagtgggccagcaaatctccagataaaaattaaaattaaaatcgtcatcatccaaaggataacttgctcctctgtatcacagagaagctaacttgttcaaatgctattatgatctgctactgctaaagtttgtattaggtttatgagcaggggaatgacagagaatccttattactttttggaagaaaa

SEQ ID NO: 703469 - DNA, 1422 bp, Homo sapiens
tgtactgttagccataaaaaagaatgaagtactgtgtctacatgctacaaaatggatgaaccttgaaacattctggtaagtgaaagaagccagccacaaaggaccacaaactgtttgactatttatatgaaatgtcctgaacaggcaaatccataaacataaaattcagtagtgaacctcacgcctgtaatccccaatgttttgggaagctcagggagcaccagcctgggcaacgtagtgggactcgatctctacaaaaaataaaaatatgattgataccactgcattccagcctgagtgacakagcaagaccctgtctcaaaaaaaaaattaataaaaaaataaaatgggtaagtggttgccagggagtgaggggagagtagtgaagagtgacggctaatgggtatgatgcttccctgtgcggtgataaaaatgttcttaaattagataattataatcttgcacaattctaataataaatattctaagaactacagagttgtacatttttaaagggtaaattttatagtatgtgaattatatatcaataatgctgttacagaaaataagaaaaaaatgattaagggtctactctctaccaggcgctgtgctaagccctttggtcccacaactgtgaaaaacctcgactagccaacttgctaagtacaaaaacgaaggttagtacaaatacttgtgggaacacaaaaatgggacgacactttcaaatccctattcaatcaatacatcctcagggctgggctaaggttaaaattctccaaactagtaagtggttgtaagtaacctttgtgataacagaagaacacagaggcctgcatgactgcatgattctaaataaaaattgaaccatatgacagcattcagctatatactaaagcaaccatatttcacaagagatgaagacactgaagattttttttttttccccacattctggctaaaatatccctcaaggctttcaaattccctttgctctgagttcaggccccccaagcagttctgattaccaactcaatttcctcaataccttgatatttaggtagctgttataatctagacagcagacacaaacaattccagtaagtgaaaaggagtatctctcctcaactgtcattctatcataatcaatttctgagtttgatgactatgaatacatcccttatgagctgactagcttaaagtgttctgacaaatccagaactgaaccaacaaaactcatgcccagactctaaaaggccttgtgctccccatggttttgtcacctaataatcactttcagcactgtatagctatcttctcagacacctttttaaaaacaaaatacctatacttaataagtaccattaacagcaaaaaacatatctttaaaaattataggtacactgaacaaattccttttgaaat

SEQ ID NO: 703470 - DNA, 636 bp, Homo sapiens
tgccccatcttmtgaactctggttctcccgtgcttgacatctttacacatactatcctttacatgctatcccatgcacgtgccccaagtgggtaatcctatttatttcatcccaaagctttcgtgtatgctctaggttaaaggtttgggaggcagagacctttccatttcattaacagaaacaattaaaaattgaatattagacatccctgtacttagagctttgctcatttctgcacctcagattccagctgctataaaagttcctttgtaaggccgtctgtatggttgtgtagtttgtacagtgcacagaagaatctggccaagggaggtgagtgagggtaaaatccagcctgtgatctgcttatcaagctgtgagcccgagggaaggcctgtgtttactcagaggtggtccttttcgctaattaatccactcagatgggcacttttatctaagtcacacaagggctatgttaactcatcatttttctctctcctatccccttcttttatctggtctttatatccaaggagcaattaaacaaattcctcgtataaattcatattctcttagcctaaactcttcggccacacatatgttttctgaattcagaattttcagaatgtagaaaggtac

SEQ ID NO: 703471 - DNA, 1076 bp, Homo sapiens
ttctgaaatagcccttctattctctatcctttaatactacaaatccttcttatacagattatggtctgtggaccagcagtatcagcctcacctgagagcttgttagaaatgcagaatctcaggcctggtcccagacccactgaatctgaatctacagtttatcaaggtccccaggtgattcacaggcacattaaagtttgagagamcccgatgtaatgattataaatacaatatattacctcttataagtaatgaaacctgaagagaaaggcaagagtgtagaaataagtaattattcagatacatgagccagaaaagagaagcattgtgtagagggattcccccagagacccctgcctccacctgttgagctagtgattggcatcccttcccttagggaaggatgactccatgtgacacgctattcataatgctgactatatccaaaagagagctagctggtccatgtctttatgatgacaatacagtaagagaagggcttgccttttgcttgattttcaatccacttctgtataactgtttttttcactactctgttttgcagatgaaaaactgttgtttttgaaaaggttgaaggtaaacctaatagaatctttcctaagaagaattaaagactccttgatataaggatatatttttttatttggaattcattttatgaccagaacgttttcctaactgaacacttcattgctcacctgagcccaagaattactcaggtaatctggtgtcttactgtaggaattagtaagtgctcattataagcccatgaagtgctatactttacagcgtggtggttcctaaacttgaacatgcgtcaatatcactcggagagcttgttaaaaccgattcctgggcatcagctccagagtttctgattcagtaagtcgaggtggggcccaagaatttgcaattctaatatccaggtgacactgatagctgatgttcctggtgccaagtttactttgagaaccactatgatagagaatcttcttagaaaacattgagctttgcttatcgaagtgggtgacctctgtctaacctgggagccagct

SEQ ID NO: 703472 - DNA, 1076 bp, Homo sapiens
ttctgaaatagcccttctattctctatcctttaatactacaaatccttcttatacagattatggtctgtggaccagcagtatcagcctcacctgagagcttgttagaaatgcagaatctcaggcctggtcccagacccactgaatctgaatctacagtttatcaaggtccccaggtgattcacaggcacattaaagtttgagagaccccgatgtaatgattataaatacaatatattacctcttataagtaatgaaacctgaagagaaaggcaagagtgtagaaataagtaattattcagatacatgagccagaaaagagaagcattgtgtagagggattcccccagagacccctgcctccacctgttgagctagtgattggcatcccttcccttagggaaggatgacyccatgtgacacgctattcataatgctgactatatccaaaagagagctagctggtccatgtctttatgatgacaatacagtaagagaagggcttgccttttgcttgattttcaatccacttctgtataactgtttttttcactactctgttttgcagatgaaaaactgttgtttttgaaaaggttgaaggtaaacctaatagaatctttcctaagaagaattaaagactccttgatataaggatatatttttttatttggaattcattttatgaccagaacgttttcctaactgaacacttcattgctcacctgagcccaagaattactcaggtaatctggtgtcttactgtaggaattagtaagtgctcattataagcccatgaagtgctatactttacagcgtggtggttcctaaacttgaacatgcgtcaatatcactcggagagcttgttaaaaccgattcctgggcatcagctccagagtttctgattcagtaagtcgaggtggggcccaagaatttgcaattctaatatccaggtgacactgatagctgatgttcctggtgccaagtttactttgagaaccactatgatagagaatcttcttagaaaacattgagctttgcttatcgaagtgggtgacctctgtctaacctgggagccagct

SEQ ID NO: 703473 - DNA, 1076 bp, Homo sapiens
ttctgaaatagcccttctattctctatcctttaatactacaaatccttcttatacagattatggtctgtggaccagcagtatcagcctcacctgagagcttgttagaaatgcagaatctcaggcctggtcccagacccactgaatctgaatctacagtttatcaaggtccccaggtgattcacaggcacattaaagtttgagagaccccgatgtaatgattataaatacaatatattacctcttataagtaatgaaacctgaagagaaaggcaagagtgtagaaataagtaattattcagatacatgagccagaaaagagaagcattgtgtagagggattcccccagagacccctgcctccacctgttgagctagtgattggcatcccttcccttagggaaggatgactccatgtgacaygctattcataatgctgactatatccaaaagagagctagctggtccatgtctttatgatgacaatacagtaagagaagggcttgccttttgcttgattttcaatccacttctgtataactgtttttttcactactctgttttgcagatgaaaaactgttgtttttgaaaaggttgaaggtaaacctaatagaatctttcctaagaagaattaaagactccttgatataaggatatatttttttatttggaattcattttatgaccagaacgttttcctaactgaacacttcattgctcacctgagcccaagaattactcaggtaatctggtgtcttactgtaggaattagtaagtgctcattataagcccatgaagtgctatactttacagcgtggtggttcctaaacttgaacatgcgtcaatatcactcggagagcttgttaaaaccgattcctgggcatcagctccagagtttctgattcagtaagtcgaggtggggcccaagaatttgcaattctaatatccaggtgacactgatagctgatgttcctggtgccaagtttactttgagaaccactatgatagagaatcttcttagaaaacattgagctttgcttatcgaagtgggtgacctctgtctaacctgggagccagct

SEQ ID NO: 703474 - DNA, 1558 bp, Homo sapiens
cttccgtgccatacaggcaagttaccttctactcaagtcaggcctcttattctatatccaataggctcacttttgcaattaatcttggctcatcctacttttttctccacataatgcacccagctctgcacatttatccatccaaattctgtgtttccttcaagatcaggatctaactcaagtctggcttctatgactctttccctaactcacttgtctataatgggatctactttatccaagtcattgtagcaaagtgttacatggtctctctcaaaagagacacttttagcaaggaaggtctctgcagggaaaaaacaatcaacctccaaaggaagggagtagtactaggttctcaatctttaaaatcatgtgcctgggccaggcatggtggctcatgcctcccagcacttcggtaggccaaggcaggcagatcacttgagctcagcagttcaagatgagcctgggcaacatggtgaaacccccwctctaacaaagatataaaaaattagccggatgtggtagtgtgcgcctgtggtcccagctactcaggaggctaaggcgggaggatcatttgagcccagaagacagaagttgcagtgagccatgatcataccattgcattccagcctgggcaacagagccagacgccgtttcaaaaaaaaaaaagagaaaaaatcaaaaaataatttgcctgcccaagttaaacattaataaaaccaatttttacttatctacattttaactttacatatacaagtgatatgaagaaaaatttatcttcttggtaattaacatggaagaagtttcctttgcaagaatagtgtgttgctacagaaaataaagaggatactttgaatggatgaaaccccagagaatatgctcaacagtagatagatccataaatgccctttaaggagggtacttcctattaaccatagaactttcatttgagcactcagatgaatgaagtattctactgtaataggatgttgaatgagactttgctgcctggaatttttgacactgtcccaggctgagagcaatgaaggaaaggtagccttacattccaaggagatgttaaatatacatgcacatgacttactaaaaaactacactagccccatgattcttagccccccttgtatctgcagcctattgaagagcttaggggcatatttgaacacagaaatttggatctacttcccacttacagaatcacacatatgtaatcctgtttggaaaaaaaaaaagaattagattgaaattaggttgtctccaaaaagctacaggctgaatagaatagcacactatttaagaacacattcttcgaactggatttaagtcatgcctctgccatgtaccagccagggaatctcaccaaagttactccatctttgtgagtctgtttcctcatccttaaaaatgcagataatgaccaggtgcagtggctcatgcctgtaatcccaacattttgggaggctgagaagggtgggtcacctgaggttgagagttcgagaccagcctggccaacatggtgaaactctctctaataaaa

SEQ ID NO: 703475 - DNA, 1637 bp, Homo sapiens
cttgcaactccccactgctggtaacaaatgagtctttccccatctcaggaaaacctgtggaacctggagagggcagtgaagagctaaatgagtaattctgaaagaaattacacaacctacctggagtataagagatctaccacagaattttaaatgctgactcttttttattggatgcttgtttaatttgagatattaaatattctgcttgagaaatgtgttttgtaatcactttttatctttggctataaatgatattcctcttgttcttgataatgatatctaatttagtaatttaattttcattccaccagacaggcgttcccacacacaattgaagtatgcatttaraaagaaacctaagactgagcaggttggctcatacctgtaattccagaactttgggaggccaaagcaagagcatcacttaaagcccggatttcaagaccagcctgggaaacatagtgagacccccgtctctacaaaaatattttaaaattacctaggcataacagtggtgcacacctgtagtcctagctactcaggaggctgaggtgggaggatcacttgagcctgggagttagtgattacagtgagctatgattaatcagtgccactgcactccagcctggggaacagagcaagatcctgtctctaaaaagaaaaagaaacataatatagatgccttccttggatccaattaatatttactgagtgctccctagatgcctgacactttcacaaacactattttatttaatattctcccagactagtttagttttttcagcaaacatttattaagcacctataggtgccagcatcataccagatgctggggatacgtatcagtcgggatggacttgctaatgttgtggtaacagacagtcccacatcatagtgacttaaaaccaagaaggattatttcacactcacactgaacatgcagcatgggttggctggcaatctgttcttcatctccatcatgcccactcagagccctgggttgacagagcactcactgctctacattgctggtcagccaaggaaatagccaagggggtgggaaggtctcagcttctccggcccagggttggcacaaatcacactcatacagaaccagccagatggcctcagggggtcaggaggtacaattctaccacatgcccagaagcagagttcaaaatagtctgcaaccagcatcaaggacttaaaggatggaaagtttaaatgacgtggttcttgcctttggtggagcaatcagtccagttggggagacagacacataatttgaaattttcacatcctcagtgccaacagaagtctgcaaagaggtatgggagcagagagggaaagtggtgaatccagattggatgtatggagggtagcaaaggccttgaaagcccaaaaaaatgatattcacagagtcagatgtagactctgctcattcagctctgttcagagcgagagaatctcagcaaacggaatttgagactttcaatcatattgccaaggccaatcccattatgagataactgcctcaggggttatcagagcctgatgctattgaacatgctattgtttaaacaattcctcttaggctaattctggtgctctctaagcaaacatctccatag

SEQ ID NO: 703476 - DNA, 637 bp, Homo sapiens
ttttcccttaaactgttggatttatcatattttctatttcctcttttgccttgttctggttttaaagcaatattttctatttctatattttgagattacccttaacattcttatatatgattaatcaacagaaatcttaatttaaccaatatttctaacttcttataaataatagactattaaaacattttaaattcagtaaactcctattctacatgtaatagttttcttctatttttaattccaccttgaaattacatccccaaaactcattattttgttgatcctattattgttttcatttgtatcactgcttatcaatttattactatttcatatcatttattatacattttggattcctgtaccatgcaggcaaataaatgtggatattaagtccatgtaaagtataggttggtggtttcattttctcaggtcagacttttttttcatcaagaaccatatggaaacacagaggtttcctttttgtatctttggcctttttttttttttttttttttgccggggkgggttggggcgtttttttgtttgcttgttttttcaccctatcattgagggtacagcctcagcctctcaaatgtcttggcttttgcagaaacctcagatttattcccta

SEQ ID NO: 703477 - DNA, 594 bp, Homo sapiens
tggtgagaaactcaggtttacttctttgttggtgttaaatatgttgacttctgtctatttccacagttaggacttagattttttaagagtcagtagggtgttattcagcaaaaatggactactggcccaaacatarcacttgatttagaaaagtaatataaaagatgcatataatatttcattttaaaatttacaataattgagtcctataaaatctgattgtaaagaatttaagatttaagttttctatgagcctagcttcttgaatcctgtgcttattcggctaagttctgggaaaataaagaataggatattatctctgatcttaagttactcaatgtagtgtatctgttccatttccatggaaataagtggtacagttgggttatgttgtacaaagttctatggcagcagaaaaggcagactaaagagatcaaggaagaagctttcatgaaggatatgaaagcatacacttttgccagatagacaaagcaggtggtggtgtatgccacacaaaggatgttgcatgaaattgctgttacctttggacatcaagcacttcagtcttattagcatgtaggccatatgtggaga

SEQ ID NO: 703478 - DNA, 1077 bp, Homo sapiens
atcttgctggtttgtgtttatttttttaaacatctccatgtaaaagagattaaatcatttatgaaacaggagggcaaagctaatgagattcaggaaatgctaatctctaagtacagcacatttaaagcacatttaaacagttagactagaaattatatatggaaacccaaataaagtggcattacatttccaacttactctagaaatgtttccagaatccttttgaagtagtttgcccatctaattcagtttgttaataccttcagccatcttttcctactcaacatgtttaaaaccaaactcactatttaagaagttactttgtcatcctatgtgctcagattcaaaactgcctgctaggaaagttattttggtatatgacatctgtttatcctccaaccttttagaatgatgtccagaacattaaatgggctaaattctattttcatgagccaatcaaaatttatgccccccaaaaccactgtatatattttgatcaaattataagaactctgcaacagacagttcaatactgtacataagaagtcttaataaaaaagttgtttcattcataatccagatctctggtttaaaattaaatggaatgtctctcaaatgtagaaaaatatgagagtaagtatgaaaaaaggagagtaaatgatttgataaacccaaaataagaaatataattattaaactatttatctgcttattttccttctgtatagtataattctgtgcagagataattctgaagtaaataggcccctttcagagcacagacatgaagggatttctaaagccaggagcagggccaaattatatggctctaacctgattcttataagcaccacactcttaccaatcaaaaactttgaagatcatagcttattgaaatttcgcattaatatacatcaaaatcctaagtaacgtgaacaaaataaagttaatgatgtttatatttcatgtaaattgaaattagagaaagaaaaggtaacaattctaattaatattttaaatttgaccaagatcattggcaagtagttttttgctaaaatattcaatagcaaaamaaaa

SEQ ID NO: 703479 - DNA, 667 bp, Homo sapiens
gagagatttgtgtccatggacgctctcatcccttcttcccagcgttgagtttcgtgtcctttgctctgggctgccaggagcccaaggctcaggaagcattgtctgattcatctgggtctagccagttgggcacacttgctaggtttaatgagtttttcttyttattcatgagatttggagccagattttatatatttattttttcccctatgcttctgtaaggcattgaaattcatatatttctgctctccctttatctcacacatttattttctttttgagtgacagcataatgaggtcaccaaacctgagtattattcacagggccataagcttaaaggagagaggagctccctatatagacacacaccctttattttgcaaccgctgataaatggttcctgaaagatctgctggcattagtcttctcagcattttcccaaggcccctgctgaggtttcgaacctggctctgataatttagccctcagaaggaaatgttttttccatgggtgaaaggtacagtattagaatatttccttgtgttacccactaaatgtaggcacacagttttcacgaaattggcttcaagagctacacatttgaatctggaatcttgcctaatttgttgtcaccactggctttgtgatgaaagagtaggtggagaa

SEQ ID NO: 703480 - DNA, 610 bp, Homo sapiens
tttgtctacactagatgtaatgaatgttatttatatctatttattattccgtaacaactatgtgtgtgcgtcctttgacccagcaaattctatttctaaaattttggttcacggaaataaaagcactcgtacatagactaaatgtacaaattaatggtataatttgtggtgggagaaatgaagtgaatgctcataaataagggaatgggtgaatatattttggaacatccatacagaggagtattatactgtcattaaaaagaattgagtttgccagacatggtggctgacaactgtaatcccagaactttgggaggctgatgtaggaggatcacttgagctcaggagttggacaccagcctgggcaacataacaggacttcatctctactaaaaataaaaaattagctgggtatagggtcatacacctatagtcccagctactcaagaggttgaggtgggcggattgcttgagcccaggagatggaggctgcagtgaggcaagatcrcgccactgcactccagtctggacaacagagcaagaccatgtctcaaaaaataaataaatacataataagtatatgcatatgtatttagatatctattaagaa

SEQ ID NO: 703481 - DNA, 503 bp, Homo sapiens
tgtgatgaccttgttggccgctgaagtgaccaatactggacttgcagcatttttgttctgtgagataataaaccctgttatgtctcagtcattttacttggcatttctgttgcttattgctgaaagtttcttgctgtactcttgcatttgctattcctcactttcttcctaggtaaattctggaggtgggactattggtaggaagagtaaagcaactacaaaccaggggaccaaggaaaccaggaggaatcaataaataactaaccaggtgttatttattatctataattcatgcctcacctatttaaacctttagaagaggtkcacatcacagccttacttttgtaatggaggaaaaaaaacatgacatcagttgatcattaatataaggtgggaaaataattttttttttttttttaaagacagggtcctgctttgtcatccaggctggagtacagtggtgcaatcacagctcactgcaatctcctgggctcaaggaatcc

SEQ ID NO: 703482 - DNA, 2429 bp, Homo sapiens
atgctcaaaagactaagcagctacaaacaataacagtaataataataaaaataaaaacagttaatattccaagtgctcaccatgtggctagccctgttctaaatgctttattgttttatctcatttcatgtcatttaattttcataaaaactcttaaagaagtaagcattatcatcaccttgtagatgaagaaggaaacagaataaggcagtctagaagtaaaatatgacagatatttgtcatgttttgacacatgaaacacaaagcaatgaatttatatacagaaatgtgttatctcctgatctcctgcaaatgcctggtactctcaatgtgttcttcatttttcttggtttatttcaaggaagaataaagatcaataattctcttccaccagaaaaatgatgtaaggatgatgatgctggtaactgacagcctcaggatcagtgagacaactgggaatggtggggactggggagagatggagagcagcctcttttggactccaggtaatgatttgggaaatgcaggtccagtgttggcagatcttttgaattttcaagagacattaaaccctcaagtttttatttgcaatgtcccaatttttaaatttgactcaaatttaaaaagtagtatatagaaaaaaataaaatatgaatctggcccacatgaggtcggtaggggacaggcatatgagttgaggctggaaaggagtcaagggtcagaatgcagagaacccttgagagcatgaaatagaatccaatgacagcaggaaacttttagtgcaggtaaatctgggacacaaaaggtcacatttgtaatcatttgaaacgatgaccttgctctgccgagctctggcaacttctaagtggcatacttcccttaaagacagaacgtgtctttcttaattccccaggtcttcacttttacctccacaaatcttaacttcactgtctatctcatgtctgacctcatgcttctacgtccttctctctccttctctggaaaggcatctcttagctgctttctcatcttttccagggcaccgagtctacacccgaataaggtgaacaagctttttgtgtactgacagcaagcagaaagttcaaggttgtacacgctctccagtgaacagctgtctgatcttaaccctcagccccagacacaaggcttttgggtcaaaccaaatgatggccatcagaagaggaacaggtttggggtgcagaagacggaggagcagcagtctctcacctgctccacaggaggtgcagtgggtagggccacttccttggcatctctggcaggtgtggtggcatggatggcattggttctcaaattcaaatttccatgaggggcagttcgaaacacagcggccatcatcaaaaatcctagaggaaaagcagacttttagaattcatcagggtgactttccagagtggccctaagtatcagaacatgtggtattcatgtttgctggacagatttgacttcattgttccagaaacaagggggatgcctgggagtgatcatcttagaacatgtgaaatattagtcacgtacccatccttggcccaagatttggacctaacagccagcatgccagaaactggctgggaaaacaatcccgaatctgcttccaaacaagctaactggtgcctacagggacgaaatccagattataggccccaaccaaacccagccaacagtcagatggaggtctgtaaactttccacacactyagtgggcctctgagagaggccttggagaaaatattcttcctttatctatcagcatgctcatgctttgcaagggaaatgtcagctccaagggctcttgacgagtgaaacaaaacactgctttgtagctcggatgctacttagaagcctggcctgtgtatattgcaagtaatcaatgaactctgattttgagtgtcatgttttgcaaacatttcctgagatatggagtactgcagtctccttttctgaccatgaacacctactgtgaacacctacaaagggcattacaggtgagttggtatatgggcttctaaaactttggttttacatatatacaatgtatatcctaatgtcattgttaatatttttatagttttgcttcattattctttgcaaactaatcgtaagagcaaatgtgactaagtaaattgtatccaagtattctgttcagaaaaatacaaaatgtttatcaagtgcaagagtcagataggtaatatgaatcgatgaagtgagctgggggctgcacacccagagttcctaatttagtgggacttaaggggaggcagctgagaattttcatttctggcattccagatgatgccagtgctgctggtctggtgagcactctttgagatccgctgctcagtgacagtctggattactgtggaattcgctaaatgattcctatgtaataca

SEQ ID NO: 703483 - DNA, 1190 bp, Homo sapiens
aacctatttttggcctagcgtggcggctcatgcctgtaatcccagcactttgggaggccacggtggtcggatcacgaggtcaggagttccgagaccagcctggccaacacggtgaaaccccatctctacaaaagatagaaaaaaatataagccaggtgtggtggcatgcgcctgtaatcccagctactcgggaggctgaggcaggatgattgcttgaacctgggaggcagagattgcagtgagccgagatcgcgccattgcactccagcctgggcaacagggagagacttggtctcaaaaaaaacaaacacttttttttttcatgaacatgtactatatttgaaaaagcaggggccactaaatgctaacttataaataactctgaatatctggatgctgtgtcattgcaggttatgttcctgttataaatcttattgctgttctaggatggatcacacccaaaagggtgatttctcagaaacagcaataaagcttcccaagataaactggatattatgtgttcctcagactctgtgtcttctgttgttagttttcttttttttgtgtgtttaaacacaaagatgagggattccgctataatcagatcaccctacccataacaggagggcatatgcttgcaattctatagtctgcaatattcctaggccatgctggtagctttcctactgctcaagaaatacagactatcttgactgctgcatgtctgcgtagtgtcccattgctccatgaaaatggttcaacccagactctgaggtaaartacattaagcggtcaactaacttgagtaaagcaaaatgcatctctttcttccttgttttaatgtgttgtcaattcctggaacactcaaagaatccaagagagagttgaaaaaggtaatgattaaataaataaggcaataataatgacaaccagttcaatcctaccactgaggaagcaatgactgactctggtaagcaaatctctttcacctttgctttattgtaacacttggctgagtttgctggggtggagctcggttgataggggaggaggactgggagtttccaaacctgacttctcacctgggttctcttactctgaccctttgctaccctttctccactctctgcttgacaaaatccttcaagagctagggaccatcaagccttttctcaaatacccagctgggg

SEQ ID NO: 703484 - DNA, 548 bp, Homo sapiens
gactcatttttaatgaattcataaatttttatgaattcataaatattgtttctgagattgttgcttaagcagtatatacacatgtgtatacatttacataatgtataaattataaaggtgtgtgtgcatgtgtgtgtgtgagagggagagagagagaggaagagagagagaccatcgaataattttatttaaagagaaaatcattagtgaacaatagctataattaatttgtattgtatccttgagggttaaatataaccagtgtatgattctaaaagccataaaattcaacactgcactaaaaattaataaggatgcttctctttatgcattttctatgyttttctgtgaaaggaaactttctcttatattttcttttcaaagagcatattaccatttggaattctggcttatcctaaggcagatcccatataagtaggtatttaattctgtaattgaagcttttaaagtaagagttggatatgatttatttatgtttcagaattatacatttgtagtaatgccaacaatcagtggaagttcaggac

SEQ ID NO: 703485 - DNA, 2105 bp, Homo sapiens
  misc_feature 3, 4, 5, 6, 7, 8, 9, 10, 11, 12, 13, 14, 15, 16, 17, 18,19, 20, 21, 22, 23, 24, 25, 26, 27, 28, 29, 30, 31, 32,33, 34, 35, 36, 37, 38, 39, 40, 41, 42, 43, 44, 45, 46,47, 48, 49, 50, 51, 52, 53, 54, 55, 56, 57, 58, 59, 60,61, 62: n = A,T,C or G
  misc_feature 63, 64, 65, 66, 67, 68, 69, 70, 71, 72, 73, 74, 75, 76, 77,78, 79, 80, 81, 82, 83, 84, 85, 86, 87, 88, 89, 90, 91,92, 93, 94, 95, 96, 97, 98, 99, 100, 101, 102: n = A,T,C or G
ctnnnnnnnnnnnnnnnnnnnnnnnnnnnnnnnnnnnnnnnnnnnnnnnnnnnnnnnnnnnnnnnnnnnnnnnnnnnnnnnnnnnnnnnnnnnnnnnnnnnntaaggatgatggggtaaaagcgtgaaatttcacttcctcgtatctttcctcactaatggtttattaaccttagtcattttgttatttccactttcttgaggttcatcttattgaaaatatgttctgtgaaatgattaataggtaataccaatgctcagcattattatgttcctcagtatcttaatttttctcttaattttctaaacttggtcatctttctttttccttgaaaaaaaaagccattgatttttaaatttttgtctatttttcctatagtatttctagaaacatttcttgctctctggcttgaaaaaaataataccactgtcattgagtcttatattactggcctcccgtcctaacatcccctcaccatcacacacacacacacacacacacacacacacacacacacacacttcatacacatatcaccataaatgacttttttttcttgatattcttatatttattcttgcaatttagaatatctcacaggggccaggcatggtggttcacacctgtaatcccagcactttgggaggccaaggcgggcagatcacctgaggtcaggagttcgagaccagcctgaccaacatggagaaaccccatctctactaaaaaatacaaaattagccaggtgtggtggtgcatgcctgtaattccagctactcgggaggctgaagcaggagaattgcttgaacctgggagccagaggttgcagtgagccgagatcgcgccattgcactacagcctggacaacagagtaagaccccatctcaaaaaaaaaacctcacagaaatagccctttatgtaattctgtcttttcatctccttaaatacaaattatataagttttgagctatttttttctgtctttagtgtatctaattgttttatgactataaacgttatgtacttttccatttaattttgcctgctgtccgcaagcctattttttatgtttctgcttcctttttcaataagaatatgctcctttttgttgcatcaaatatagctttcatttatgcattcagtttccttttctatccaattactaacatcctgtgctatatttgatcgtgattcttttcacatattttacatttactgttagtttttcaccctttatttgagttttcgtttctattttttaacttttgatataattattttacattatatatttttgtgtgctatttgattctcaccttattttcttatattatgtaggtataggtccctatatgttattattcatttaacattatgaatgacttgaataatcgatttttgaacacagggtaaaatcaaagagcaaagttgttagctgagttgcaaagaaaagtgaatataagtaatttgcttgtaatttttttccaaaactgtttcctgccatgtgatgtgcctggtagkacaactgtgatcatggctgtcaatgttcggtatgtcttctatcagaaaaatcagcaaaaccctgcatgtcccatgtttgttgttttatttttgtttttgcccttgagtggcaatttagttttattcgttttttgttttttattcttcagctggctgtaattggcggcagctgtcctctgctccacactgctacctgccacactgtgagcctgtttctcactaagaggttgcaatacatgcatcttcatctcgttaaaccaagctctttcccagactttgcctttaaaaacgaagccaacattactcaattgtctaatactttagaggcttgtttctttgctgagcattaccccttgactggatccgaatatctttaaatgacttttggataatgattcagggttgttttagattttgattccatttacaattattcatctctgtattttgttctctgtgttttcaaagaaatgcactaggtagtacgttaataggtgcaattatttaataaagtggaaagtattatagatcttatttttttagattatttttgtagcagagtacatgaaagcttagaatggaggaaa

SEQ ID NO: 703486 - DNA, 618 bp, Homo sapiens
caaagaagttgaaaactttgaaaaaaatttagaagaatgtataactagaataatcaatacagagaagtgcctaaaggagctgatggagctaaaaaccaaggctcgagaactacgtgaagaatgcagaagcctcgggagccgatgcgatcaactggaagaaagggtatcagcgatggaagatgaagtgaatgaaatgaagcgagaagggaagtttagagaaaaaagaataaaaagaagtgagcaaagcctccaagaaatatgggactatgagaaaagaccaaatctacgtctgattggtgtacctgaaagtgacggggagaatggaaccatgttggaaaacactctgcaggatattatccaggtaattccttttyaaatttatacattcgattattgttctgtccatgctgccaaaatatatcgaatgttaataatgtgctaagtttcacaaagtaggttttgtggaaaaaagctattgtatttttttaattttcaagtctattgatatatatataattctatgaaatacactaacaatattttatatgtaatataatatcacatattatgacagttctccctaagcaaaatatatttaaacaaaaatgactatacata

SEQ ID NO: 703487 - DNA, 1658 bp, Homo sapiens
catttaaatactggtggggcgtggtggctcacacctgtaatcccagcactttgggaggccgaggagggcagatcacttgaggtcagcagttcaagaccaggctggtcaaccctgtctctaccaaaaatacaaaaattagccaggtgtagtggcgcgcccctgtaatcccagctactcggaaggctgaggcatgaggatctcttgaaacctggaggcagaggttgcagtgagccgagaaagcgccattgcgctccagcctgggcaacagagggagactcttaaaaaaaaaaaaaaaaaaaaaatttaagtttccrttatgtgttgaacaccgttctaaggaaatatgcatatattatctcatttgattctcataactgtcagatattgtcattgtcatttttttaatttaaaattgaaaatggaggcttagttaatctattcaaagtcagacacctagaatatggcataactaagatatgagcccaggtcggtgctctttctactcactgccttctgaagcttacactggaagactaggtcaagaaaaggtgtactgacaattgattcctccattttcctgaagttatttagcccactcccactccagctccactgtgaacctataaatcctgtgcctcattagacaaagggagtgtcagttgtggtaattcttaggacattaccatggttaccaggcacagagtccagtgccccaacctggacgttccagaagaggccagggaggatctgagatggccttcttcaacttgtatctattgggatatcaaaattcctttcagaacaagaaaaggaacacaactgaagaaacaagtaaggggaatatagggtagagggttagaagggccacttctttacctagatgcttcatagccacttcctagctatttattttcctacctggggttagagatttatcctccaaggccaacagttacactagttaaaattgtggaatagggacaatatcctttcagctttgctctcctgtcatttaatatccttattaagacacacaatttgggccaggtgcagtagctcacatgcaattccagcagtttgggaggctaaggcaggaggattgcttgagtccaggagttcaagaccagcctgggcaacatagtaagaccacatctctatgaaaagttacacaaattagctgggtgtggtggtgcatgcctgtggtcctagctacttgggaggctgaagtgggagaatcacttgagcccaggaggtcaaggatgaagtgagccatgatcacaccaccgtactccagcctgggcgacagagcgaaaccatctcaaaaaaaaaaaaagacacacaatttgttcaaccaaataagtgtattcttagtcattcgttggctcatttaaccaacatttgttaagcaccaggctttatgtgcctggcattatgttggtgactagggttaagacctctgctataaagtgactatctgatgagatagataagtgtgcaaacaaaaattgcaatatattgtatgattacattaaatatggaatgttctagagccactaagaaggaagtacctgatactattggatttggaataagaacgggggagtggaggatgggggaatccttcagagaagacttcacacaggaaatgcttccagaac

SEQ ID NO: 703488 - DNA, 544 bp, Homo sapiens
cagagcaagactccgtctcaaaaaaaaaaaaaaaagtgaaaaacacaggataccaaattatgcaaacagtaagagcacagttttatgaaagcaaaaacaaaaagccrtaagtagatttttttaaaaaggaagtaaaagaaataaatggaaacgttaatactggttgtctttgggtgataattgatttttttttccttttctatgatttcgaagtgttccgtaatgaatgtacattttataatttgggcaatgaatatactttttatttttgtaaatgcggccatcaagaggttttaatgcctcctagattatgtgctggctccttactctgccatagaaaaaattctttcatgatctggccatgaacccccttgtctcatctctggccagtcctctccttgcttctggtcagcagtgagtacctggtgttcccagtgtagccctggactcttcttcctctgccccatccatattgatgctgtttgcatcatctgtatgcccctccactgggattcccgctggccaggtcctgcccatctgcaga

SEQ ID NO: 703489 - DNA, 544 bp, Homo sapiens
cagagcaagactccgtctcaaaaaaaaaaaaaaaagtgaaaaacacaggataccaaattatgcaaacagtaagagcacagttttatgaaagcaaaaacaaaaagccgtaagtagattttttwaaaaaggaagtaaaagaaataaatggaaacgttaatactggttgtctttgggtgataattgatttttttttccttttctatgatttcgaagtgttccgtaatgaatgtacattttataatttgggcaatgaatatactttttatttttgtaaatgcggccatcaagaggttttaatgcctcctagattatgtgctggctccttactctgccatagaaaaaattctttcatgatctggccatgaacccccttgtctcatctctggccagtcctctccttgcttctggtcagcagtgagtacctggtgttcccagtgtagccctggactcttcttcctctgccccatccatattgatgctgtttgcatcatctgtatgcccctccactgggattcccgctggccaggtcctgcccatctgcaga

SEQ ID NO: 703490 - DNA, 544 bp, Homo sapiens
cagagcaagactccgtctcaaaaaaaaaaaaaaaagtgaaaaacacaggataccaaattatgcaaacagtaagagcacagttttatgaaagcaaaaacaaaaagccgtaagtagatttttttaaaaaggaagtaaaagaaataaatggaaacgttaatactggttgtctttgggtgataattgatttttttttccttttctatgatttcgaagtgttccrtaatgaatgtacattttataatttgggcaatgaatatactttttatttttgtaaatgcggccatcaagaggttttaatgcctcctagattatgtgctggctccttactctgccatagaaaaaattctttcatgatctggccatgaacccccttgtctcatctctggccagtcctctccttgcttctggtcagcagtgagtacctggtgttcccagtgtagccctggactcttcttcctctgccccatccatattgatgctgtttgcatcatctgtatgcccctccactgggattcccgctggccaggtcctgcccatctgcaga

SEQ ID NO: 703491 - DNA, 544 bp, Homo sapiens
cagagcaagactccgtctcaaaaaaaaaaaaaaaagtgaaaaacacaggataccaaattatgcaaacagtaagagcacagttttatgaaagcaaaaacaaaaagccgtaagtagatttttttaaaaaggaagtaaaagaaataaatggaaacgttaatactggttgtctttgggtgataattgatttttttttccttttctatgatttcgaagtgttccgtaatgaatgtacattttataatttgggcaatgaatatactttttatttttgtaaatgcggccatcaagaggttttaatgcctcctagattatgtgctggctccttactctgccatagaaaaaattctttcatgatctggccatgaacccccttgtctcatctctggccagtcctctccttgcttctggtcagcagtgagtacctggtgttcccagtgtagccctggactcttcttcctctgccccatccatattgatgctgtttgcatcayctgtatgcccctccactgggattcccgctggccaggtcctgcccatctgcaga

SEQ ID NO: 703492 - DNA, 655 bp, Homo sapiens
ggcatcagagaccccgtctcaaacccccaaacaaacaaacaaactggaaacaacctaaatacccaacaataatatggacagtatacatccatacaatgaaatactaagtaaaactttaaaatgatagtgtaaaagcaggtgaggcttttctttgacatggcaacctgttcatgatttcacaggaaatgaatattcaagtaacaaaatgtatactgttcaatataaattttgattttatacacctacacataatacaactagaataatacaattgcccctccatatccgagaaaaattggttcccaggatccccttggataccaaaaatccacagatgctcacatctctgatataaaatggtacagtacttgcataaaacctatgcacatcctcctgtatartttaaatcatctctagattacttataatacctaatacaatacaaatgttatgtaaatagttgttatactgtttttttatttgtactatatttagtacatcactaaagaataaaactggttatatttgataggtggaaaaacaggtgagtttttgggttagctcttcctaatagttctgtaataaacatgtaccacactcttttgcattagaaaattaatggactttaattccaacactttgaggggccaaggca

SEQ ID NO: 703493 - DNA, 616 bp, Homo sapiens
gacgtaagctgtacttcctggagggaggagtagtagagtctgtagacacaggttaaaaaccctccagtaattagtaatatcaggggaagaaactttgaggctatgcaactgcctgtttctccttcaggtcttgcacaccagttttctgcatctgtcagggcatcttgcctacagcaattactactgtgatgtttggaaggtgattttctatttccctcatttcttctacatttgttatttggaattctgtaaggaagattggtcccctctcctccccttatttattttattcagtcatgtatatacttatggactcacggatatttattctccgggctgtaatccaaagtcatcatcacttattttgtggctccaacgattccagccttgtcactgggagctctaccaaggtgactactggatctttttggcatgccccatccttccctttttctccaactcttccttacttccgggcacgacaggaagctccaggctcctcatattttccctactctgcttgagaaccagccattgctccaaggagctctggtcatgataagcagggagggaggcggcctgcagactacagcctgaggcctgctgttgcrtgggg

SEQ ID NO: 703494 - DNA, 638 bp, Homo sapiens
tttgataaaatacagcattatttcatttggctgtcacaatacctctgaggtaatacgaccagctccacgtcacagatgaagaaactgatatgcccatgaacccaggtgggacagtggcaggccagactgagtttaggtgtgctgggtgcaagctccctcgctttccttgaaaccccactgctctgcctctatgtggttaacctttaacacttaaaaacagcccactgtcctttgaacccaagtctgtcattaattagggtagtttatacttcctcaaactccacatagctgatcttgacttactttttcctctcttgcacccagagtttttgttttgtttttttaagcatcacaaactacttatttattacagaactggataaggactgtatgaatgccagcctaattatctgattcatgaaagtgtcctctgtgagtcactagataggyatgaagagtataaccaggttaagaccaatgaactatgccacgctttgccctagctctctgctacacttacttctgctagggtctgcagggcacctactctcccttagatttcctcagtgtgaaccacacttactcaacctcagtatctaacagtcccattaaaactactgcctcagaaattgactagg

SEQ ID NO: 703495 - DNA, 608 bp, Homo sapiens
taactttattggattcaacactccaacagcawgttcaccaccaatttagggtcattatttatcaagtgctttgagaatctaaggtataaagaataatacctaaaatcatgttaatatctataaactagagtttccacttaatacaacagtctgccttgtctattttatatcccagtctactatataattagataacatctgatatggtttagctgtgccccacccaaatctcatcttgaattgtagttcttgaatgtaattgaatcatgggggttccccccatcttgttctcatgatagtgagttagttatcataagatgtgatggtttaaaaaggggctttccccttcactgggctctcattctctctcctgctctcctgtgaagaggtgccttctgtcatgattgtaagtttcctgaggcctccgcagccatgccgaactgtgagtcaattagacctctttcctttataaatttcctagcctcaggcatgtccttatagcagcatgagaataaactaacataacatcagaaatctagcaaagatcccaatgacaggaatgttcctgtctcacttagtaagctaatgaagcataggaaaaattttca

SEQ ID NO: 703496 - DNA, 1524 bp, Homo sapiens
tgaatttttaaaagatttgcttaaaacaaccgagtatgtcaattggcaatatcagtccacatatgagctttcaaatgctctctttctaagcccaggcagctgagtgatttgtgtgatatttgatttttagtttttcagcagcccgttttgatttagtgctttctgcatttttatagacatcagcaatcctgtagcaggtcctgtttggctgatacattttacaagttgataatagtaaagggtgtgtagagatagaacctgatatagatgtgttcttttgaagcatcatcattactgagagataagtctacatagaaacaaaacacaaaacagctagcagctatattttaaatttttgattcaaccaaaaaattagatatattgtactaccttgatgtttatccccttttctacatatttgtgatgttttgaatattgaataggaattcatgaagatatttccaaataaaaacaaaaatgatattggaaatttttataatagattgtaaatatttgtctttcaaaaatactgtggtcctgacttccaactgctataggtaggattactcttaagaaaattttgtggcctagagaaaaacatcaatatttggagaacatgtatgacagaaaagaggattaacatgaaatgtttgattttttcctataatctctttcttagattatatttaatcttcccaacaataatttattacatacatttttatgcccgttttataaaagagaacaatgaagctcctaaaatttaataacttgccgtgcggtggttcagttttaagtggcaaagttggggtttgaaccaaggtttatcttctatcctattgcctcaggataattttattgaggtaaaagcatgtcaaaaattaactatatgaacagcctttatgggaggcaaacaagaagttacctaatggctggatgtggccttgcaaggatgagcagaagtctatttggtttagaggagttactcaaggtggcaatgcagaccacacttgttttgtttgtctgtttgttgactcatattttactgatttttagaaataatttgatttggaatgtctttaaacagtygtaaggttttcagcagttaccccctcctgctgttttatcccaggagagtttcacttgtttacattatctgtcacggacatctctaggcattcgagtttgcactccctatttacaggctatttacttatctgataggcactagaaatacctttccctagtgacaaaaacgagtctgtaagataaacatgaaatagttgcaaatacaaatattttatagcactctaatttagtgccagaagaaagaattagatttaagcatgtcaaatatcagaaaaaggcaaggtgtcagataaggggtcataaatttaggaaaggagagagttacagggaaagatgggcccaaaatttagtctgagaaaagtaaattttacagtgggaagtttcaaatcaaggtgaggaatttggagtctatctgattggccagattagggctga

SEQ ID NO: 703497 - DNA, 1524 bp, Homo sapiens
tgaatttttaaaagatttgcttaaaacaaccgagtatgtcaattggcaatatcagtccacatatgagctttcaaatgctctctttctaagcccaggcagctgagtgatttgtgtgatatttgatttttagtttttcagcagcccgttttgatttagtgctttctgcatttttatagacatcagcaatcctgtagcaggtcctgtttggctgatacattttacaagttgataatagtaaagggtgtgtagagatagaacctgatatagatgtgttcttttgaagcatcatcattactgagagataagtctacatagaaacaaaacacaaaacagctagcagctatattttaaatttttgattcaaccaaaaaattagatatattgtactaccttgatgtttatccccttttctacatatttgtgatgttttgaatattgaataggaattcatgaagatatttccaaataaaaacaaaaatgatattggaaatttttataatagattgtaaatatttgtctttcaaaaatactgtggtcctgacttccaactgctataggtaggattactcttaagaaaattttgtggcctagagaaaaacatcaatatttggagaacatgtatgacagaaaagaggattaacatgaaatgtttgattttttcctataatctctttcttagattatatttaatcttcccaacaataatttattacatacatttttatgcccgttttataaaagagaacaatgaagctcctaaaatttaataacttgccgtgcggtggttcagttttaagtggcaaagttggggtttgaaccaaggtttatcttctatcctattgcctcaggataattttattgaggtaaaagcatgtcaaaaattaactatatgaacagcctttatgggaggcaaacaagaagttacctaatggctggatgtggccttgcaaggatgagcagaagtctatttggtttagaggagttactcaaggtggcaatgcagaccacacttgttttgtttgtctgtttgttgactcatattttactgatttttagaaataatttgatttggaatgtctttaaacagtcgtaaggttttcagcagttaccccctcctgctgttttatcccaggagagtttcacttgtttacattatctgtcacggacatctctaggcattcgagtttgcactccctatttacaggctatttacttatctgataggcactagaaatacctttccctagtgacaaaaacgagtctgtaagataaacatgaaatagttgcaaatacaaatattttatagcactctaatttagtgccagaagaaagaattagatttaagcatgycaaatatcagaaaaaggcaaggtgtcagataaggggtcataaatttaggaaaggagagagttacagggaaagatgggcccaaaatttagtctgagaaaagtaaattttacagtgggaagtttcaaatcaaggtgaggaatttggagtctatctgattggccagattagggctga

SEQ ID NO: 703498 - DNA, 1072 bp, Homo sapiens
ttgctcatgatgcttattgtcagtggaattactgtatctccacaggtcagggcatctgtacatttgcagcatactttatttctttagcaataccttttgtaggccaatttatacagctgaaaattcttcttgccttccaattttaaaagcatgattttgatttctctttatccataaaagttttctaagcttctcccaaaatttttcagttcagcagaactataaacctgatagtgatatattggaagataaaaggattatattgtgagttttttaacttgaaagatcaatgtatttgtatatttgtgtgtgggcatgtatattatagagagacaaagaaagacagtcagagaatgttattagtattttccatttctgtagaaatagacattcactttgcttactctaaagaaactgcagattaaactgtccaattctactttatttatgtagatattcagatacttaaatatgtgaaaaattttaaaactataaatgttttcttttggctcctgtaacattttttatttgagatagagagatacagacataggtataaatgtattaattatatatgtacttatatatattatagatagatataatatatatcatatattcagaatagcacaggtatagattgcatcakatatggcctagtcactctacatagatcaattttttaaattaactatttacttaatgaatatttgttagatgctttcaacctaacatatgctaaaggcatatgaataaattagataaatgtcttaaatgaataagcttacaatattttagtgaaacttgtaaacaaatggaatagagtatataagaacaacacactacaagtacataaagtttcagtgaaaaaataaagattaaacctactatattttgagagattgtgtaaggcttcaacaggaggtatgctttgtcctcaatctcaaaggatgagcttatcacattgatatatttggtatcaaagcataagaaaaaaatggaagtaaagaaagatgagatttgatggattacaaggaaccatcatttaaattaaaaaaaagtagtagaggta

SEQ ID NO: 703499 - DNA, 346 bp, Homo sapiens
atgttgattctgcctttagcagacagatgacatggaaggattactactctaaactctgccttccctagagtgtacagcagctaaagtctctgctgggctctctcagccttgcrgctactgcttccttctatatcctcatgctctctcctatacatgaactatttctgtattagttaaggagctgggtaaagatttttcttaggggtgttaggtatccgagttactggctgtgaatccatatgggtcaggaagcaacctcaattcttgccttctcagaagaaataagtcaactgagcagcataaggcagaaacagagacccaggcaagtttcagagcaggagcggaa

SEQ ID NO: 703500 - DNA, 1120 bp, Homo sapiens
ctgtagtcccagctactcaggaggctgaggcaggagaatggtgtgaacccaggaggcggagcttgcagtgggccaagatcatgccactgcactccagcctgggtgacagagcgagactcagtaaaaaaaaaaaaaaaaaaagtggacatattctttctggacagactctggaattttagctggatgttcaaagttactgtgcaatgacaggcatgtatgataatgtgtctcacagacatatgggaagtgacaaccagagtagagccatcaccttactttgttctgtggtgtaggtgctctatggtctctcctctgcttaattatgctagaatataggtttgcttaggtaccaaagtaaactaaaataaagattagcattaaaagttatggacacagaaactattttgctctgcttctatagatcacctgttctccaaggtgaatagaatatataagcttttaatgagtgtttgaaatacaagaaactaataatcatttaaccattatgtagattccatgacctaatactgaagtataaaacaaagataattcattctcatattttttttataatttgaaaatatagtagaaacaatagaataaagtatttcaagatttaggaaatgtattagaactgctcataactgtattttatgtaaatttattgtgattatgtagattgtgctrggggttctgatgaggaggagaaagaatactttctcttcatactttaaatgcttgaagaaagttcctaagactaggaaaagaaatcagtaagttttattagcaattaccatttagttacctctccctagaaatacaccccccaccagatttttgattggtttgattttttgctaatgagttctaagagtttcttatatttttttattattaacaccttagcctaatgtgtgtaacaactattaacataaaataagagtttaaaaacattatttcctattcacttattttcctaataatagtattgtttatatttcccctgcccctacaaaatggatgaaggaaccctaatagggttattctaggaccctaacatttatgtaaattacattttagaatttctgagaatttgaaggaatgtcggtattgttttaag

SEQ ID NO: 703501 - DNA, 949 bp, Homo sapiens
cttttgtagttattgtaggaatgtccatagggtatgctgccacccaaacccctgtccagccaccagggagctcatatgacctagtctgacaaatcataacactctatccatacaactggggttgtttatcaaatggtgtgtgacttaagccaggacaattcgatttcttccctggaattttatatgaccaagtaaaaagagaagctctttttttttccctctggatcactaaactgggacaatgtaaacccaaaacagatactagatccatgattgcccttccccatcccaacttactggtggataaaattgtccacaagttaaggcaataaacaacccacagagaggagtagggacaagaatgttgtgtgatttccctgttatagttcctttagattttccttttttttttttttagtctgttagctactccgtagccttgcaatcctgcaataagtctttatctatctatctatctatctatctatctatctatctatctatctatgtatttatttatctatacttaagctggtttaagatttgagtgttgaagttatcggtaataagaaggtctaggaggcagggatcaacaaacctttaagtaaaagaccagatagtaactattttccactttgtaggcaataaatctgtctcgattactcgctctgctgttggaacatgaaagcagtcatcgacaatatatacacgaatgaacctggctgtgttctgcttaaaaatataaacaccatccttcattttcagkctttacaaaaacagacagtggactcagtttggctatgggccatagtttgtccaccctctggtctaagatataaccatgaacatcagtgtaagacactggacgtggaaagaattaaggacctgcagagtgagaagtttcagtgaatcatctagagatattaaagtcaccatgaacaataacaga

SEQ ID NO: 703502 - DNA, 3020 bp, Homo sapiens
agaggccaagatccaaattacttatgaagtgtaaatcgcatacctggcacgatggcactacaaatgcctgctgagctattgagtcagctgtcgaaaaatagtgatgttggaaagatgagtgcttgacttttaattgtggctatctatactgctttcaccagaaataaagactgcactaaaagcttagccatttctccactccctacctcccacaaaaagacaagaaagtgtaaaggaaaagtacagagcaacatagcagtgtaaatccagatttgtaagtttaccaggtaataaagccaccagaagacagaagtgtaatagggaatgcttttgtactattgtagacaaaacaatgcttgagggactaaaatgctaataaaaaactgtgagttatgattattccacatgatcatagtagcagagctctcccaaagagatgcattcatactccaatagttagggaggaatatttctcctttcttgtgaaagaagtacatatgacactgcraaatcatatttgagccataaattcacccttccttgtcatcttttataaacattaaataattgttttgggttagcacatttaataattcatgcagccaaaacctaagtatgtccttcaaaagacaagttcaaatttgctcaatttctatctgcatagatttttgtctctgtatcctgtaacaaccaacttatgtaattgatgaaatttctagattgtctctggataataacacagctacacagcccatgattttagttcttatctagtcatgatttggttatttgagtaaatcaaagcaaaattacacttactgtctgagaagcagtggatatcgtggaaaatattcagactttgaaataagttagaaatagattttcaaatctttgctcaatgattacttgatgacagctttctttacataaaccttaatttttacattcataaatttgggattattttggcagagatatgtgaaaaatgaaatagtaaattttaggttcctagcacatagcagatgcataatatacactacacagtatctttattattttgtagttgtgttatggcggtaaaagtcatgataagagggttattaattttttattgctgctatgacaatatcagaaacttagcacataaaccaacagaaattcattctcttccggttctgaatatcagaaattccacagcaatctcagcaggctaaggtcaaggtatcattagcagggtgtatttctgtctggagcctccagcagataattcattttctttgccttttacaggttctagtggctgcccacattcctaggctcatggccccatcgtctgtcttcaaagccagtaacgtcaactttgtcctttgctgttgctgtctctctggttctcacctccacttttctcttctccttctaaggatctttgtgattatattgggccctgcaagatcctctacctatttaaggtgggttgattagcaaccttaattacatctgcaaccttaattctcctttgccatgtaacataatatgttcacagcttccaaagattaggctgcaaacatctgtgggccattattttgcctattgcagatggccacagatataagcaatgtctagaatgtgcaaatacaaacaaagtcagatatgggattctcatagtcatactgattgtttatgttgtctgaattattgttgagaaaaacagtttggtctagttatggcctgaagacttataaaattaaattcctgttttctttttttcatgactgaatcatgattccattttctagtgatgcctctgtatttgctgcccatcaataataggcctattataaacatatatacccacctaaaccagctgtcctttcttactgcaaatcaatattaatttcgttttggggctttcaccagatcaaaaagacgggtagaatatagctttttcctttctcatttttttgaccttatcttaaggaagcctcagggaaaaagaaatccatttgatttatatatttatgacatatggtaaaagataaagggaaaatcagtcactattctaagcagaataaaaaactaaattttagttttccttccagatacatgaggccattctcttaatatccaaattttttttcattaacattgatgtgattcacaaaagtaactgatagcgaaaaataatatttgtcacatattttcaaaagttaactgcttaaaagatgttatagagatatcccattttagctcagaaatttcccccaggcaacttctgtcttcaggcaaaggacagaaaggaacaattcttaattctacggcctactgcaaataatacttggagcctcagtttccatagctttctggcagctgaccggtcctgataaagaaatgtcttttagacagcttcaccagatgactaaactgagcaatcataagtcataaattgatcagactccaggaactgaatcttggggttctgtgtaatctgaagaactctgtagtctatgacaacgactgccatttacagagaaattgaaaaagtctggcaaatttattaattttctccctagccattaaaaagctgataaccttgggtaaattagattggaaattttgtcattctcctctctggattaacatgtggcttagtataaaacccaaacagatagggttgcacctttgcttcctcagttggggcctacacaattgctctagaattcttatagcactctttgactaaaggcttgaagtcttagttcagtgctcatcaaaagtaaatgagcatgagactcaccctggaatcttgttgaactgcgcattcagtaggtgtgaggtggtgcctggagttctacatttctgacaaactcccaggagaagttacagcgagagcaatacttagtccactaaatccactgaactatggatttctctacttttctttctgttaaatgttcttaatgcattttgtcttcctcagtctgtccatagcctctacagtaatacaagacattttcaatttt

SEQ ID NO: 703503 - DNA, 1504 bp, Homo sapiens
tcagatccctgtttaagggaagaggccgtggagttgtcctcgatcccaggagaagacagtcacacactgtgcttctaagaaagaactggtcccaccataggcgtgtggctgccacagatccacgtccaagcagaagtcacagctgttcagaaaagaaaggcaaaaggaagaaagacatctctgtttgaaaagtgtaaaccaaaaacaaaactctgaggccctccagtcatctgaatggacttcctcctcagccagggctcttaaaatgtaacctgagaggtgggttcaggccatgacgggaagcgggggtcacacacgtctcattgtacccctcactaacagcagcacagactttgacaacaacattttgcaccctattctgtctgcagcctcctagctaaagcttcatctgcatgacaaaaccttgctctccacaccgttatcttaacccagacgttcctttctgctgcatctcaggtctttggacaaactcaacccattgtcaaccagaaaacctttaaatttacctgacacctggaagcctcccctccctgccagctttgcrttgtccacctttctggaccaagccactcaccaatgtacttctcaaatgtcttggattggtgtcttatggctccctaaagtgtataaatccaagctgtcccccgaccaccttggcacatgttctcaggacctccagagggctgtgtcacaggccatggtcactcatatctggctcagaataaatctcttcaaatattttctagcgtttgactctttttgtgcacaatagcaaaggctacaagtttctttctttgctctgattaatcagcccagagcctcctctcttgccaccagtgaaatttaaaatgaacgaaggtgttttactgatggggtctgtgcagacccagtaggcaggggggtccactttcctgctagctgtccctagcgtcgttggccaggtgcagaggggtctgtcattctcctaccaaaaatttcacccgtgcatgtggggccttttgtaacacaggatctcaggtcccactgcaggtacaggaatcaaaaccatcattccagccaggctcaaggtaaatcctgtgcccaggaaggtgtgagaagcatttctctgcgccaggagccctcaaacttttcctgtaacagcccagaaagtgaatacttcaggccttgccggccacactactccactctgccactgtgacatgaaaaccacccgggacagtttgtgatcagaagagcagggctatattctaataaactttacttgatttggctcagttcagcccagtttgccataggtgggcagcatcttggctggcaagatgataacgaagcaccccagctctgagccacccacatctcacgtcaaatggtaagccccagtgttgcaggtggggtctggtgggaggtgattggattattgggcggatttctctcctgtgctgctctcgtgatggtgaatgagggcttgtgagatttaattgtt

SEQ ID NO: 703504 - DNA, 1694 bp, Homo sapiens
gctatctgtccattcattagcctcttcatgctgactatgactattccacttttaattctctaatgccccttcttccctcctgaggatatttagtgctttatttcagtaataatctcccctgtctccttaaggacattatgccttttaggcgttgagtctgagccctgcctcaaggtgtgttgtatttgctgtgctggtcaggtgtccgagtactttgcctgtgggctcttttcccttgaaggcatcagctcctctctcaggtacatttgcaagccctagaccaagaccccagccccgggttggaggagaggggcaagcaccaggcagacgcagcaggcaggacgggctgcagagccaggccgacctctactgcccgtcccccaggacacctctttggtgaggaatcggctcttgagtgggtgttcctctgggtgcagtttccacctcaggagtttggatgaggaaggggaaatatgaattccagcccctagtgctgtcattcacgtccagccagcaccgtcagcagcttccacctctccagccctggcccccacctcccacccaaactcacatggcggtcctgccgctccctggcttctctaggcgctcatgctcctcacgtccacacttccctcttccatctgtggctttcccatagttagttctgggagaaggagtcagccgtcatgccaggtgctatggtgtctgcaaaagcacctagattttaataccagaatcaagctcaatgcagcaagatcaccaccttctgaaaaacaacaactttcaaaagcctcccatctcccatctcacactcactcccacggtgggacaggggaggagccatccactctgccctccacaccaagcccatggtatctgaatttacatrtaataaatgtaggtgcactgggatatctgagtatatattcagaaacaatatatgaaactaggagctctgtctgcaggtgacagccacaaacacggaccctgcgtaggaaattcctcagtgctcaggatcagcgaaagggctgtgtgtgttggagacttgccggaaagatgcaggttatatggtgtgttaataagagctgctttgcttgaagatttcagaaagccaacttaaatcagcttcagaaagcaagaataaaagaagtgtgctggcccctggcattggaagaagggccaggaggctgcgaggaaggtggacctgtggctggcacagaggccacagtacctgtgaagagacaacgtctgcagccacgagacagctgcggatgcgtgtggaaggtcggctgggagaggccaagttctgagcaccccagagcatgaacacatttgatcgtcacaacaattccgggacataacttattattgataaggaagctgagacatgaggatgagtcccaagtgcgcatgccaagaataaagccaggacttttgcagaagccatctggctccagaccccttgagcctgaccaggacacttcacctcaagtggaccagccttccctgcctcacatacctgcttcttccggccacctccacgcttccagacacttcccctcaagtggacctgccctccccgtctcatgcacctgcttcttccggccacctccacacttccaggacccttcccctcacatggacccgccctctcacctcacacacctgcttcttccggccacctccacacttcc

SEQ ID NO: 703505 - DNA, 2362 bp, Homo sapiens
tattattttgtatgtatgtggattgcacccttgtttagatatatggttgggagataagcttttacttgcaaactaaaacatacaaaggtaagaaaacaggtaaaatcttttcatggttttatgactaaaaacttgaaggataattttcaatgttgttcttcaaagtaaaacactagcttacagtttgcagactcattctatgtcaattattgctgtcccagataaaaacctcaaggacagtctgtttttcaaaataatttctagtttatactccaacattttcatgtaaccttacaaagcatatcatgttcagacagatacttagacccaaaataaaactagatatttattttatctacatgatatacatgttacaataaagggttttctatttcccctaattaaaaagaagcactctttctttttttggatttaaaagtaatgcatactcattgtggaaaatatgttgactatgaagaatataaggtataaacaagaaaactgaaatcactttgaatgctcccaactaaaaatcttaaagtgttataaatgttaaaatgttataaaatataaatataaaatattagtataaatattttaaaatattataaatataatctatacatacatatataatatctactaatactctacctataatatatacattttacatatatttgaaagagagaatgataagcgatcagctattgggcaaaattgtgttcactgtaggtcaatatgtgctatgtaatcagctctacatgctggctatttgctaaacaaaggcaagaactgtaaaatgtttacatttagataatctgctccaagggggaacatttgctagctcaaggagggattccttcatggttgttacgggctttgccttcaaagggcttctgctaacacaatagttcacccacagccaggaagaggaggaggttactaatactctgagacctcaccccagtttgtggagttagagttgaatccatctgagttccaaaaattttgtgcaattcacatacacaccctgtgaacctctcactacactttccatttttccttccactgcatcctttcacttttgcctttcattgtcgtctctyagtgtatatataaaaaggcattttgagcacatatatgccagtaggccaagatgaagaacttatttgtccattttcactgtgatgttactacaaggaaaagtattctcaaacatgaaaatgactagtagccaactgtatgtgtgtgtgcatgaatatgtttatttgctgtcctactgtatatccataactctacatcctattatattatgagcacattatcttctctcttaaaagtcttcatgaatttcagttacgatagctgccactatggtgctagtatttaattaacaaattttcattaattgaacatcatttcaaaatcattttgttgccctctagggctctttgtctttccttggttgaagtatcaggactcctagaaatcatggacctcatttgaattctgagttgtgaaaaccatccattttaaaaattatgagacaattggggaaatttgaacactaactgggtatttgaggctattgaggaattattgtaattttaaggtattatattaaaactatagttatatattttttaaagagccatcgtttagagatccattatgaagtctttttcagatgaaatgatttgatatctgagatttgtaagctttgaaatgatctcattgatgagagtgagtttgcaggaagggagagatgaaactgatgggcatttgtgaataacagttgattctagaagatggtgacatggggtatcattttgctctctacttttgaatgtttgaaatgttccatgaaacattttttaaaggagaagaaaggggtgggtgacctgaatctctaaataaatacactaggcaaatattttgtgaaacttttgttcacatttatccagagaagtcccctttactgttttctattcttttctatttcatattttacttttggctatggcccactaaattgatcttacagttcaaaaaaagaccacagtatctgctgttttaaaatcactgttctctccaggttctacctcttgttcaccttcattgctgttacttgtggcagaccaagttgaagtcagaatttggcctcctgattatttacaatgggaatttggaccactttaggctaattccaaaccattgctataatacataatcgtgtgacaattcattatgtgtgtgtgtgtgtgtgtgtgtgtatatatatatatatatatatatatctgtgtctgtaatttctagaagtggaattgctcaatcatttataagttacaattataataat

SEQ ID NO: 703506 - DNA, 1092 bp, Homo sapiens
gtgtgaagtgagagaaaggagtcatcattatttctttctgtaagtcaagtactggatagtttatatgaaacaaggtgtggtgagtctctgaggaaaaaggtgagagatagcagccacaatcataagttgaacaacagtcatcacaggttcaaagtgtgaaaagcacaagcggtcaagcctggctattttaagcttcacttgcactcacagctggcaatgtgttagaaatgcagcccccttctgaaagcaatgggtgatggaggagggagggaggagagataacagaaaggggaaccagaatttcctgtgttaaatattaattatatgtggatggtattttttwaaacatacccaggcgttgctattgaaatgcaaatgtgtgtttattgccatgagggagatgttgtaaaaggaaaaaaaaaaaaatagacaatacccagagctggaaattgccccctgggccaagggcagatgttgggtaagaacacaaacatgcagggaggacaggaagaagggagtaggaacaagaaaaaaaaaaaaaggaccagaaagaagtagaaaaggccaccatggacatcccgggagagctgattaaaaagtcacagctgagccaagcctttgtcacaaaccaagaaagaattctcaggatttaatgggtagagtggtcaactagtgagaattgaaaggctcttctcaactgaagtaaaaatggtaaaaattgatctacgcctccttaacaattggcagcataatggtaaatggcagcaaacggtaataattgatctatgcttccttaagttttctcaagagaagcaaaaatagtaaaaattggtttatgctgctttagcaatataaaataacactgcacctgatgagataagaaccagatattccctctccttgtagtgaaaagttgggttagaaataaagcaggcttagaaaactcaagtatggagcagaaaagtggtatcactggaaatgcaatagaaaagaaaaatcactgaattgaggtaatatttactgaagagatttcccattaacctttcctactcactgaataatggcagagaagaaaactgaagatttgctagc

SEQ ID NO: 703507 - DNA, 619 bp, Homo sapiens
tcccatgagcctgtagtcaattattgtcagcaagttctaggcttgtctcaaatctgagacaaaaattaaggatgatctgtgtattcaagcttagggcagaataagtgagaagagagtagcagaatcccacagtgcagtacagtagaaataggaatcagccagagaaggatcggtagatggaaaatttctggagaaggattcagacaagaggtccagccactccctctccaggtggatgttctcccagtactgccaagcctggaggagctgcgttttattttattagagaaacagtcatttctttataaaagtaaacaraagaagcatatcacagaatctcttaatgctataagtactaaatgctatgaaaaataaaggattaagagctcacaacacatcagactaattaggcatcacatcatgagaaaggtagcattttcagatgcatcttaatgaggacaaaccaggcaatggaatatgccaagtgaaggaaagttgagaagaagcacatagtatggttggtgcataggagatacgtgagaaaggagagagatacagaaaactaggttgaggacaaattgggcaaggctacaagtaccaaactgaggtgtttggtggt

SEQ ID NO: 703508 - DNA, 627 bp, Homo sapiens
tgcagagattaaaatctctctttcttaaacttttataattgcaaaattcactatgagatgagatgagcggtgcagggagcgggggcagttctgtgggtaccctgggaatgtaatgtgctcaggrtgtctctgggaaatgccaagcttgacaaaagtcagggcttgggctcttgtgaacctgccccccaccctcagctccccattgattcctacaacctcctaactactcaatccattgttcactcttcaccaggtcactttacaaaaactaacaaaccaaaagatccaatcctattatcctactgcttttgaaagtctccacaaaaaagttcaaccttcttttgtcaggtaactgcagtgacaaaatgttcctaaccataaatacaaacatgagctctggcaggtgtgcgagtacctaggaaggcaatgagaaacaagaggcttaagtgaaaacggtctcaggaaactgcaggcactgtgttttttccacaaaccccttcacatcccttcccgtggctgtccaggcccacctccagtgcctcccctgaagccaccatgtagcatgcattacctcaccccacttcagtttccctgcctctccttcaagttggcatcccaggtgcgggc

SEQ ID NO: 703509 - DNA, 627 bp, Homo sapiens
tgcagagattaaaatctctctttcttaaacttttataattgcaaaattcactatgagatgagatgagcggtgcagggagcgggggcagttctgtgggtaccctgggaatgtaatgtgctcagggtgtctctgggaaatgccaagcttgacaaaagtcagggcttgggctcttgtgaacctgccccccaccctcagctycccattgattcctacaacctcctaactactcaatccattgttcactcttcaccaggtcactttacaaaaactaacaaaccaaaagatccaatcctattatcctactgcttttgaaagtctccacaaaaaagttcaaccttcttttgtcaggtaactgcagtgacaaaatgttcctaaccataaatacaaacatgagctctggcaggtgtgcgagtacctaggaaggcaatgagaaacaagaggcttaagtgaaaacggtctcaggaaactgcaggcactgtgttttttccacaaaccccttcacatcccttcccgtggctgtccaggcccacctccagtgcctcccctgaagccaccatgtagcatgcattacctcaccccacttcagtttccctgcctctccttcaagttggcatcccaggtgcgggc

SEQ ID NO: 703510 - DNA, 627 bp, Homo sapiens
tgcagagattaaaatctctctttcttaaacttttataattgcaaaattcactatgagatgagatgagcggtgcagggagcgggggcagttctgtgggtaccctgggaatgtaatgtgctcagggtgtctctgggaaatgccaagcttgacaaaagtcagggcttgggctcttgtgaacctgccccccaccctcagctccccatygattcctacaacctcctaactactcaatccattgttcactcttcaccaggtcactttacaaaaactaacaaaccaaaagatccaatcctattatcctactgcttttgaaagtctccacaaaaaagttcaaccttcttttgtcaggtaactgcagtgacaaaatgttcctaaccataaatacaaacatgagctctggcaggtgtgcgagtacctaggaaggcaatgagaaacaagaggcttaagtgaaaacggtctcaggaaactgcaggcactgtgttttttccacaaaccccttcacatcccttcccgtggctgtccaggcccacctccagtgcctcccctgaagccaccatgtagcatgcattacctcaccccacttcagtttccctgcctctccttcaagttggcatcccaggtgcgggc

SEQ ID NO: 703511 - DNA, 827 bp, Homo sapiens
tggatagcctttatgtggctggtgggccttcatgacacttttgttaggaggtgggtgctaaagagatacttgtatgagatgcagggggaagcttcagaggagtggctgtgtcctgaaaccaagagcttcccctaaagggtcaccacagcaagcttgttttctcagtcagagactaaaggaaaattgtgccctagccagctagcctgagtgtgaaacaatttaaargtggagagagggagaaaagcaggtatgtattaaccaaggccagctcaattctgggactgggctgagtgcctgtgctgtgtgtatttgcacggcatcccctcctctttggtgtgttgtctttctaccctgtacacacccccatcacagtcatattgagttgggattataaacttctggagtcaacacacaggttgcacgtgttgtgtatgctttggatgaactaatggcactgtgataaaatagtttgctctcagaccctactgttttgtacttttattcttagagtgaagctttgtttcatgatcacggtctcagagaacctcagtccctttggaaatagaactgactagatgaaatacaatgaagaccacaaaaataagctaaaaactgtagttttgactgtttccttgaaagtattttgcattttcatttatgagcaccgtagatcctgcaaatgtacttgtgtgtttttatactttgtgtttagaacctcagcttctgaggcatactggaaaggccaaaactacaaaactagatatttggcttttaaatgtatcttcagcatacatattcgtcactgttacccagggcacatttgaaaa

SEQ ID NO: 703512 - DNA, 827 bp, Homo sapiens
tggatagcctttatgtggctggtgggccttcatgacacttttgttaggaggtgggtgctaaagagatacttgtatgagatgcagggggaagcttcagaggagtggctgtgtcctgaaaccaagagcttcccctaaagggtcaccacagcaagcttgttttctcagtcagagactaaaggaaaattgtgccctagccagctagcctgagtgtgaaacaatttaaaggtggagagagggagaaaagcaggtatgtattaaccaaggccagctcaattctgggactgggctgagtgcctgtgctgtgtgtatttgcacggcatcccctcctctttggtgtgttgtctttctaccctgtacacacccccatcacagtcatattgagttgggattataaacttctggagtcaacacacaggttgcacgtgwtgtgtatgctttggatgaactaatggcactgtgataaaatagtttgctctcagaccctactgttttgtacttttattcttagagtgaagctttgtttcatgatcacggtctcagagaacctcagtccctttggaaatagaactgactagatgaaatacaatgaagaccacaaaaataagctaaaaactgtagttttgactgtttccttgaaagtattttgcattttcatttatgagcaccgtagatcctgcaaatgtacttgtgtgtttttatactttgtgtttagaacctcagcttctgaggcatactggaaaggccaaaactacaaaactagatatttggcttttaaatgtatcttcagcatacatattcgtcactgttacccagggcacatttgaaaa

SEQ ID NO: 703513 - DNA, 887 bp, Homo sapiens
caaattgctgagattacaggcatgagccactgygcccggccagtatatgcacattttttttccaactaaatgacgattgaaaatcaagtattcttgggatgggaaagtcctgatagggagggctgactttttgtagctatggttcttcaggacctacttcaggacttgagtagcgggaactgtggtatacacagggatcctggaaccaagcccccatgtataccaaaggacaactgtagttggaagtagttttgaagtacagttttttcccccaaggagctcctggttttgtggggcaagggcatacatggatagttatgccactgtgtactctgtgcatgtgccaattatgcttcaggtgcttggggacaacaggggaagaggactaaagctgagtggttaagcagtgtttcccaaaagggatacctgagctgggttctgaaggtagagtaggagttggcgaggccaagatggcggggatgggcatgggaagctgaagaaatagcaatgcaaaaatgtactcctcaaagagaacagcgtgttcctccctgagtctttctcaccttggccagtggtgctttttcttccaggatgctggacactgaggagtcctcctgggcattgttgcttccctcatactccctgtcaacacatcttatgtgcagtcacactatcttccaagggactctcaggacttccccttctttccatatctatgggaaccatgcttgccagctacgctcccgcttagccttctgggatagtctcctaactgctctgctcaaatccatctttgcccccatccgatctattctccatcagccagagtgaactttctaacagtaatctgtgcactcttttgcttaaatctttcttttttactttac

SEQ ID NO: 703514 - DNA, 887 bp, Homo sapiens
caaattgctgagattacaggcatgagccactgcgcccggccagtatatgcacattttttttccaactaaatgacgattgaaaatcaagtattcttgggatgggaaagtcctgatagggagggctgactttttgtagctatggttcttcaggacctacttcaggacttgagtagcgggaactgtggtatacacagggatcctggaaccaagcccccatgtataccaaaggacaactgtagttggaagtagttttgaagtacagttttttcccccaaggagctcctggttttgtggggcaagggcatacatggatagttatgccactgtgtactctgtgcatgtgccaattatgcttcaggtgcttggggacaacaggggaagaggactaaagctgagtggttaagcagtgtttcccaaaagggatacctgagctgggttctgaaggtagagtaggagttggcgaggccaagatggcggggatgggcatgggaagctgaagaaatagcaatgcaaaaatgtactcctcaaagagaacagcgtgttcctccctgagtctttctcrccttggccagtggtgctttttcttccaggatgctggacactgaggagtcctcctgggcattgttgcttccctcatactccctgtcaacacatcttatgtgcagtcacactatcttccaagggactctcaggacttccccttctttccatatctatgggaaccatgcttgccagctacgctcccgcttagccttctgggatagtctcctaactgctctgctcaaatccatctttgcccccatccgatctattctccatcagccagagtgaactttctaacagtaatctgtgcactcttttgcttaaatctttcttttttactttac

SEQ ID NO: 703515 - DNA, 1730 bp, Homo sapiens
ctgaacaatttgccatctggctccttccatcttggctccttcttatccagtaactaaatgagaactagaaaaagctgttctacttccagtccacgggtgacctgctaagtaaccttgggagatttcatatttcctgccacagctttgtcagccttaaataatgaatttcagaaaatataattaagtacagtttatttgagtgcaaagcctgaggacagccacccaagacaccaactccaaacaaatggggtcagcattccaaagtggagaagttaaggttccacttaaatagaaatcttagcaggattacaacattttccatacaagatcagtgcatatgccacagaaatttaattggttaaaattgctacattccaaggcagattactctataactccctgaagaggggtagtgatctgagtcagtgtgttagctccagcactgtttggtcttaattatttagagaaaaaagaaaagaaaaaggcagaagttgcagctgcaagccacatgacttagatggcatagccaccttcctctcaaggctcaggaaaatttaaarctcccaccaggtgcagtggcaaatgcttgtaatctcagtactttgggaggccaaggtgggaggatcacttgagctcgagagtttgagaccagcctgggcaacatggtgaaaccctgtatctactaaaaatacaaaaattatctgggtgtggtggcacgtgcctgtaatcccagctactcgcttgaactcaggaggcggagattgcagtgagctgaaatcgtgccactacactccagcctagcgacagagccagactctgtctcaaaaaaaaaaaaaagaaaagaaaaatctggtctctacaaaaaatacaaaaattagccgggtgtggtggtgtgcacctgtagtcccagctactcaagaggctgaggtgggaggatttaggttgcagtgagcctagatcatgccactgcactccagcctgggcaaaagattgagaccttgtctccaaaaaaaaaaaaaaaaagtgaacatggtcaattttttctttaaattataatttaaaaagtgttaaaaatgtaaagttccaacagctttaagtttgaattatttcaagtttgaattttttaatttcatagcttctttatcagtaaatccaaaatgatacttccacaaatgtacctcaactgtcagaataaaagaaactgtgagaataaatgggaaaggctgctgaaaaatacaaatgacctaaaagagtaaattaattgtcatcattactatttattttttactgtctatctaatcccatggccagaaggtatatttctaactgtcatctgtaatgacaaaaggaaagtgcgcagaagcatgtgcctggatcagcatggcccgacaacctctgcaggatgagttgctgtgtgtgcaggtcctgcagcagatggaacagcaagtgtgcacatctgtattattcaggtgatgtgtggatacagaagaaggagaacggaaatgacttttagaaccagtcttgttttctgcttgtgttattttatacaggactacttaatgtctcattttcaaaattgtctgaatatgcatgtctttgatgcaagcaagacacagggctcctaaataaaagaagaaataggaatataagtaaacagtaatgagctgtttttctttcttgtttaaaatatattattctactctggcagcatagagaagccctaagggagc

SEQ ID NO: 703516 - DNA, 551 bp, Homo sapiens
aaaatatatatatatatatatatatatatatatatatatatatgaacatgttttacaattatttttaccaaaaagataataactgaaactggtcttttcacyggacacatgcaccctcctgcctagcagaatgcgcattggcgggtatcctggagaaagagtaggggcagcacgactcaagacagccagagtgaacatcccatgagtttctgtaaaatttcagtatattgcacatatatacacatacatatgtacatatttgctataaagcagttcatgtacacctggttaaatggatgtgccaattatattattcagttttaactaaattaacaataaaaaggtagacaagtaccttatagattccggccaaaaaaaaaaatagaattatacataatactaataaccaggagcaaaaaaaaaaaaaaaaaaaaaagtcagggggattctgctccccagcttcctcagtcacattataatgttaaaaacaatgccaagttaaatacatttgaaaaccagctaaaaatagtgaaattgggaaaactactact

SEQ ID NO: 703517 - DNA, 551 bp, Homo sapiens
aaaatatatatatatatatatatatatatatatatatatatatgaacatgttttacaattatttttaccaaaaagataataactgaaactggtcttttcaccggacacatgcaccctcctgcctagcagaatgcgcattggcgggtatcctggagaaagagtaggggcagcaygactcaagacagccagagtgaacatcccatgagtttctgtaaaatttcagtatattgcacatatatacacatacatatgtacatatttgctataaagcagttcatgtacacctggttaaatggatgtgccaattatattattcagttttaactaaattaacaataaaaaggtagacaagtaccttatagattccggccaaaaaaaaaaatagaattatacataatactaataaccaggagcaaaaaaaaaaaaaaaaaaaaaagtcagggggattctgctccccagcttcctcagtcacattataatgttaaaaacaatgccaagttaaatacatttgaaaaccagctaaaaatagtgaaattgggaaaactactact

SEQ ID NO: 703518 - DNA, 551 bp, Homo sapiens
aaaatatatatatatatatatatatatatatatatatatatatgaacatgttttacaattatttttaccaaaaagataataactgaaactggtcttttcaccggacacatgcaccctcctgcctagcagaatgcgcattggcgggtatcctggagaaagagtaggggcagcacgactcaagacagccagagtgaacatcccatgagtttctgtaaaatttcagtatattgcacatatatacacatacatatgtacatatttgctataaagcagttcatgtacaccyggttaaatggatgtgccaattatattattcagttttaactaaattaacaataaaaaggtagacaagtaccttatagattccggccaaaaaaaaaaatagaattatacataatactaataaccaggagcaaaaaaaaaaaaaaaaaaaaaagtcagggggattctgctccccagcttcctcagtcacattataatgttaaaaacaatgccaagttaaatacatttgaaaaccagctaaaaatagtgaaattgggaaaactactact

SEQ ID NO: 703519 - DNA, 3270 bp, Homo sapiens
gcctctaatcccagcactttgggaggccaagktgaagggatcacttgagctcaggagctttacaccagcctaggcaacagagggagactgtgtctctacaaaaaaattggaaaaaataataattatctgggtatggtggctcacatctgtagttccagatacttagcgggctgaggcacaaggatcactttagctggggtggtagaggctgcagtgagctatgatctcgccactgcactgcagcctgggtgacagggtgagaccctgtctcaaaaataaataaataaatcagtattaaaaagacaaacacaaattacatgcatagggaaagtaaactaattttgtgtaggcctaattaaaatatgaaaaaacaaatttacatttccaacctttagaacttctacaacatggaatagatatactgaaaaagcaacactttcccatttccgtgtgatcagggagatactcgatgatctttcagaaacattggaaaatgaggacagagattagcagtgttctcagtatacgtctgtgtaatttttttcaaagaaaatatttgatattagtatctggcagatcagtaataaatagatttccacatttgtccccctgttctatcatttctgattagcataatagaaattatagaacaaaaattacaagcaagaacaaatagaataaaatataaccatttatattttattgcataatgatataatctgaattagttctggtgcgcctctagtggaaatgtatatacatttttgtatctgaagtcaggtaagttggcaattgaatacaatttctaagacatgtttttgtgttattttgagtttttctttcagtatcttttaaaagaatgggatacttcttagggtaaattaaataattgcgtgctcattgtttggtgctagatccagaatatgatagacaatgaatagcttattaataatacacaatcttaatcagtggcttcccaactacaatataaaatatatatcagtgtgacaggaactcatttttttaaattgcagaatacctacttccccttcagagattctgattctataatttaaaaacccctcaggatttcattgaaaagaatcttaaggattgattttttgtttgcttttttggttcatttataatgtccctgcatatattacttcatatttatctttttctgggggatattgactattaaatatcaattataagtccccctcacatcacgcatttaatttctaatatctttttacattttaccttttataaaatgtatggaagaaaataattccatatttctgtatagaatcttgttacaaatttaaaaaattaagttatactatgaaattcgaaagtacaattcaggcatgatttaaaaacagtgccacacatattccccccaaaattaaaaataaatgtcaattttagtctttttctaccccttgtggataatgatgctaaagatcgtgacaaattatcaacattccagagaaaggtgcaatgaataagagcatgacccacatgacaagagggcaaggatctaaaatccaggctctgtcacttaataattggtgtgtctgtgggcgattaaccccttttccccctcaactatgcatcagcagacaggaggaaacatccaatttctttactggggtgtcagaagtattaaatatgtttgtgaatggaaagctcgtggtgactcacccggcaaaatgtaaacagaatgtatgtttcctattttagtttatgtagtatttgttagtgtggtaggcctggcgaaaggtttcaaataatttcctgttcgtatattttaaagggattttacatcaaaggagaaattttgagactgatgacttcatattccctgcagcatattcaccctcttttcccatttttaaaagtttttaccccataaaatcaaataaacatgcaggatcatctactttagcctcatctggaggggctgcattcttccacataaatttgtgtcttttgattttcactcataaaaattttgtgtggttaaataccatagtaaatatacgttaagtaaataaatgttccacatgctttttctctctatcatatgttttaaatatgtcatccctaaaatgtgagaatgtgtattgttatataagtggatataaaatgatcccaaaggaacgctttgatgacaattgtctgtacatgtcatgaagcacaagacactaggctttgaggcctgagattgtcatttaaagattccttcctgattgaagccttggctcctttcagtttccccttcactatttcttgttaatatggacaacaacagattccctgctaagaaatttcagacttactacaattttatcaactcctctccgttacatgtgcttgctatacaactctacttcaggtaagtgaatcattttctttgatttaaacgtttcctgctgaggtgtttgagaataaaagctattttgtaagaagactgtcaacagagcactttgtcatctatttagcttaagtatatcaatgagaacttaaaagcacattttgtcacatgcataaccttatgcagagatgatcctcttgtagatttttatatttttaaaaatatgtttttgcgtccaaaatgtgttgtttttaatgggcagcttagtcccatattttccatttttagcatcatcagtgaccaggaaaatgtctttctgatattatgatagattcttccctaattaaatactttttaatacttgggttatgtccatctaatatatgttttaacttttttaactttggcattgttttttgttttggtataaaatttgattttaaattcagttatgattttaacatttccatttcacagtaatttttccaacttatgtaattatgacttttgtgacaatttaatttttaatttttttatttccataggttttcttgagtctcatgaggttcagaacacactacctaaaatgtggtgctgtggcatattgaatagtttagattgaaatactttaaagaacaggtgtgagaaggactctctgactttctcctttgcccctgaagcaggtcgtagaaagagtgcgtgctagaaagacgctttgatctttaccttctctgaaagtagatcagaagaccctcatgtgagagctgtcctccctacacagagaaaaagaacagctttatctccaaagacagaaggatgtaaaaaggaatctgaacaaacaggccttgctaagtttcctctagtttactacctttagctcatacctt

SEQ ID NO: 703520 - DNA, 610 bp, Homo sapiens
taaactgcttacttctctgaatctatttcctcatcaatgaaatgggcttgataaacctaatccaaggcatcttcaagagttaagtgagattggatatgaatcacatccattatgatgccctgcacattgggatgtctccaacaaaagctggtttcccacatgctgtgtcttctctcwcatgctgactaccagagggaggcatagcatttctctgctggatttgtgtgtatttcaggaaataagggctccctaaagggaagcctccttcctcagggtgactgcagtgacatggatggatttctctttatctgggccccttcttctgaaccttgtgtctctgcaaattgggttcaggggacaggtgaccagcttcatgaggcacacgtgtgtgcgtaagcatagtcctgtattatgatgatgacctttgaatccaggtggcagtgctgagcttgggattcaggaaaaagcagatgggtgaaggcaccatgtgagcagtgctccatatgcagttctgttgagcagaggaggaacaatggatacatgtagaggcttggagtgatttggtgctggtaggcaggtgagcagattacattcatgtttaaacagccaa

SEQ ID NO: 703521 - DNA, 522 bp, Homo sapiens
  misc_feature 3, 4, 5, 6, 7, 8, 9, 10, 11, 12, 13, 14, 15, 16, 17, 18,19, 20, 21, 22, 23, 24, 25, 26, 27, 28, 29, 30, 31, 32,33, 34, 35, 36, 37, 38, 39, 40, 41, 42, 43, 44, 45, 46,47, 48, 49, 50, 51, 52, 53, 54, 55, 56, 57, 58, 59, 60,61, 62: n = A,T,C or G
  misc_feature 63, 64, 65, 66, 67, 68, 69, 70, 71, 72, 73, 74, 75, 76, 77,78, 79, 80, 81, 82, 83, 84, 85, 86, 87, 88, 89, 90, 91,92, 93, 94, 95, 96, 97, 98, 99, 100, 101, 102: n = A,T,C or G
agnnnnnnnnnnnnnnnnnnnnnnnnnnnnnnnnnnnnnnnnnnnnnnnnnnnnnnnnnnnnnnnnnnnnnnnnnnnnnnnnnnnnnnnnnnnnnnnnnnnnacatctctgagcagaagttagaaaagatcagaacaccagaactgcacaaggtctgtttattcacctggacggtgagcccatgactttaaagtcttatcatttaaacttagcataaaacaatttattccaagaattatctacgattttttcaggtcatatcacccaattcactcattttttcaccaagaaaatcaagatctcacattcaaatcatggaataaaattcttaaatgcttaccaaactgggatggataacccagcaagattttataaagatgaaccctgtgctcagtargttaaataggttcccaagcttgggggccactctcaaggcggagatacagcccaagttggttcagtcctagggaatgagtgaaggcaagcttgggggccactctcaaggtggagatacagcccaag

SEQ ID NO: 703522 - DNA, 663 bp, Homo sapiens
ttttttctccttctactatttttattttgctcaatataccagttaagtaatgttctcatcagctcagaataacttaacatttaacccatatgttgtatattaagcatattaattacattttcaattatttacttcatatttagctcttttccaaatatggcttgtcaagcggagagtttcttgttctttgcacactattatattttttctgtttccctcattgtattgaaaaacattttaaatgtaagttctataactgtaacataagttgtaattcggatctcccttacgggcgcaatcacttttgaaatgtctgccgtcagcttatgtgtttttccatttgctttatggcaatgggaaatctacatggatgtggtatatgtgtgatcaccaatatataaaagaaacgcttcctttttttttcttgcatttttwaattatactttaagttctggggtacatgtgcagaacatgcagttttgttacataggtatacacgtgccatggtggtttgctgcacccatcaacccatcatctacattaggtatttatttctcctgatgctatccctcccctagcccccatcccccaacaggctctggtgtgtaatgttcccctccctgcatccatgtgttctcactgttcaactcccacctatgagtg

SEQ ID NO: 703523 - DNA, 637 bp, Homo sapiens
taccaaggattatgtccatartggtatgtcctaggttttcctctagggtttttatacttacaggttttacatttaagtctttttgtttgtttgtttgtttgttttgagacggagctcactctgtcgcccaggctggagtgcagtggcgtgatctcggctcactgcgagctctgcctcccgggttcatgccattctcctgcctcagcctcccaagtagctgggactacaggcgcctgccaccacgcctggctagttttttgtatttttagtagagacggggtttcacatgttagccaggatggtcttgatctcctgacctcgtgatctgcccacctcggcctcccaaagtgctgggattacaggtgtgagctaccatgcctggccacatttaagtctttaatcgatgttttttttcttaatttttttatttttaatttttgtgggtacatactaagtatgtatatttatggggtacaggagatattttgatacagggatgcaatttgtaataattacatcatggagaatggggtgtccatcccctcaagcatttaccctttgtattacaaataatccaattatacttagttgctttaaagtgtacaattaaattattgctgactataatcatcctgtt

SEQ ID NO: 703524 - DNA, 637 bp, Homo sapiens
taccaaggattatgtccataatggtatgtcctaggttttcctctagggtttttatacttacaggttttacatttaagtctttttgtttgtttgtttgtttgttttgagacggagctcactctgtcgcccaggctggagtgcagtggcgtgatctcggctcactgcgagctctgcctccygggttcatgccattctcctgcctcagcctcccaagtagctgggactacaggcgcctgccaccacgcctggctagttttttgtatttttagtagagacggggtttcacatgttagccaggatggtcttgatctcctgacctcgtgatctgcccacctcggcctcccaaagtgctgggattacaggtgtgagctaccatgcctggccacatttaagtctttaatcgatgttttttttcttaatttttttatttttaatttttgtgggtacatactaagtatgtatatttatggggtacaggagatattttgatacagggatgcaatttgtaataattacatcatggagaatggggtgtccatcccctcaagcatttaccctttgtattacaaataatccaattatacttagttgctttaaagtgtacaattaaattattgctgactataatcatcctgtt

SEQ ID NO: 703525 - DNA, 637 bp, Homo sapiens
taccaaggattatgtccataatggtatgtcctaggttttcctctagggtttttatacttacaggttttacatttaagtctttttgtttgtttgtttgtttgttttgagacggagctcactctgtcgcccaggctggagtgcagtggcgtgatctcggctcactgcgagctctgcctcccgggttcatgccattctcctgcctcagcctcccaagtagctgggactacaggcgcctgccaccacgcctggctagttttttgtatttttagtagagacggggtttcacatgttagccaggatggtcttgatctcctgacctcgtgatctgcccacctcggcctcccaaagtgctgggattacaggtgtgagctaccatgcctggccacatttaagtctttaatcgatgttttttttcttaatttttttatttttaatttttgtgggtacatactaagtatgtatatttatggggtacaggagatattttgatacagggatgcaatttgtaataattacatcatggagaatggggtgtccatcccctcaagcatttaccctttgtattacaaataatccaattatacttagttrctttaaagtgtacaattaaattattgctgactataatcatcctgtt

SEQ ID NO: 703526 - DNA, 1361 bp, Homo sapiens
gattacattagtaaagtagctggacattattacccaagcttacatccagctcttagacaaaaaattctactaacctcaagctcccagaagtttagaaagtcatctgcgtgcagtgaatcccttcaaagtcttattcaacaagcacatcttttctaggttagtggtctgggttttttgttgttgttgttgttgttttgtttgtttgtttgtttgtttgagatggagtcttgctctgtttcccaggctggagtgcagtggcacagtcttggctcagtgtaacctccacctcctgggttcaagcgattcttgtgcctcagcctctggggtagctgggattacaggcgtgcgccaccatgcccagctaatttttgtatttttagtagaggtggggtttcacagtgttggccaggctgatctcgaactcctgacctcaagtgatctgcccgcctcggcctcccaaagtgctgggattataggcatgagtcactgcgcctggcctggtggtctgttttttaacctcaaacagattttgctgtatctgtaatrcaagatgggttaatagtaacttaattgtactttttaaaataatgaaaagagtataattagattgtttgtaaaagaaaagataaatgcctgaggtgatggattcaccatttagcctgatatgatcattgcacattgtatgccaatgtcaaaatatcccatatgccctataaatatatgcatccactatgtactcagaaaaattaaattttttataaagatgccatcaaattgttcttatttagccaattgcttattgaaaaatgaatatgtcattttattttgcattttgtagcttgatcatgatgtagaggtactttttccactttcttaatatcactaatgattctttgcattttcttttgtttagttgtctttttgaaaaatctatttttattattgatttgtaaaaatttttcccaaatttttcaagttatttgctttagttttttaatatcgaatttttttattttatgcaagcctatttattatgcttttcttctgtgacagtgtagttattaagaacacaggctatggaggcatatacatatgagtttagtcccagctttaccaattaaatgctgaatgactttggacaagttgctcaaccttgctgaatctcatttttctctttagtaaaggtgatgtaaggacagtaccgatcacatgtagtaatcacgtctgctacatgaaatattatgcttagagcatttaccataggcttaaagtagtttatttatttttcctgatataggataaacatttctatttaaatattctatttttttgtaattaactttttaattaattagaattga

SEQ ID NO: 703527 - DNA, 643 bp, Homo sapiens
tatatatatatatatatattagtcactattttaaaaacttaaactgtctaagagacattgtaaaattttgcatgtagctaaatgataattcaatttatgaaaaatatccctaagtatcaatctcagggtaaattcaaattacaggataaaacagctttaagagaaatactgaataaccttaagaatacatttttcttcccaaattaatagactaatgtattctgaacactcaattcataaaatacattttaccaaattttcattcttctcagtatcaatatmgttataatatacatgtgtgcatgcatgtgcatgtagatgtatgtcctgtgtgtgtgtgtgtatacatatatatatatatatacacacacacacatataggaaggcaatgtaatatatatgtatgtctatacatatgtgtgtgtgcctgtgtgtgtctgtgtgtgtgtgcatggaatgtagtcatccaaataaacaagtctttttatcctactctgtttattgtacttttgataagatctatataaagttatagtgacatagtttatgtaaaaagtccactttgttctaaagtcacttatactgatctttattttatgttccaactgtatgttttcctccaagtgtttaaggcactgaatat

SEQ ID NO: 703528 - DNA, 1993 bp, Homo sapiens
tcagacaccatataccaccacacttctatgtctcttagctctacccctgtactttccatatgaagctcaagtgagttagcaagacctagctctgcttccatgaatctacctggagtttttcaatcccagaggtgcagttggatcagatgataaactttatatcacatttcagaagaaaatggttactaactcaagtcttttaaaagttcaatagtatattggcttcctcatatctgattttttatttcttttattttcctttttttttgttttgagacagggtcctgctctgttgcccaggctggagtgcaatggcgcagtcacagctcactgcagccttgacctcccaggctcaagggttcttcccccttcaacctcccaaagagctgggattacaggcatgagccactgtgcccagccttcatgtttatctctaattacaaattgaactgaatttaaaagtagaattgttgaatatttaatgtagtaaaaattagtctttcttaggtaaaaatagaataatcagtaggcaaggttgtggcatattattgatggttttgcagttcacttatatgaattggccatatctctgagttttagtcagtttcagagaactgagatgacagtgttaaactattcttcacttagaaatcagtgaaaatgaaaacccttaccataaaagacttatatacctctttaaacttaaactgtattctgtctgctcactaagaatgatacatataattacatattgtaatatataacaacatattgtatatatattaaatatacataatccttttcgtgtatattctcagccttcaaagaaaaacctcggtatccaccaagtcaggctcaagcagctcttcaagacagtccccctgaagagtactcctataagaaatcaataagaaacctgtttaaaaacattccttttgtccttctgttgatcacttatggtaagtggttttcttgtactttctttaatgtctgtgtgagcctttcagcattgtggattcttttcatttaacctartggtttgaacttcaatgagattggcctgttaactctacagcataatcatgaacttaaactaaaagcagaaaatccaggatggatcttcttacatatttttaaaaataataatttttaaaaggtagtttttggccaggcatgatggctcatgctggtaatcccagcacttgagttggccgaggtatgtggatcacttgatgtcaggagttgcatgtcaggactagcatggtgaacatggtgaaacccatctctactaaaaatacaaaaatcagctgggcatggtggcacacgcctgtaatcccggctactcaggtggctgaggcaggagaatcgcttgaacctagaaggcagaggtggcagtgagcaagattgcgccactgcactccagcctgggcaatagagtgagactatctcaaaaaaaaaataaaagaaagaaaagaaaagtagttctcaaatacagaaactcggtcttcttttgtgagttctcatggagtattttaggccatttgtgaactatagttatcctgatgtaagcaggtgggaaatgctatcaacaatacttttctttgacactgtgcaagctggcatctgttttgattactcagtcaaaagtggacattaaggaactcaccttaaccagttctgacatctaagaaaattctctctctccacatctttcaggatagctgacagatattcatcctgacactgtagctttgactgcagacaccaacacacttggttttcttcagagttttctgacggttcattctttgtttcttgtgttaacaccatttacatgaacaccagcactccctatttctgtcttacttgcctccagaaatcactcactgctattctctgtttcacattttttggggaaacacactctagtacataaatgttttacaagttgtaaccaattaagtccggacctaaactatttttatcaggatta

SEQ ID NO: 703529 - DNA, 595 bp, Homo sapiens
gaaataaaaatgtgctgtgcttggccgggcacgtcggctcacgcctctaatcccagcactttgggaggccacggcgggcggatcacccgagatcgggagttcaagaccaacctgaccgacatggagaaaccccgtttctactaaaaatacaaaattagccaggtgtggtggtgcatgcctgtaatcccagctactagggaggctgaagcaggagaatcacttgaacctgggaggcagagaggcagaggttgyggtgagccgagattgtgccattacactccagcctgggcaacaagagcgaaaatctgtctcaaaaaaaaaaaagaaagaaaaaaagtgctgtgcctgagatttctaactgtgcattttatggggcctgcatgattaccacagatatgtatttgaggagaaaaacacttaaatgtaaatgttaaatttctttttctactacatcatctacttttatcactttttgaactaaaaggtatttaatgtggaaggccccaataaaaaatgatctttaaaaaaataaattttttaacctaaggaaagataattttttaccatcctttttttttttttaggctgcaccaaa

SEQ ID NO: 703530 - DNA, 533 bp, Homo sapiens
tagtgctgcaatgaacatacacacgcatgtatctttgaaatagaatgatttatattcctttggatatatacccagtaatgggattgctatgtcaaatggtatttttaccacttcccatgttgatccttcaggtatttttatgcctgtcttgggtcttccaggttttacaaaactttctgaatcattgtcaccactatctctggaacagttggaaaytcattctgaatattctttggccttcggaagagttttttagtggacacactgccttataggagacgtatatttatttcttaaaattaaattctgatatctcaaccactataaccctaacctacatcctagtgaacaaaagatgccacatcgctcagctgagttaacagtcacgcaaatgatcacatcctggaggatgtaattctctgctcttctatgacactgactagagtctctgggtgggcacttggattaccatgctctactacctacttatccagccaagtgaattttcagtctcccgggcctaataagttttc

SEQ ID NO: 703531 - DNA, 533 bp, Homo sapiens
tagtgctgcaatgaacatacacacgcatgtatctttgaaatagaatgatttatattcctttggatatatacccagtaatgggattgctatgtcaaatggtatttttaccacttcccatgttgatccttcaggtatttttatgcctgtcttgggtcttccaggttttacaaaactttctgaatcattgtcaccactatctctggaacagttggaaactcattctgaatattctttggccttcrgaagagttttttagtggacacactgccttataggagacgtatatttatttcttaaaattaaattctgatatctcaaccactataaccctaacctacatcctagtgaacaaaagatgccacatcgctcagctgagttaacagtcacgcaaatgatcacatcctggaggatgtaattctctgctcttctatgacactgactagagtctctgggtgggcacttggattaccatgctctactacctacttatccagccaagtgaattttcagtctcccgggcctaataagttttc

SEQ ID NO: 703532 - DNA, 716 bp, Homo sapiens
gtttttcctggaggctgtgccctctcagtaaggacatcagaggcttcatactgtgggggaaatataattaactaaaataattcattcaaattattaaacaaataaaaattctggagaatggggaaaggtgtgatagggttcagcattcagagttgctgcaatatgtactaaaaaaagtaccatttaaaaatatataagacatgaaaaagcaggaaagtgtgacatatactcagcaaaaatttggagcaacatcactgtatttcaatgggattaagtataaatctgaagtagtttatttcaagttaagatgtatatggtaaactcaaacacttactaaagaaataactaaaaaaaaaaggatacttgaagaaactaaaatgttgcatcacaaaatattcacttagtgtaaaaaaaagcagtagcaaagaagtagaagaacaaaaaasacatgagacatagagaaaataaaaagtaaaatggcagaaataaacccaactttatcaacaataggattaagtgttaatgaattaaataattcaaaaaaggcagagaatgtcaaactagattggaaaactaggtttaattatatgccatttctaggagataaactttggattcaaagatacaaatagattggaaataaagggaagaaaaagtatacagcatgcaaacagcaaccaaaagaaagctgaagtggctataccaatatcagagaa

SEQ ID NO: 703533 - DNA, 1314 bp, Homo sapiens
aatttatttacctattccacaggtgatgggcactggaataggtaaatattacaaataaagcagccaaaaacattcttacaaatatctttgggctgatatgtcttttctaaagaaatcaaaatttctaatttaataaattatatgttttctagcttggaagacgaagacaatgagatctaatgaaatgagaggctgagaaaactggacctgattagatgcatccagacgtaatctgtgcaaaaaccatgttttttccwtcttcgacattctcatgcctgcttcttcctcctcctctgctcccactcttagcagtggcaactcctggtgacctatttttcttctgaggcttttctcatactatctccatattctgtcaactcataaccactcagaaaatttaatatcgaataactgatactcaggttaaaataatggttacactactctcctgaataatcaaataactaataggtttaaataataatgacactactttcttaaggatatatgcttatttacaggaaacagggatctatctctgtggagaaattttagaagtcagtaaagttcaggagatagtttttgagtgggtaaaactgattttcagtaccagaaaatcataaatgagcatctttcttgtgaagccagttcttaatacatccaaaaaagggagttgcctttttatttttatttatttatttatttatttatttattttctttattattattatttttttgagatggggtctcactctgtcacccaggctggagtgcagtggcgcggtctcggctcactgcaagctccgcctcccgggttcacgccattctcctgcctcagcctcccgagtagctgggattacaggcgcccgccaccacgccaggctaatttttctgtatttttagtagagactggagtttcaccgtgttagccaggatggtctcgatctcctgaccttgtgatccgcccaccttggcctcccaaagtgctgggattacaggcttgagctaccacgcccggcctgcctttttataatacatttaattttttaaaaatgctgataaagacctctagtttgatatataattctcagagttgcgctatcgtctaactacaatttttcactcatacccttcctgtcaattgaaagctaagggacaggtaataaaagactacacttgcattaatagtaaaacatactagggaaaagtttttcagttacagtttcagaaagttgttcagttgctatgagagtggaaactaaatatttgcttccttctattacaaacacagcagaccaacctaacctaagtc

SEQ ID NO: 703534 - DNA, 475 bp, Homo sapiens
gtaagcaataattaatgaatggttacaaactcattattttacttgtttatgttatatagtggtaataacaataatcaccaacgtatatgaccttactatgtgccagacactgatctatatattcctgtctacattaattcatttgatgcttacaaagtaaacatttactacataaagaacctaaggcaaagcatgagtgagaaagtactgagttaaatgtctatgtttttrgtagttctttgtgaaatattgtgatggaacttacaggtcttctttgtgctactaagagaatgtccttccagtctatatgcattaaaatgattttatccagaattggtgatgaattctacttaatgtctttctacatctatcaaattaatcatgtattcttcttttctacctgttttcttacctggcaaggatatatttagaggtctaatacaaatattgataaatacaaaaaatgagaaaagat

SEQ ID NO: 703535 - DNA, 607 bp, Homo sapiens
tttgtagtgagatggatgcatgtttattggagatttgaattttttaatttttaaactaacagagcatgcatggctttttcctatttttctactgagtgttagtacattttaattgttttctgaaccactttattgacgtgtgattaacatgcaaaacactgtacatattcacagtgtacatcataatgagtttggagataaacacacacccattaaatcaaaaccttatttatgccataagcatgatatttacttattcctttatgtgtacattttagaastatgtatcttcaaaataatttgacaaattatttaatttgtgggcattgagacattcatattataccattaagattacctaggaaatattcttctcaacatcagccttggcaaagttttggctgagtccccaaaaccaaatgcaacaaaaacaaaaatagacaagtgggacttaattaagtaaagagcttttgcacggcagaagaaattgtcaacagagcaaacagacaacctacagaatgaaataagttattcacaaattttgcatctgacaaaagcctaatatccagaatctatagagaacttaaatcaacaaggaaaaaaatca

SEQ ID NO: 703536 - DNA, 607 bp, Homo sapiens
tttgtagtgagatggatgcatgtttattggagatttgaattttttaatttttaaactaacagagcatgcatggctttttcctatttttctactgagtgttagtacattttaattgttttctgaaccactttattgacgtgtgattaacatgcaaaacactgtacatattcacagtgtacatcataatgagtttggagataaacacacacccattaaatcaaaaccttatttatgccataagcatgatatttacttattcctttatgtgtacattttagaagtatgtatcttcaaaataatttgacaaattatttaatttgtgggcattgagacattcatattataccattaagattacctaggaaatattcttctcaacatcagccttggcaaagttttggctgagtccccaaaaccaaatgcaacaaaaacaaaaatagacaagtgggacttaattaagtaaagagcttttgcacggcagaagaaattgtcaacagagcaaacagacaacctacagaatgaaataagwtattcacaaattttgcatctgacaaaagcctaatatccagaatctatagagaacttaaatcaacaaggaaaaaaatca

SEQ ID NO: 703537 - DNA, 573 bp, Homo sapiens
gcatccaggtctaggattacaagtataggtttttgtttttttgtttgttgagatagagtctcactctatcacccaggctggaatgtagtggtgcaatcttggctcactgtaacctctgcctcctgggcttaagcaattctcctgcctcagccttcaaagcagctgagattacaggtgcccacaaccatgcccagctaatttatgtattttttgaagagatggggtttcaccatgttagccaggstagtcttgaacccctgacctcaagtggtccacctccctcggcctccaaaagtgctgggattataagcaagagccactgtgccccacctgggtacaactattttaagaccactttcagcacaagtgctatttttgtttaatttttcagatggagtctcactctgtcacccaggctggaatgcaacggtacaatctcggctcaatgcgacctctgcctcccacgttcaagtgattctcctgcctcagcctcctgagcagttggaactacaggcacctgccatgacgcctggctaatttttgtatttttagagatactgggtttatcatgtt

SEQ ID NO: 703538 - DNA, 959 bp, Homo sapiens
tgggaagaggatccctgggtctccagagatcaggggagaccccaactgccagatrtattttaatgtacaaaactgaaaccagatgaaataatgttctgtcacgtgaaatatttaagtatatagtatatttatactctagaacatgcacatttatatatatatgtatatgtatatatatatagtaactactttttatactccatacataacttgatatagaaagctgtttatttattcactgtaagtttattttttctacacagtaaaaacttgtactatgttaataacttgtcctatgtcaatttgtatatcatgaaacacttctcatcatattgtatgtaagtaattgcatttctgctcttccaaagctcctgcgtctgtttttaaagagcatggaaaaatactgcctagaaaatgcaaaatgaaataagagagagtagtttttcagctagtttgaaggaggacggttaacttgtatattccaccattcacatttgatgtacatgtgtagggaaagttaaaagtgttgattacataatcaaagctacctgtggtgatgttgccacctgttaaaatgtacactggatatgttgttaaacacgtgtctataatggaaacatttacaataaatattctgcatggaaatactgttatctctgtggatgtttatttagtgatattatctttttgaaatccctttgtccttcaccctcaccttccttatgcattttgtgcttttgtgataccaagatggtgttttgggtctgcagagccccttgtcctaactaccctagatcttgccccggctgccccagggtttccacttcccagtggcattgggaccttcctcctctgcctggccaggctgggcattcctgtgtcccacctctccattagtccccatcctccccagggtcctcagcctcttcctcttggtttggtttgtcccttccgttcaa

SEQ ID NO: 703539 - DNA, 584 bp, Homo sapiens
tgcctttgtaagtgcagtgtgaaaggtcagggaaggtttgtgtgcgtgtgttctaaagctgattttcagaagtccttttcccctaatcaagctctgtcagcataaaatattttaaataaacagcttttccacactgtgaatataatatctagcaagaccaatataacgcttcattttcagatttctcacattttgttttctttttttaaagactgaaaataaccacattcaatttgtaagttaagcgtaatttcttttatgacaagtggctcagtcttcattataagttaggtaatgagaaggcatytagttagaaagctagggcatttcttcatctcacaaatgcagatttgaatgctgagtatgcctgggtgttgtatatcatcttcctaattaaaggtaagaaaaatacaattactatggccaagatggtaaaataaataataacaaatctttattcgttgaggtcggatgagaggtttacttacagtaaaggaactatcttaggaaaggaaaacaaacagtaagaagaaaaggttgagaagtttaaggaataggtttcttcagggattgatattagctct

SEQ ID NO: 703540 - DNA, 584 bp, Homo sapiens
tgcctttgtaagtgcagtgtgaaaggtcagggaaggtttgtgtgcgtgtgttctaaagctgattttcagaagtccttttcccctaatcaagctctgtcagcataaaatattttaaataaacagcttttccacactgtgaatataatatctagcaagaccaatataacgcttcattttcagatttctcacattttgttttctttttttaaagactgaaaataaccacattcaatttgtaagttaagcgtaatttcttttatgacaagtggctcagtcttcattataagttaggtaatgagaaggcatctagttagaaagctagggcatttcttcatctsacaaatgcagatttgaatgctgagtatgcctgggtgttgtatatcatcttcctaattaaaggtaagaaaaatacaattactatggccaagatggtaaaataaataataacaaatctttattcgttgaggtcggatgagaggtttacttacagtaaaggaactatcttaggaaaggaaaacaaacagtaagaagaaaaggttgagaagtttaaggaataggtttcttcagggattgatattagctct

SEQ ID NO: 703541 - DNA, 643 bp, Homo sapiens
tgaaatttccaccttttgtgtgtatgttactttatagtatttaaggtatatcacattcttctaataaaaataaataatgctggatgggaaaatgtacaattttattgtataagtggataaaacatggatcatttctagctggctgggttagactacagaaagtaagaaaaaagaaattgtgaaaataccaaggatgttggtgaaagctggaatgttgatatacttgagagcccaaattgcataattttctctttccaaaagacgaaatatttaaaaatactcacagatggtgaaaatatccaatatactgtcccaagtatgtcattctctaggtgcaccaaaagcatttctttaggcatttaagatttaaacactctttatggtrtccatttcacagttaattattctctgtccatgtaacactgttgaaagattccagaatctatcattgtctttggaactagtttttacaaattatgagtacaaagttactttgaattttatgtattttattacctaaataaacaaataaagcatgaggtgaatagttgataattttttaaacatctgtcgaggtatctcaaactccattggaaaaatattgtttaatgttcctgcttgaaagagaagatttgaaaaagaa

SEQ ID NO: 703542 - DNA, 570 bp, Homo sapiens
caatgtctctcaacttatttaagcttgaagtttattcgctagtgttatgtaaatgaagactggcatattggtagaaaaagccaatcttcattccttaaaagatccaaagattcatagggaagtaagttgcattaagcacacacacatacatatacacacatgcacatgcacatcacacacatatagacacaagtgaacactttcaaattaatatattagatatgattttgttagataagccacagtgttacacaaatataatgttttcactatttcctgttttttttctagatatattgtttgaaatatgtccacttcaccagagaagtgataaagatcaaatcaggttaaaagtactctgcctttaattcatagactaataactcaaatttacattttcagtgacttggcaaccattgaatttccaaagcaatgattttagtcacagtgatgtatactttttgcaagagaaagggaaataagaaatgccaaagycatccaagtacatgatagataatatgtttgatttatatgtttgatatatattgactggagtggcagtttggaata

SEQ ID NO: 703543 - DNA, 631 bp, Homo sapiens
gccctgggctccctggttgagctttggtgggtaactgcaggatgcacacaggagctgcaggcgagggctttgtaggagctctgtggccgccccacatccctggcctctgccattttctgcctaaacgttgacacatggaagagggagcccaggatgctgtgggcccagaaggtggggccctgcgggctccatcacttcactccagggcacagagggcccagggtcccctcacacttgcctgtggggaccagtgggaacaattctcattttactgtcattatgaacttgcggcttaaatatgtctgtggacttcaaagtgccatcctgtgtggaaaatttccagctttcactgaagtagagagattagctcaatgcaccccatgtatcccgttcaccagttatccacagctcactcattttgtttcatccaactccctctcctattttgagggggagggattgtaattttttttttctttgagactgagtcctgctctgtcgcccaggctatagtgcagtgctgcgatctccgctcactgcaagctcygtctcccgggttcacgccattctcctgcctcagcctcccgagtagctgggactacaggtgcccgccaccgtgcccggctaattt

SEQ ID NO: 703544 - DNA, 587 bp, Homo sapiens
ccatgtgtacgcagacatgcacacaaacgcacaggttcactttctatgatgcaaacccccagtccacacccctgagtgccagcccacgggttccttcttgtccccacttctttgtgtccacaggccctgctgcacccctcagcacagggacaccccatggatgctgcctccatcaccccctcaggccctgtgcttgggggcttccctgctccattgggcccaacgcccagagcaggggctcggagaccccgctggccaccccacttggcaggacttgatggctttgggactgaattgttccaggcgggaaggggagggaagaacaggaaagaacctcagagaaragaaaaggacctgtggaggaggagggaacctgaaagcttaagcttttacccaaaagagcagccacctccaaggaggctgcttaaccccaagggaggggtgctccacccgcctgccgaccaaagagcccctcagcacccacaaggctgcctgaaggcagagaattagccttgctcccagtcccggcccctctgacatccctgcttagttttagccacacgcacatcccgaagtctgagttcatt

SEQ ID NO: 703545 - DNA, 1798 bp, Homo sapiens
  misc_feature 239, 240, 241, 242, 243, 244, 245, 246, 247, 248, 249, 250,251, 252, 253, 254, 255, 256, 257, 258, 259, 260, 261, 262,263, 264, 265, 266, 267, 268, 269, 270, 271, 272, 273, 274,275, 276, 277, 278, 279, 280, 281, 282, 283, 284, 285: n = A,T,C or G
  misc_feature 286, 287, 288, 289, 290, 291, 292, 293, 294, 295, 296, 297,298, 299, 300, 301, 302, 303, 304, 305, 306, 307, 308, 309,310, 311, 312, 313, 314, 315, 316, 317, 318, 319, 320, 321,322, 323, 324, 325, 326, 327, 328, 329, 330, 331, 332: n = A,T,C or G
  misc_feature 333, 334, 335, 336, 337, 338: n = A,T,C or G
gcataaattatcccaccaggaatatttaccagggtcctgctgcttttcctcataatttcggcctaggtccgtatgcaactagcatacaaaagtactgacaagtttcctagagtagatcatgtgtccttgaaaacaactaagggtagagttctaccatatttcttagctaaaaagtagctggcaactctattttcattccatccatcattttaaatctgtgcaacaattattccataccnnnnnnnnnnnnnnnnnnnnnnnnnnnnnnnnnnnnnnnnnnnnnnnnnnnnnnnnnnnnnnnnnnnnnnnnnnnnnnnnnnnnnnnnnnnnnnnnnnnnctggccaaagttgctttcttttgggaaaaggtgaattcaaaaaatcaaggtatgacaagcttacaaattccactatcctgcaaaattttttgtattgaaattggtaatttgtttctacattatttgtgcagagttcctacatttctaaaaggaaaatatatgagcttaaaatttgtcagactcactctgtttctcttactgtaaagcctcaaaattcagctgtaacctacaactctttgcttttcaaaagtgactagaatcagaccacttttactctggtattctaacaggaaatgaaagcaggaaagagattagtatgtaactgcaaccactaaattgcaagttcataaggaaatattttaatttacttgktatgaaatgggaatttgttatcctcttctggaactatcatgaaactcaagtcactttcaagaaaaatgttagcattttggtttatctaccatttcaccctgcgcccagcattgttatatcactcaccttagatgtcaacacttagattcccaatgctgcaggcgatagctaattttattttgctcattccagaaagaaacaaaccacttctagattgtataaattcacttcactttttaaacatttgtaatttgtgcaattacattaatacttaaatctgaaaacacagacaaaattaaaatttaaagctccccaattactcttactctgagactaccacaattaaatttttcatgtcatcttccagctttatctcatgcaactatacacttgtacatcatatgtgaaccacgtgatagcaaatttcttaaaagttagtcttaaatgaaacagtatgtttaaatataccatgtctacggtttattaaaaattaagtatgcacacatttaaaagtccaccgaccaagtggtattctgaacactgtggaacatatattaagtttgccttatgataagcatctgtcatcagagctactccaacaaccttccatttcttaaacatatcttctgactcactgccttataaagtatacaatgatcaacaggttatagctactttctagtcaccatactcctctcttctcccaaaactagtatttccaagggtttgtgggggatagagatggtgtcacattagtagaggagttacttcagtcagttcttttaaaatttctgccttccccacttgtgatcatcctctttgatgcttctgccatccacacttctatttaggaggtcagcaaaaccattctgtgaaaagcactgctttaatgatagctggccttcaatatgctagaacaagaggtcatcatgaattaggtactaactattcctaaatattaaacactggtcaactaaaatgcacaaattcatgaattggatttgcactcaaacaaaaaaaaataccataggcagtatcatttctacctttgtaagaggcaggaatattcattagactctatgcttgac

SEQ ID NO: 703546 - DNA, 2045 bp, Homo sapiens
atgctcattaacatactaaatcacacccaccaatgccaagacagttccgggagcacccatactggtgtaaaaatgggtggcactaaagttgagaaattttcacctttttccagaaatcttcatgaatactccaccccttgattaaagaaacccatacagatagaagccaaaccctgtctggagtatgctcgcactcccctttcttragcatgtacttttcattttgcaataaatcttagtacatttcactattttccaactcatccttgaattcctactgaagacactgtcaagagcctgaccattgatcagagttgatgtcccactggcatttagggacctcccccagcccactggtatcagcccaaaagaaaaaatattaaatacctagtattgtcattacttaagttctcaaattgctacccaagttatatgaagcacctttctccacgtgatatacgctgtaggtcaaaacacaagacctcagtcatcacaaaagaaaaaccgatttagtagttttgcctttcccattcaatgaagacaaattttggcctaagggaagcatacacacagttttttctcttttctttttttaggctcctcctcttgtagggccatgtagggattttgagaaaagaattttgtctctgtgatattttataaacccaggctacttgatagagggacactataaaaaagatccatttccacagagtatgtatcttagaacatgaaacactttatcatgggttttttaaaaatctataataaagattttcatcaagtttggggaaatttctttaaggtactaatgatgcagatagtgtttttggacgttttagttcttcttgtaattgctatatggtataaaatctcatataaaatccaactgtcatatttaaataaaaattttaattaaaaattataatcaacacatctaaataactgtatgcatgtgcataaacccacatacacacaaatacacaaaaatttgacaactgtatcaactctacagaacaatgaatgtttacctgcaagactaacagcacctgaattaagagatagtaaacagaaaaaggcatacaatcctaaagcagtatctacaaattaaagggttgttgcaactttgttatagatttatttctagtctcatcttcaagattactaatatagcatgtaacactggaaggagaaaggaaactgaggttgaagtatgcaaataaaagatgaaataataagccactttaccctcaccacttcagtttactttgaaactcattaattcagtagacatttggactgagtaccagtgttttggtaagaaaagggctctaaaattctttccactcaaatattctatgatcatcatttactaatatcacatgattaatgggattcgcacttctagagttcctaaaagcaaaaccagtgtttacaaatacttatgatgcacactgagtaacaggtataggagaaatgaataacccagctttcagttgccattggaagcctgggacctgcatgaaaataatttttgagaaagatttcctgacattaatttgtgcttcaggcatggaaattaacagctactggatcctaaaacatatgagttaaggaaaacactgtcactttatgcaaagctggaaaatacagtgttctctacagatatcaaacatttttaaacaaaattcaatctcctggactgtcagtttagctacaggttaaaacagtgttgaggagaagatggaagcacatttaaactttaatatctttactcagaaaactgaacaatttaaagtactagcaatatggaggttaatcttcaaatctgaagtacagggcatttagtaatactgttacaatgatcgtctcttcaaaccagcagtagggcttgcaagactttcccagtacaatgttagaaatgcctatgtttagtttcacttagtccaattaactggcctcctctactacagacatcatttttctagaaaccttttttttcaacatgatactcctacatactttttaattgaactgttctacag

SEQ ID NO: 703547 - DNA, 1455 bp, Homo sapiens
tccttattattcatcatggataactggtcctaacaggacttacaaggtctctcaagtcacttcctgcttgcttagatttaaatcacaaagcttaagatttttacgagaggcaaatacaggtaacattagattggctcccaaaagcatatcctgaaatgtgtcttgcaaaaacaggcaacaagagaatatatgaagctggcaaagcttactcttttcagcaattaaacttactttataatctagtttatcactgaaattatacattctctagattcttcacacctatagagccaactactcagaggtgtgaactagcaaaaaaaattatttggagtaargcttgtttcctatacagcatttattgtgcagactatacagttttccctgtaacagtgtttcatattcaatattcatttacagggcataaattaactgttaacattacagcaaatatctaacaatccattagtactacaataacatgtacatttacctcatttcagtctaaccacaaaatatgtcaattttttgaaaacacagggagaagttttctgaatattgtggcattaatctagttctaacaaaatatgcactttatgctgtgtgcgcatatatacatacagttcagccatcaaaattacagatagggtttggcatattgtggaaaaactgggtaaagctgacaaaataaaataggcaagttggagcctaaaaacaaaacaaaaaacttctctttgtttacagttgatccttggtataatctaaagacttcccctcaagccattagtccttagtgtcattcatgaattactccaatggcacagaagtggcatgaacgtaactgctggagaggctggaggctgcaatattttaccccagacctaaggctttaaatgtcccataaagacttcaatgacaacagaatagaaaagtagaaaagtatttgggaataaattagcaaaaacagcaggttagcacccccctttttagatcactgattatttctataattgtatccacagtcctaatgctattagcctttcattttaccatgcagatgtgacaggagaaaagacaaaaaaataattcccactgcacctctcttttgagggagaggatggtggtgggactgggaaaagcctaggtggtgggactgggtagagcggtggtgggactgctcttgcccacctatgtatgctcttacaatctggtcctattcgttcttgcttccctctattcacaaaggcagctcctgacttaaggggctattcctacccctaaatactccctcaatactccctgagtatttctactcagttctcagcctcatcatctcctaccagggtcacacaccaccaatcttcaggtctccttcatttaagctctgctactaagctgaccactgcatctgtttcagtaaattcaacttagagtggtgatattaacttttgagac

SEQ ID NO: 703548 - DNA, 1455 bp, Homo sapiens
tccttattattcatcatggataactggtcctaacaggacttacaaggtctctcaagtcacttcctgcttgcttagatttaaatcacaaagcttaagatttttacgagaggcaaatacaggtaacattagattggctcccaaaagcatatcctgaaatgtgtcttgcaaaaacaggcaacaagagaatatatgaagctggcaaagcttactcttttcagcaattaaacttactttataatctagtttatcactgaaattatacattctctagattcttcacacctatagagccaactactcagaggtgtgaactagcaaaaaaaattatttggagtaaggcttgtttcctatacagcatttattgtgcagactatacagttttccctgtaacagtgtttcatattcaatattcatttacagggcataaattaactgttaacattacagcaaatatctaacaatccattagtactacaataacatgtacatttacctcatttcagtctaaccacaaaatatgtcaattttttgaaaacacagggagaagttttctgaatattgtggcattaatctagttctaacaaaatatgcactttatgctgtgtgcgcatatatacatacagttcagccatcaaaattacagatagggtttggcatattgtggaaaaactgggtaaagctgacaaaataaaataggcaagttggagcctaaaaacaaaacaaaaaacttctctttgtttacagttgatccttggtataatctaaagacttcccctcaagccattagtccttagtgtcattcatgaattactccaatggcacagaagtggcatgaacgtaactgctggagaggctggaggctgcaatattttaccccagacctaaggctttaaatgtcccataaagacttcaatgacaacagaatagaaaagtagaaaagtatttgggaataaattagcaaaaacagcaggttagcacccccctttttagatcactgattatttctataattgtatccacagtcctaatgctattagcctttcattttaccatgcagatgtgacaggagaaaagacaaaaaaataattcccactgcacctctcttttgagggagaggatggtggtgggactgggaaaagcctaggtggtgggactgggtagagcrgtggtgggactgctcttgcccacctatgtatgctcttacaatctggtcctattcgttcttgcttccctctattcacaaaggcagctcctgacttaaggggctattcctacccctaaatactccctcaatactccctgagtatttctactcagttctcagcctcatcatctcctaccagggtcacacaccaccaatcttcaggtctccttcatttaagctctgctactaagctgaccactgcatctgtttcagtaaattcaacttagagtggtgatattaacttttgagac

SEQ ID NO: 703549 - DNA, 1862 bp, Homo sapiens
cccatcttcccattaaccttctttttttaaaagagaatgtgaaaccaattcaatactttctagaatgcagtcagataagagtgtgtatctacagaaatgattaatcagggtacttaaataaaacttactttgcggacagttcgtgaggccagaatttctccagatactgggaggtggctggtggtcagtcaaagattttgtgtgcgagacagcatgttcttttctttacctctcttcagctcagaggcgtctgtactactgaaataggacctcagaaaaagacatgacctaagatgaaggggtatgtacttcttctcttttccaagtgggtattctgtaaggagaaaagacagagctcaaaggagtgtactgtacatgtctcctctgccctctgctgccccatggtttcatctcagctctctttaaaattggacatctgttcccttgaaacctgagttctgatatttctaccttctcccatcaggtactgctgctcagaaagactatttgttttcatctgaatatgtgaaacctgcacatcagctgtacacaggggccgcctattaaattaatattcaacagtgctttggactaatacatatttttacatactataggctggtgaattcactcaaagaatgagtagttaatcacatgagttataaggctacacagcatcctgtcctttggatagctttatggttatgtatttgtgactatttgattgacatctgtgtgccccattaccctgtacgctccatgagttggggaggctttgttttttcatcatggtatccttagcatttaacacagtgttctacccacactggtactcgatgaatatttgctgaatgaatgaaagcatgaataaagatttgcttttctttttgagaacagataactaacttatacagagaagtcatttcctaggttttttgtttgtttttttattttggagataaagtatatcactctgtcacccaggctggagtacagtggcacaatcctggctcattgcagcctctaactcctgagcttaagcaagatcctcctgcgtcagcctcccaagtagctgggattataggcatgagccattgcgcccagccctaggttttgttttgaggatataaatccacttttcaaaaatctcgtggatgactggagatgtagccaaacaaaaagaaattgcttttaagcagggcatttgtaaacagtgggtacataactttcttagctaattcatatgtattgtagttaagcagaaattaaaagttgaggtggaaaacacagaggttatgcacacagatttccatttggtttggagtttcccagcataactgatagaaactccctttcatgggtcaattaaaacttgagccatcttgatctggccagagcaaatatgcttccaggaatttttcaccctgtgttggctttccttaagcaaaatgacggaattggatttatgcatctctaacatccagattaagaagccttagaattagaaaaaacaaagaaccagagactttgtttagaggtaatttgattaaatctcctcactttacagaggaggaaacataagcccgaggattaagtgacttggatcagtatactttatttatccataatctgaggcgttgagaaaaatgtaatcaccatgtcttgttaataaaaatctccagctctccacctgaatacataaatgttatctcttaaatttaaaaaaaaataaattttaaagagaaaaatctttctaaacttaaattgtaatacctgattttaaaggtaaaaattaaatattgctttcraatggaaacgtaattttaatttgtttggattaaacaattcaaatatcaccttgg

SEQ ID NO: 703550 - DNA, 604 bp, Homo sapiens
ggaagctgcaacttatagaggttaagcatcttgtccaagcccacacagctgataaatgaaggagtcaggttttgaacataagaaatctgagcccacacccagtgctgtctgaatcacgctgtctgatataattaccagattccattctcagcacctttgaaacaatacattcgcactctcaaaggccatcgatgcgaaattccttattttcccttrtgagtgcctcaggtctaagatctaacatcttctcaagggataaagagaacacaaaattatggcttcttaccaaaatatattttcccagctctatcagtcacagtcttagccaaaaactgatgacatgctccaagggagaaaccaaagagagtttcacaaaaaaaatactacttacagatgtgtggacggaggtaagggagccactgagggatggtgaagacccagcgcctagaaacagcaagacgcctttaccacgcccaggcatgaggaagacaggcaagaagcagtgttagagaccctggacggagctggaaccgctaagctaccaaacaggaaacgcagcctgctgcaggcagaattcctgagaatgtccccaggagtccaaacc

SEQ ID NO: 703551 - DNA, 604 bp, Homo sapiens
ggaagctgcaacttatagaggttaagcatcttgtccaagcccacacagctgataaatgaaggagtcaggttttgaacataagaaatctgagcccacacccagtgctgtctgaatcacgctgtctgatataattaccagattccattctcagcacctttgaaacaatacattcgcactctcaaaggccatcgatgcgaaattccttattttcccttgtgagtgcctcaggtctaagatctaacatcttctcaagggataaagagaacacaaaattatggcttcttaccaaaatatattttcccagctctatcagtcacagtcttagccaaaaactgatgacatgctccaagggagaaaccaaagagagtttcacaaaaaaaatactacttacagatgtgtggacggaggtaarggagccactgagggatggtgaagacccagcgcctagaaacagcaagacgcctttaccacgcccaggcatgaggaagacaggcaagaagcagtgttagagaccctggacggagctggaaccgctaagctaccaaacaggaaacgcagcctgctgcaggcagaattcctgagaatgtccccaggagtccaaacc

SEQ ID NO: 703552 - DNA, 1694 bp, Homo sapiens
gatacaatttaattgagtttgtgcatattagaacatgaaacattaaaagtattgatttttgtgaaattttaatagtactccttccctgcccccacatttgtttccgtagtcctatgtacaagcatccatatagcaatctgaagacacagtatactggtcaggctcacagaatctggagccaaaaacacaacgtgtgtgattgtgagtaaatttaatatttctctgcctcagtttcctcaactgtgtaaactaaggctactcacaatacttacttcatagaattaggaagactacatgttaaaataatattatccacctcatggaactctgaaaattgaagcacttataagagtatctcagagttattaagccaccaataaatgctagctattactgtcacttcaacatcgtaataaccactactatcgagttttggaattcctgggaagaacaggcctgtgttttattccatttttctaccttttctgttgagcacagtgactgtcaaatagtatgaattcaggaattatttttagtttataaattgtatgtgtttgtctctaccaacagtgtttatttagatggatggaattttggttggggagctctatccatgtgccttggttctcagtagcagtagagatgatgtaaattgcctttggatctacaaatattgcctactcaaagactcctggaatatgccctctcagcaagttgaatttttctgttgccacttgcttttcccccagactatatgtttaattgataatgatttcatggctattgtcttcaggtgcaatggcttacctaagaggagagatgccacctcattacaaaatagaatacctccttcttcactgccctgggctgccctcagtcttccccaggggccccaagtctacaacagtaaactcttccatgttcaggtgctcaaaggctataaaaccttcacatttccctgataagcatgaatatagataactccttaatgtcttgaatatgctatatggattagtccctaagaaaacaacactaggtacctattttccaaacacgcaagttcagaatcagtaaaggaaaccaggggactctccatgaagtaaacgtttttattttataatccatagtatacaacaagcccaaaacttaaaaacagaacttttaaagcttacatcccactaatattcaattatatttaaatttagaataccactaaaactctctctctttcatacctgaattcatggatcatactttgttctaaaccatgagatactaacagtgctcatagactatacaaaactgttaacttagataattctttgaaattccagtcatgaattcttaaaagaatgcatggcttgcaaacttaacttaaaaaaagatcctcctagttttaaggactgagagatttattagtcgactaagcttgtctactcagtagaaaagagaaaacataggggaaaaagttggagcaatgctggattcaaggagcagaaaatgcccatcctaacctcctcccaccaccaaaatcactgcagcaagtygtaaatgatgtatgaaatgacaaatccctgcccagtgcacaagaagaatataaatactgctctgtaatcactgcagtggtgtgctattcgctaaaattttcagcttaggtgaacccagaaaaacctcacctcatctataaatccaaa

SEQ ID NO: 703553 - DNA, 1206 bp, Homo sapiens
tgtgtcatggtttaaaatgttgtttcagtttgcagcaaaggagaaacgtaacttctaatttacagaaaataaatcctcaaatcatattatctttatatatttagttttaaaaataaacagaaaaaatgtattttttctgtaattttcatattagacttaacatttttacttttaaaccctaatcttcttgttgatttttttttctgatatatctctaggtgtacacatgtagccacagctatagtgaagacaagaaaatccaagagtggttatgtattttgtcattttcagactgccttcttcaccaaatttgatatcattaaaaatttggggacagtttagcaaacacattttgtcatttacaattaaagtcatttcctttaaaataaatattcaattttttaaaattctgaactgtcacactatatatagtgcctcttgcctaaatatcagatcattctttgcctcacaagcttttggacaggttgttggaagaatgtcacaacttggaggtgttaaagtcactattgcattactgatattgaatcaggtttttaagttagccatctttatataaattgtctcccttcttctttcggaagacgtaaaagtatattttccctagctagtgaggtgcaaggaaacactaatgttatacctgccaaatagttgttttcaaagcctataagacattttccacaagtgtctttttgtttctgtttctttttcctaattccacaaaaagtctctgtgtctgctacctaattctatcacactgatctcttctgcaggcatagtcattggttcttccctttattcttatggcaggcaacccttygatgttactcattcattcccccatatatatatccattcatcaaactcttttcaagttaggtcctggggatactgtggtaaactggacagacatgtttcatattctcagagcacatacagtctagagggattttgtacactggagacttaaagcagacttggcttagacaaggagtcagaagaagcttccaggcagaaatgattttaagttaagatctgtggtggtgagaaagttctcttctggttcactatggagggtagaggggagggaaagatgatggtgtcatggtgcaagatgaagctggagaagaaaccatggccagaacacatgtatatattattgcaccttagattttctcctgcaagcaa

SEQ ID NO: 703554 - DNA, 1206 bp, Homo sapiens
tgtgtcatggtttaaaatgttgtttcagtttgcagcaaaggagaaacgtaacttctaatttacagaaaataaatcctcaaatcatattatctttatatatttagttttaaaaataaacagaaaaaatgtattttttctgtaattttcatattagacttaacatttttacttttaaaccctaatcttcttgttgatttttttttctgatatatctctaggtgtacacatgtagccacagctatagtgaagacaagaaaatccaagagtggttatgtattttgtcattttcagactgccttcttcaccaaatttgatatcattaaaaatttggggacagtttagcaaacacattttgtcatttacaattaaagtcatttcctttaaaataaatattcaattttttaaaattctgaactgtcacactatatatagtgcctcttgcctaaatatcagatcattctttgcctcacaagcttttggacaggttgttggaagaatgtcacaacttggaggtgttaaagtcactattgcattactgatattgaatcaggtttttaagttagccatctttatataaattgtctcccttcttctttcggaagacgtaaaagtatattttccctagctagtgaggtgcaaggaaacactaatgttatacctgccaaatagttgttttcaaagcctataagacattttccacaagtgtctttttgtttctgtttctttttcctaattccacaaaaagtctctgtgtctgctacctaattctatcacactgatctcttctgcaggcatagtcattggttcttccctttattcttatggcaggcaaccctttgatgttactcattcattcccccatatatatatccattcatsaaactcttttcaagttaggtcctggggatactgtggtaaactggacagacatgtttcatattctcagagcacatacagtctagagggattttgtacactggagacttaaagcagacttggcttagacaaggagtcagaagaagcttccaggcagaaatgattttaagttaagatctgtggtggtgagaaagttctcttctggttcactatggagggtagaggggagggaaagatgatggtgtcatggtgcaagatgaagctggagaagaaaccatggccagaacacatgtatatattattgcaccttagattttctcctgcaagcaa

SEQ ID NO: 703555 - DNA, 607 bp, Homo sapiens
tttgatccctgatgtcaattaaggccatgaaagtttgtcaattggcacatgtcagcagatgttaaggttaatttaaaaccatattgtagaggtacaaaaaccaattggcatcctttttatctattttagtttttgtttccttcccttctgtcaaagtttttgttctgttttattcgaatggttactggatatactttgcaagagagggagggtccttcctaccctactcacatttacaaatgtcttcctccagagagtcccaaattagtgtcatcagagttatgggctttcctcatggcaattattgctttcctgggtttagggaccctaaccttaarttgggtttgaattaactccttgtcatgttgacaagttgcagcacttgattaaacccagtctttgtcagtccattttacaatttcatagttgttcaacagggcaatggtgtcttcaggcctctcaaaggcacagagtgaagcatttggagctacttttcataagagtctgtgccaagggtgcattcccttaaaaccctgaggattatgacatttttaaatgacagagacataggtagcaacagcggaaccagcattttgtagagtcctca

SEQ ID NO: 703556 - DNA, 641 bp, Homo sapiens
taatgaatgcaagagtttggttctgaacaygttaagtttgaggcttctagctgccttctcaggctcttttggtgactgtcctgacatctccaattcaacacatccaagatggaactacttgtcttctcaaacctgccttacttaattattttttccatttcagttgatggcaactgcatctttccagtgtctcagacccaaaaccttagagtcaactttgaattctccctccttccttccctcctggccttcctttctacctttcctcttcttctctccccaccactttgctctctctttctctgtctgtaagtacttgtggaatgttgaacattgggcctgactcttctaaagcactaatgtctttgattaggataatacgaactcatgtgggaagcttaagctgactattaatttgttacccctttaaatgaatacttaagcaagaaatatttaggctatgcttatttagaggggaggctgagtcttgtagggtggtatttgggaaggatgaaaaagaaggagtggggctcaaactttcctttcttatttaaggcaatttaactctgactctacatgtatctgaaacaatccacaaacgaagctctgcagtcacagtcaccttcccttgagcagggctg

SEQ ID NO: 703557 - DNA, 641 bp, Homo sapiens
taatgaatgcaagagtttggttctgaacacgttaagtttgaggcttctagctgccttctcaggctcttttggtgactgtcctgacatctccaattcaacacatccaagatggaactacttgtcttctcaaacctgccttacttaattattttttccatttcagttgatggcaactgcatctttccagtgtctcagacccaaaaccttagagtcaactttgaattctccctccttccttccctcctggccttcctttctacctttcctcttcttctctccccmccactttgctctctctttctctgtctgtaagtacttgtggaatgttgaacattgggcctgactcttctaaagcactaatgtctttgattaggataatacgaactcatgtgggaagcttaagctgactattaatttgttacccctttaaatgaatacttaagcaagaaatatttaggctatgcttatttagaggggaggctgagtcttgtagggtggtatttgggaaggatgaaaaagaaggagtggggctcaaactttcctttcttatttaaggcaatttaactctgactctacatgtatctgaaacaatccacaaacgaagctctgcagtcacagtcaccttcccttgagcagggctg

SEQ ID NO: 703558 - DNA, 641 bp, Homo sapiens
taatgaatgcaagagtttggttctgaacacgttaagtttgaggcttctagctgccttctcaggctcttttggtgactgtcctgacatctccaattcaacacatccaagatggaactacttgtcttctcaaacctgccttacttaattattttttccatttcagttgatggcaactgcatctttccagtgtctcagacccaaaaccttagagtcaactttgaattctccctccttccttccctcctggccttcctttctacctttcctcttcttctctccccaccactttgctctctctttctctgtctgtaagtacttgtggaatgttgaacattgggcctgactcttctaaagcactaatgtctttgattaggataatacgaactcatgtgggaagcttaagctgactattaatttgttacccctttaaatgaatacttaagcaagaaatrtttaggctatgcttatttagaggggaggctgagtcttgtagggtggtatttgggaaggatgaaaaagaaggagtggggctcaaactttcctttcttatttaaggcaatttaactctgactctacatgtatctgaaacaatccacaaacgaagctctgcagtcacagtcaccttcccttgagcagggctg

SEQ ID NO: 703559 - DNA, 717 bp, Homo sapiens
ttaaaatgtccttcaactggccctgtgacttcctgaaggaatcggtaggtctgtgttatcctgtttgacattacccatgaaaaaataagtcaatgttttccccacttcaaattgagacatttagtaatgccacaaaatttaggcatttagtgaagatttttttggtctatgttttgagaaaastttcaatatttcaacagttaaaataaacaactaattctgagctatttaacctgagtcttaatttccagattgtcctcatgacttttggaaagtcatcttctgttagggattcctgcacatggagtgatcagatttcactatcttgagatatatccacttgagatatatcctctaatccatggacagaaaattgggctctctacttgagcttaagtacagagaaatggaaggactaatattaaaacgtgactaataaagtagaatgaaaattctttatgagtctaatctaaatgtctccttttgactaaaatatttgagtacatctcatctgttcttttttcaaattgaatcaggtgtattatactacttttttaaaaaaacttttattttagattctggggtacttgtgtaggtctgttatatagataaacttgtgccatggggctttgatatacagattatttcatcacccaggtactaagcccagtactcaacagttattttttctgttcttcttcctcctcccaccctcca

SEQ ID NO: 703560 - DNA, 995 bp, Homo sapiens
aaaaaccatttttagaggtctttgctacttattgtatctttccttccaaagtgtgtgtttttttttttaacagatacagcactgacacctgaaatacgggtacagccttattcctgaagagttttgttttggtagtggctgctgctactgcccttttcctgcccattgtctttgtgtgtgatttttactaaaccaaacatcagtgcaccatgaaaaatatatagctgtgaaataaaattgtaaatatttttattttacctattagatcttgagcccccgtttgtacagtttttgcacattagcaggtgccttcatgtttgaacaggcatctcttatgaaatgctgattacaatgtgatagttgctgttctgggcagaagttcctgctgagttacggtaattgctcagggtgttaacagcaataaaagctgaagcttctgttgtcagtattggtctaatacaacacattaaagctatctacaaaaatatgtgggaagtagggtgcagtatgtttagatgcctttttctaaatcacacactgctgtttctcatgtttttgtttgaggttctgtattcggcacatcctcatagttgtgtaagaacaacagatgatgaaatatttgctctgggaataaatatagttatttccactgtcttattttcttacttctctgtacttattaaaagataatcaaatagatgagaatgatcaagayttttttctccttcagtttactgaagctataagggaaaaacatgagcaggaggaaataagctttgtttctctgtgagattttaaaaagaagaagaaattgaatttgattttgctcacagcaaataacatgactagtggagcaatgaaagaaacaaaaacccaatagctttgaaatgttgagtaattaggtattttatctttttaataatcacaaaataaaaagttggtttggggttataactgagagacgtgtttcattgtttatactataaatgagaatc

SEQ ID NO: 703561 - DNA, 1663 bp, Homo sapiens
acaccaccatcctacactagtaggtgtatttcgagcccatgcttccacagggtaggtggaggctatgatagtatcaagcagttaagttcctaactgagctgaggttttaaaagtaggaattatgtattctgttaggaagctttcattctcttaggaagtattcatttgattgggcttatttacaaacggagatgtctgattttgtttgaatgcgctgaccaaagtatttatggaacaagtagtcaaaagcaggagctcaggcgagcagaagaggcagggtagaattatggacagtgcatacttagaagcaggagaaagaagtattgttgattaaaaaggtcgcttcgcaccgtagatttctgaactaattagtaaaatagctggcaaagtctttatttagctttttgaaggtctagtaattcggaatgacagtctgtgatccttgtggcctggcatgaaaagattaattgagccaaatttcatttttagaatttagagttgagaaactgagagactgaggcagttagtagaggggaaaggtgaatggataattcaagaattatccctaatatgtctgtagaaattaaaaataaaaaaagaattacctgaatgacaagagcaaggttagggctgacataggcaagctcacttgctagggaaggaaactcggaaaagcagaggacagggaagctgtgggaagggcagcagactgccaagggaagtgmgtgcacagccgtctcttccttgactctcctgggtcccactgcactgatgttcttcccacaggattcttagattatcctgttcactctgagtagagagctctcatctgggctagcttgagtggatcttcatgaattgcaatggaaagagcctaggttaacatctccaacccttctgctgccctcccatagcttttagaggtcaccatgtgacttagttactttgagggttttgttctgaatgagtcaatatcattgaggagcattatatcacagagtgcaaataggaatgttttgggctataatcagggccttccacaggcatttactgaataccttctttgtgttctttatggaactcagcacttaaagagagactgaagaagtataaaatattgttcattccctcagtgatcttagttagattctaagtgacagacaacttgtggcattattggatgtcagtcttctttggagaacattctgaataggattgacaagaagggcattcgcttttagatctaaaagaaatgatttcttttgtgtgtttatgaaaaacaaatcatatttttatggaaacccaggcattaagaagtataatacaaataatttgccatctggaaataatcatggagtctgagaatgctaacaaggtcatggagacagtaattttcattcagtataacactgaggagttccttgtatagtaagtagttccttgtagcagttactacctttctttattcacagataagtaagcaaactcactcctgtaatattctccatggaaattcagtgtggattcttgcattgccgtcattcatacagtagaggaaaacatgcttttggtttcctaaagttacataggtgtttcagctgttacttataccaaatgagtttctaggtagtatatgtagctataagtactattttgggttaat

SEQ ID NO: 703562 - DNA, 904 bp, Homo sapiens
cagctgattttctcatctcaggaacaatgggaatcagaagaggtaacaggagtttgaagttctttatgaactctctactctcaaaataattgtcaatgaatttgtgttttgaataattttgggttacttttcaactccatttattagatttttgtaaagtatttacatacttccagttcatatccatagatctgtatctttacatattgatttttgactcacttggtctgtgcacctgccacaccctcagatccatcactgccctgtcattcacacaatgtaggcaacattacttaacactgaaatctgaatttcttattcataggaatatagtttcttcaactaatcggtacccattgaattagtaaaaacatgcccatccttcatattctcactattaagatattacagtcctagaaactcactttaaaaaatagctctcattatcttaagttatatgaatggtttggatgtactagaatatttraagcacgtcagctacttcttgaacagttattttagattgtttttttcctgacaaaggaagaccaaggccctgagagaaaacctcctccccggcctcctgtgcacctgctctggggctggaacttgtgcttggtggctcccaagtgccccctccagccgagcccttgccttgccatgaggtttctgttgtagctcacaggcattttaccccacagtctctagctcagcatgaagtgggtgtgtcctggtttagaatactccttcagtaacacaatgtactgaatactccttcagtgacacaatgtactgctgacaccatgtcttttaagaattgaagagccttattaaacctatttaactctacagggagacccaaagcaaatattctgtgacacagagtggaacaccttctctgaaa

SEQ ID NO: 703563 - DNA, 2264 bp, Homo sapiens
tatgcattatacaaaatagtctggtgctaaaaatgttttgccaggataggtcttatcattcccatttgtttagacctctttgttcagagccctacttagccaagtaaagaaatgatggaacgtgcataataatggttgtgaaaatattaaaacaagcccccaataagctgctcagtcaaaaggttggaaaaggatgatcagaaaatatgctgctttctgccaaaggaagtttaaaacatctcatctcatttcctccctcccccaagaacctaagaggtagaaagagtgaaaaagtggaagtcagacagagccacaccaggaaagaaaggaaagggagaaaaagagggaacaggggaagagctgggagagagacaaggaattctgagtgtagaaaagtgacagaacctggaagaagaaagtgtagacataaccaaggcaaaggctatttttttcagtcatcaagactatgagacataaccaatttctttgcctttttgggtaatctcaacatttacatctactgtttcttgcagagtctagcatagtattaatacttaatcttgggatgggtgctaaaacaaacaaacaaaaggacttgaaatatcaatctatggcccatcttttctgtgtttggtgggagggcagcccttctacaggaaaaaatcttacaacctcctgctctctttctctgggtttccaaataaaaacacccccaaaaatctcagcttcccttattctttgtaaattatataataaacagaatctcatttgaaattttgttcgttgtctactgatgatgtatttatacctgaatttatattaatctgtttttactttagctatgagtttcttcaagaaacaaaactgacaacagattgtaagcaaaaaactggtccaaatttgcaaatgtttgtccaaccttctcataccatccaaaagtgtctaacattgaaattccaacttcagtgaattctattaatgcatattttaattaatgcaaactgtgaggtctagcaatgtagtggaaacataccctttaaaaagagaaatagctccagaaggatatatggatttaactcacatccataatttttaaggagcttattcctaataaatataggaatgtcatattatctgaaaattctggtaacttagttagtgattatatgaaaactgtagagtgtatcatgccagtaaaaataaattaacaaacatcaaaccattgaaggaaatatattattgaatgtgtcttgcagagtattgcctatatagtgttttaatagaatcatttctcatatttttaattcaaactctcatctgaaattcaccaaaagatttgtaaataatagtgtattattttcaaaagtaatttcattccagcacatgtgtggatgttactaagggcccatgcacaataccttatagtaaaagttagtcaaaggatataaaaacgaggtggaaatctaaaaataaaaaggttttcaactgaaataagggcaagcaggataggcgacattatgttgcagttacaaacactgctccccacaaaatgtcagcagcttyacagaacagagatttatttttcactcaaaacttgctgtaggtcaggatgaccctccagagcttcactctgacactgaggacactcggtgaagcaattcactgatccacatggacagagcctccagtccctacaatcatgccgtcaggaacacatgatttcctgattcaatagaaccaagaggcggatggagagtcaaaccaacaactgtgtgcctccacccaattcacgtctgctcacatatcactggccaaagcaaattccatggctatgtctttagggataaaggaaacttaatcttctgcgttactagagaggagaccagatacattggctaataagaacaacatctacatcccaaggagacaaagcaagttgtgggggtggaacttgatttttctaattatgtatgggatgactcttttgccaggaaccatgttatttatgcaaaacctgctaagtagggctgcaatgtagaggagagggaaccagctgcaatcttacaccaattctgatgtgcccccagaatgctcccctgtctccaccctactccccctcacactcccgtctcatctccactttcatttaagatattcaccatcttacataatcctcctaaactggattagatactctcctcttatgtgatatcaggagttactcttatctatcagggtattcaaataaaaaccaaatgtcttga

SEQ ID NO: 703564 - DNA, 637 bp, Homo sapiens
aattcttggccctgctgcagaaggggcaggaaatctaagtgatgtctgttcagaatgctataacaaaatactttagactgagtaatttataaacaacagaaatttgttggtcagagttctgaagggtgggaaatctaagatcaagaagccagcagatttagtgtctggtgagggctcacattctgtttccaagatggtacctttttgatacattctcacatggcagaaggggcaaacacacactttcaggcgtcttttatatgagcgctaatcttattcatgaggacagtctccctaatctaatcaactcccaaaggctataccttaatattatcatctgatgattaggtttcaatgtattacttttcagggcaaagattatagaactctgtggcagagaaggccaccatgttgtgccttcccttcaatgtactgatggaaatgtgcaaatcttagggttaggtgattgagattcaagatacccaccttctatgtcactgtgtgacctcaggcaaaccacataggcacatagcctatgggcttctrtttcctcatctggaaatgggtgacctctaaatgcagcatctaagcatctaactcaggggatttttaataagaataaattgaggccaagaat

SEQ ID NO: 703565 - DNA, 1198 bp, Homo sapiens
attctagtcttccctgatttctaaaaggtcctgataccaaacatgaacctgcattttcatccatctttgcaaccagtattgatagagtggctactgtgacttgcactaagctgggtgggcatgctttaggcacccagggaagcaaggcatggtctctcacctcaaggagcccacccacttccaggagaaacaggtctgtccacttgaaactgccctggtgtgatgcatggcttgctggaggcatggagaagtgggaaaattctaaggtgattcgagttgggacctactcagagaatggttcatataaggaagaataagtaccccgatatgggtggataatttctcacaagagacatgacttgagcaaagatacacaaacataaaaagtaggtaagtgcaaacataagactcggatatgaggtgtagctagtggagaagcagggatgaaatgggaaagggaggtggagaacctgtagaccagtggtcctcgacactagctcccattagactcgctaagggcactcctaaaaactacagatgcctgcaccctggcacagatcagttaactctgaatctctggaggtagattctaatgagcagccagggttagggatcactgctgtttccttagaaaattatgtcaatatttctaaggggcatgcactgctatagtagcatcacaattttgggaagagttgtcctgaacaattaatttgaaaaagccccccttgcccaagatgattttaatttgactaagtttatgtgatggaggacatctagtcagtcgtctggagttttacaacacctggatatgaagtgatggactggtcatgtctaggggaccagatgaaaatttcaccttccytctaaatcatctggcactatttgggggtggaggcactgacctgtcttgtgaagagcagggttatggttcggccgtgaccttggcagtcgccatcacaactttggttttgcttcagtcagttgccacctcttgggactgtaaatattgacactcccctttagagaaatcaatatctgcatattagcctccaatttcatatatcgatgtgcagatctgagggcctcgggtgaatatgagatgacttcagcatttgctgcctctgagctgaaaagccagcggatttgcatttcccccagtgattcttggctgcatgacttgtatcactattatctc

SEQ ID NO: 703566 - DNA, 676 bp, Homo sapiens
aagttttatcattttactttatctgcttctatcacaacctgcagagggtgcaagaaggtttcattttctacaatttatagagaatgttctagaccgtggcctgaggaacacagagatctctgccagccctctttattgatttcttgggggctaggctcaatgtgaaacaaaaatgatccacagatttctcaagacacatgaactgtaagagtggttctgagttggtgcttattatatgttactagtcattgagtaacatatttttcaatgtttaattctttttgaattaccctgtatgtattggctaaaaactataagtattcagtaatgcttttgaattaatttgcattttcctaatcatcaaaacatctaaacatgccataaaacagacacacatgtatttcatgccacaataatgggtcactttataagatggcatgcctttttatatttacctcaatttggacctcagaacaaccctgtaagatagatatctcatctyattttatagatgaggaaactgaggctcagaaagatcaagtcacttgaccaaggccttgcaaagagcagcttgtagaactgggattccatctcaggcctggctaaatccgtagccttggctgtcagtcctaaatcatgttgccttctctaataaggaaaaagctctactaaaaaa

SEQ ID NO: 703567 - DNA, 579 bp, Homo sapiens
ccaaayaacgtttctaattcagaaaaaaatataacacatatttggaagctggaaaacattattttaaaatatgaatacacagtagactcaagtaggtttagggatttaatattagtgtatctatgtgataaaattactggatattggaatctgaagaagtacaattatggttcaagtaccatgctcatctgtcactgacacacacacacaaacaaattagcatgaatgcttgctttgctcagacaattaactctctagaagttcagggtttgctgtggaatgctccctgttttccattttcactatggtgaaagctatggaaactcaatccatgtaatttaatccaagctgtacataaagtaacttataagtaaaaactgaagatactacctttagtgtcaaaaatattttaatcccagtaatataatctgcctgcttctaaaaactgggatataaaacaatagattaatcaggcagtcacaaggggaaacaggctcatcctactggagcaaaaaattattcacaaataggaaagaaagaatctaaggtatcagagggccggttaggattaagaccaca

SEQ ID NO: 703568 - DNA, 579 bp, Homo sapiens
ccaaataacgtttctaattcagaaaaaaatataacacrtatttggaagctggaaaacattattttaaaatatgaatacacagtagactcaagtaggtttagggatttaatattagtgtatctatgtgataaaattactggatattggaatctgaagaagtacaattatggttcaagtaccatgctcatctgtcactgacacacacacacaaacaaattagcatgaatgcttgctttgctcagacaattaactctctagaagttcagggtttgctgtggaatgctccctgttttccattttcactatggtgaaagctatggaaactcaatccatgtaatttaatccaagctgtacataaagtaacttataagtaaaaactgaagatactacctttagtgtcaaaaatattttaatcccagtaatataatctgcctgcttctaaaaactgggatataaaacaatagattaatcaggcagtcacaaggggaaacaggctcatcctactggagcaaaaaattattcacaaataggaaagaaagaatctaaggtatcagagggccggttaggattaagaccaca

SEQ ID NO: 703569 - DNA, 579 bp, Homo sapiens
ccaaataacgtttctaattcagaaaaaaatataacacatatttggaagctggaaaacattattttaaaatatgaatacacagtagactcaagtaggtttagggatttaatattagtgtatctatgtgataaaattactggatattggaatctgaagaagtacaattatggttcaagtaccatgctcatctgtcactgacmcacacacacaaacaaattagcatgaatgcttgctttgctcagacaattaactctctagaagttcagggtttgctgtggaatgctccctgttttccattttcactatggtgaaagctatggaaactcaatccatgtaatttaatccaagctgtacataaagtaacttataagtaaaaactgaagatactacctttagtgtcaaaaatattttaatcccagtaatataatctgcctgcttctaaaaactgggatataaaacaatagattaatcaggcagtcacaaggggaaacaggctcatcctactggagcaaaaaattattcacaaataggaaagaaagaatctaaggtatcagagggccggttaggattaagaccaca

SEQ ID NO: 703570 - DNA, 579 bp, Homo sapiens
ccaaataacgtttctaattcagaaaaaaatataacacatatttggaagctggaaaacattattttaaaatatgaatacacagtagactcaagtaggtttagggatttaatattagtgtatctatgtgataaaattactggatattggaatctgaagaagtacaattatggttcaagtaccatgctcatctgtcactgacacacacacacaaacaaattagcatgaatgcttgctttgctcagacaattaactctctagaagttcagggtttgctgtggaatgctccctgttttccattttcactatggtgaaagctatggaaactcaatccatgtaatttaatccaagctgtacataaagtaacttataagtaaaaactgaagatactacctttagtgtcaaaaatattttaatmccagtaatataatctgcctgcttctaaaaactgggatataaaacaatagattaatcaggcagtcacaaggggaaacaggctcatcctactggagcaaaaaattattcacaaataggaaagaaagaatctaaggtatcagagggccggttaggattaagaccaca

SEQ ID NO: 703571 - DNA, 1041 bp, Homo sapiens
cacataattaataagtcaccaaattctcaaaaaattacctattttgaaaaaaatgtattattttcatctccagcttgattgcaactgcagtaggtaagcccttgaagatctattgtccagactaacacaataacctgtaatgggtctctgtaaccctaacttggactcttacctccatcttctatactgctataagagagatgtatttaaaaatgtacatctgcatttgacactcccctggtaaaatgtttcctgtcatttatcttctcccaagggatacaatttatacataatacaatttacaagcttcctattatgatggcttacaagactgtccttgataagatccttaaatatcccttttgcctcaattccttactttacactttatattccagtaacatcaaattgctggaagtccccctgatcttatcaggctgtttcattcctctgtgactttgtgcatgctgctttctctgccagtaagtcttttttttctctgattgactactttcccctcagacttcctgattttttttctttccagatttcttcagggacctcttcttggtggatcagatgataatttgttatgccgttgcatagttctaccaaacacagcacattggaataacaagatacagattcttagatacaggtatagtttagctccagttgccaatacctggcacaaagtaattgtacatgttgatctgaattcattcagaattaactataaaaaattactcacatgcgaattctattttggaggtatacacgagagatctctgtggcagttattatttttaatatttcttacttaccatattaattggatcaactggtccaatgctgtttacataaacatcagtttcaattacygtgggcctcactgcaaaatatcaacaaaaagaaaggtcaaagatatgattagacattgttttaaataaatcttagttttaaagaaatcttaataactacttatatattaacacttcaatcataaaacatcttttattatgaaatgcagaaatgtagcct

SEQ ID NO: 703572 - DNA, 847 bp, Homo sapiens
tgatttcttattaggctggctactgtcatatccagtggtaaygtcccgtacatgcaatatagcaaatgttccacaaaattttggatattcttttggagaatcaaaattacgaagcctttcaaatatacttttgatggtaggtggttcataacacaagaaataggaagtttttgaaatatgataaccatatctgtgcaaagattcaaagtgctaaaattagatttcagataactctttaaaaaagcatatattaaggaagatcagcctactatggtattttatacaaagtggcagtccttaattcacataattttaatactttttaaaaaaggatcaactattcttcagaaacaaatttagaaaactaagggtaggacaataaaagaaaaatctagcatgtgaaattcataatagtagaacttacttttcataaaccttaaccagttgctgtttcaatgttatattcatggtttccaggtaagatgccatctcagcaaccacaacagctgcactcaccccatctttatccaaaactgaagttccacagagaaaacctgaggattgaaaaccatcactagaaaagaggaaaacttaaggctataatttcaatagttttacatttcttcagaaggaccaggaaatttaaaagcctagtaatagatgaaactcatcaatactgagtgtatttaggggacactttcgttcttttttttttctgataagaaatgtatctacatatttctcattctctgtagtttttacaactcaaaatatgaaaccagaacacaaaaaactcctcctacagaattacattttaaaaattatcaatcaaattttgaagatttta

SEQ ID NO: 703573 - DNA, 612 bp, Homo sapiens
gccaaatttcaagtgctctctagccacatgcagctagtggctgctgaactggacggtatagatatggaacattttcrtcaccacagaaaattatatgggtcagcgctgctctcaaactacaatggtggaatgataggtattggggtggtgagtttcttccctgagacttctcaaatcaagctaagtattattggcttctttctctgcctcggtacaagattagctccagattacctgttactgccttcaacccccagcctttgaaaactcccttcctcctaagagtacatgcaccctgctcattttgtagtagcttaggactgaaagtctaatgggagagggcaaagggctctccagaggtcaccctatcttccactatactagtgactgagagcagaaatttctgaaccctaagaaaggtgacaagcatgacagagctgaggggagaaattctaaggcagttaggactgcatgtcattcctcaaacagcttggtggaggtggccgcctgcttctatcagcagggtagtatagcaaagcaattaagagcacaagccggccaagtgcagtggctcaggcctgtaatcccagccctttgggaggccaaggtagg

SEQ ID NO: 703574 - DNA, 612 bp, Homo sapiens
gccaaatttcaagtgctctctagccacatgcagctagtggctgctgaactggacggtatagatatggaacattttcatcaccacagaaaattatatgggtcagcgctgctctcaaactacaatggtggaatgatasgtattggggtggtgagtttcttccctgagacttctcaaatcaagctaagtattattggcttctttctctgcctcggtacaagattagctccagattacctgttactgccttcaacccccagcctttgaaaactcccttcctcctaagagtacatgcaccctgctcattttgtagtagcttaggactgaaagtctaatgggagagggcaaagggctctccagaggtcaccctatcttccactatactagtgactgagagcagaaatttctgaaccctaagaaaggtgacaagcatgacagagctgaggggagaaattctaaggcagttaggactgcatgtcattcctcaaacagcttggtggaggtggccgcctgcttctatcagcagggtagtatagcaaagcaattaagagcacaagccggccaagtgcagtggctcaggcctgtaatcccagccctttgggaggccaaggtagg

SEQ ID NO: 703575 - DNA, 612 bp, Homo sapiens
gccaaatttcaagtgctctctagccacatgcagctagtggctgctgaactggacggtatagatatggaacattttcatcaccacagaaaattatatgggtcagcgctgctctcaaactacaatggtggaatgataggtattggggtggtgagtttcttccctgagacttctcaaatcaagctaagtattattggcttctttctctgcctcggtacaagattagctccagattacctgttactgccttcaacccccagcctttgaaaactcccttcctcctaagagtacatgcaccctgctcattttgtagtagcttaggactgaaagtctaatgggagagggcaaagggctctccagaggtcaccctatcttccactatactagtgactgagagcagraatttctgaaccctaagaaaggtgacaagcatgacagagctgaggggagaaattctaaggcagttaggactgcatgtcattcctcaaacagcttggtggaggtggccgcctgcttctatcagcagggtagtatagcaaagcaattaagagcacaagccggccaagtgcagtggctcaggcctgtaatcccagccctttgggaggccaaggtagg

SEQ ID NO: 703576 - DNA, 673 bp, Homo sapiens
taagtccagagttgagggaaccagggacgtctatgatggtcaaatcagagctgaagccgggccgggtgcggtggctcacacctgcaatcccagcactttgggaggctgaggtgggcagatcgcttgaggccaggagttcaagaccagcctggccaacgtggcaaaaaacctcgtctctactaacaacacgaaaattagccaggcctcgtagtgcacacctgtagtatcaactactcaggaggctgaggcatgagaattgcttgagcccagaaggtggaggttgcagtgagcagagatcacgccactgcactccagcctgggtgacagagcaagatcctgtctcaaaacaaaaaacaaagcgcamacacacacacacacacacacacacacacacacacacacacacacaaaacaaccaaaaaatcagagctgaagggaaaaggcaacaaagactatgtgtgcagtgaaaggaacagcacccagccgatggccagcagactgtgggctgagaaatgaagatctccactgggtaaagtaaagctttcactctttgctcctaggcacttgcagggaaatgctgctgctttgtcttcactgaaagtacgggaaggactttgaggaagcgtaagtacaaagtctccatggtgcccttgtcatgtgctagagcctctca

SEQ ID NO: 703577 - DNA, 673 bp, Homo sapiens
taagtccagagttgagggaaccagggacgtctatgatggtcaaatcagagctgaagccgggccgggtgcggtggctcacacctgcaatcccagcactttgggaggctgaggtgggcagatcgcttgaggccaggagttcaagaccagcctggccaacgtggcaaaaaacctcgtctctactaacaacacgaaaattagccaggcctcgtagtgcacacctgtagtatcaactactcaggaggctgaggcatgagaattgcttgagcccagaaggtggaggttgcagtgagcagagatcacgccactgcactccagcctgggtgacagagcaagatcctgtctcaaaacaaaaaacaaagcgcacamacacacacacacacacacacacacacacacacacacacacacaaaacaaccaaaaaatcagagctgaagggaaaaggcaacaaagactatgtgtgcagtgaaaggaacagcacccagccgatggccagcagactgtgggctgagaaatgaagatctccactgggtaaagtaaagctttcactctttgctcctaggcacttgcagggaaatgctgctgctttgtcttcactgaaagtacgggaaggactttgaggaagcgtaagtacaaagtctccatggtgcccttgtcatgtgctagagcctctca

SEQ ID NO: 703578 - DNA, 673 bp, Homo sapiens
taagtccagagttgagggaaccagggacgtctatgatggtcaaatcagagctgaagccgggccgggtgcggtggctcacacctgcaatcccagcactttgggaggctgaggtgggcagatcgcttgaggccaggagttcaagaccagcctggccaacgtggcaaaaaacctcgtctctactaacaacacgaaaattagccaggcctcgtagtgcacacctgtagtatcaactactcaggaggctgaggcatgagaattgcttgagcccagaaggtggaggttgcagtgagcagagatcacgccactgcactccagcctgggtgacagagcaagatcctgtctcaaaacaaaaaacaaagcgcacacmcacacacacacacacacacacacacacacacacacacacacaaaacaaccaaaaaatcagagctgaagggaaaaggcaacaaagactatgtgtgcagtgaaaggaacagcacccagccgatggccagcagactgtgggctgagaaatgaagatctccactgggtaaagtaaagctttcactctttgctcctaggcacttgcagggaaatgctgctgctttgtcttcactgaaagtacgggaaggactttgaggaagcgtaagtacaaagtctccatggtgcccttgtcatgtgctagagcctctca

SEQ ID NO: 703579 - DNA, 673 bp, Homo sapiens
taagtccagagttgagggaaccagggacgtctatgatggtcaaatcagagctgaagccgggccgggtgcggtggctcacacctgcaatcccagcactttgggaggctgaggtgggcagatcgcttgaggccaggagttcaagaccagcctggccaacgtggcaaaaaacctcgtctctactaacaacacgaaaattagccaggcctcgtagtgcacacctgtagtatcaactactcaggaggctgaggcatgagaattgcttgagcccagaaggtggaggttgcagtgagcagagatcacgccactgcactccagcctgggtgacagagcaagatcctgtctcaaaacaaaaaacaaagcgcacacamacacacacacacacacacacacacacacacacacacacacaaaacaaccaaaaaatcagagctgaagggaaaaggcaacaaagactatgtgtgcagtgaaaggaacagcacccagccgatggccagcagactgtgggctgagaaatgaagatctccactgggtaaagtaaagctttcactctttgctcctaggcacttgcagggaaatgctgctgctttgtcttcactgaaagtacgggaaggactttgaggaagcgtaagtacaaagtctccatggtgcccttgtcatgtgctagagcctctca

SEQ ID NO: 703580 - DNA, 673 bp, Homo sapiens
taagtccagagttgagggaaccagggacgtctatgatggtcaaatcagagctgaagccgggccgggtgcggtggctcacacctgcaatcccagcactttgggaggctgaggtgggcagatcgcttgaggccaggagttcaagaccagcctggccaacgtggcaaaaaacctcgtctctactaacaacacgaaaattagccaggcctcgtagtgcacacctgtagtatcaactactcaggaggctgaggcatgagaattgcttgagcccagaaggtggaggttgcagtgagcagagatcacgccactgcactccagcctgggtgacagagcaagatcctgtctcaaaacaaaaaacaaagcgcacacacamacacacacacacacacacacacacacacacacacacacaaaacaaccaaaaaatcagagctgaagggaaaaggcaacaaagactatgtgtgcagtgaaaggaacagcacccagccgatggccagcagactgtgggctgagaaatgaagatctccactgggtaaagtaaagctttcactctttgctcctaggcacttgcagggaaatgctgctgctttgtcttcactgaaagtacgggaaggactttgaggaagcgtaagtacaaagtctccatggtgcccttgtcatgtgctagagcctctca

SEQ ID NO: 703581 - DNA, 673 bp, Homo sapiens
taagtccagagttgagggaaccagggacgtctatgatggtcaaatcagagctgaagccgggccgggtgcggtggctcacacctgcaatcccagcactttgggaggctgaggtgggcagatcgcttgaggccaggagttcaagaccagcctggccaacgtggcaaaaaacctcgtctctactaacaacacgaaaattagccaggcctcgtagtgcacacctgtagtatcaactactcaggaggctgaggcatgagaattgcttgagcccagaaggtggaggttgcagtgagcagagatcacgccactgcactccagcctgggtgacagagcaagatcctgtctcaaaacaaaaaacaaagcgcacacacacrcacacacacacacacacacacacacacacacacacacaaaacaaccaaaaaatcagagctgaagggaaaaggcaacaaagactatgtgtgcagtgaaaggaacagcacccagccgatggccagcagactgtgggctgagaaatgaagatctccactgggtaaagtaaagctttcactctttgctcctaggcacttgcagggaaatgctgctgctttgtcttcactgaaagtacgggaaggactttgaggaagcgtaagtacaaagtctccatggtgcccttgtcatgtgctagagcctctca

SEQ ID NO: 703582 - DNA, 624 bp, Homo sapiens
gatagatacagagcatggcataacaccatactgctatgtcctctactggtgagacatatagtcatcaatcaattgactggtgatcaacaagttgatagatttggtatgtacctgatgccaggcactgaaccacttataccatgacccaacaggaatagtgctaccagctaggcagaattttgcctctattagaaataggatttctgtgcccatggctgcttgacatgtctgccatcaccaggtagatttttaattctatccaggttgtgtatatcctatgaagacaaacatcaattycatcaagcaagaagaactattttagctggaagataaggtttattcactggcccagcatgagtagtagtttttttctagtttgcattatgacttatgcattaaaaatgattggcattcatggtcttaaattaaaatgaattaatatacacaaaattgtctcatacactctaaagctttgcagattaaaaacatttatatcttcttaatggtggtttttataggaaagaaaatataaaagaaatgggctatggtcattattgatagtcattcaatcattacattaccaacagtcagttatatagtagcctaataaaaataacaagctta

SEQ ID NO: 703583 - DNA, 633 bp, Homo sapiens
tgtcctaatgttctaaagaaaaaaaaagaaaggaaaacatataacctcatactgggaaatgagagtaaagagggaccaacatgcaccagatgcccattacgaggtaaatattgggctgggcactgtgcagcctgtccaaaaaaaaaaaaaaaaaaaagacatggagagatggtcaagctgaaggagacaggaatcagtagaaaggctctgataggaccagccagtacaagaaaatgatttgagtgcmcagtaaagtgaagaaaaatagaaatctgaggaataggaatggcttagaaagtgactattaaagtaataatagagaaaaacatccaactgcagaatttttaacttatcaaaatgtgaagagcataatggcatttatgttttcacaattatttcccattaggttaaaaaatatgggaaaaagacatcaagtattttacctaaatactatatttaggaagatttaattttgatataacttaattactaattctaatttctaatataatctcctcttttaaaagtgcaataatttgaaaaataaacacaaaaataaaaacaaaataaaaagattatataccactaaataaattttgaaaatgcatttaataaatgctgactctcaaatag

SEQ ID NO: 703584 - DNA, 1056 bp, Homo sapiens
  misc_feature 11, 12, 13, 14, 15, 16, 17, 18, 19, 20, 21, 22, 23, 24, 25,26, 27, 28, 29, 30, 31, 32, 33, 34, 35, 36, 37, 38, 39,40, 41, 42, 43, 44, 45, 46, 47, 48, 49, 50, 51, 52, 53,54, 55, 56, 57, 58, 59, 60, 61, 62, 63, 64, 65, 66, 67,68: n = A,T,C or G
  misc_feature 69, 70, 71, 72, 73, 74, 75, 76, 77, 78, 79, 80, 81, 82, 83,84, 85, 86, 87, 88, 89, 90, 91, 92, 93, 94, 95, 96, 97,98, 99, 100, 101, 102, 103, 104, 105, 106, 107, 108, 109,110: n = A,T,C or G
aattaggaagnnnnnnnnnnnnnnnnnnnnnnnnnnnnnnnnnnnnnnnnnnnnnnnnnnnnnnnnnnnnnnnnnnnnnnnnnnnnnnnnnnnnnnnnnnnnnnnnnnnnccattaagggaatgtgtcctaaggaaaagtgaatgaggttgagaaacaataaaagaaatggaaagaaaagaccactttacggattataaaagttatatttattcacgatgctacatttattgcattcccttaaaaaaatggagaactgtttatgtacccaatctgcacatataaaattttatacaaattatgtgtagcacataaaggcctctggtacagctaaaatcctgacactataatttgggtattcctgctttagggtctccagtttatcaggtctgtccatagaaaacagaaactggaattatagtcagtcttgctaacacttagaaactactttaaaatacaataaaattttcatttaccctaaaagtccaaatgggaggggatatattttgttaccaatttcaatgtaacagtatgacaaattcacacctcattttggctgggctttcaaaattaaaaaaaaaaaatcaccttagttctgacattatctaagttgtggctgcttcagaaggtcatatgacaaaatatttaccaaataattaaaaataataataataatattccttttacaaaatggtacagtaataccttaaggaaccggaaaatactaaatgtctttggctatacaactaaaaggccattctttcaaaagaatagggcatattcatttcagaatcaactaaaaaaaacagaaagcataacagaaatatgcatagaatttaagtatactttgtcttgccttcttytcccattctacccacataagcaaggagaatgcaatttatataatctttccagatgagactcaatagcactacaaagaaaatacccaaatttctgcaaaggcaaagtgaattaaaataattacacaactaggtgaagactgaaagggacaaatgttatttgcaattttctttttaacttgtttttaagccttaca

SEQ ID NO: 703585 - DNA, 1056 bp, Homo sapiens
  misc_feature 11, 12, 13, 14, 15, 16, 17, 18, 19, 20, 21, 22, 23, 24, 25,26, 27, 28, 29, 30, 31, 32, 33, 34, 35, 36, 37, 38, 39,40, 41, 42, 43, 44, 45, 46, 47, 48, 49, 50, 51, 52, 53,54, 55, 56, 57, 58, 59, 60, 61, 62, 63, 64, 65, 66, 67,68: n = A,T,C or G
  misc_feature 69, 70, 71, 72, 73, 74, 75, 76, 77, 78, 79, 80, 81, 82, 83,84, 85, 86, 87, 88, 89, 90, 91, 92, 93, 94, 95, 96, 97,98, 99, 100, 101, 102, 103, 104, 105, 106, 107, 108, 109,110: n = A,T,C or G
aattaggaagnnnnnnnnnnnnnnnnnnnnnnnnnnnnnnnnnnnnnnnnnnnnnnnnnnnnnnnnnnnnnnnnnnnnnnnnnnnnnnnnnnnnnnnnnnnnnnnnnnnnccattaagggaatgtgtcctaaggaaaagtgaatgaggttgagaaacaataaaagaaatggaaagaaaagaccactttacggattataaaagttatatttattcacgatgctacatttattgcattcccttaaaaaaatggagaactgtttatgtacccaatctgcacatataaaattttatacaaattatgtgtagcacataaaggcctctggtacagctaaaatcctgacactataatttgggtattcctgctttagggtctccagtttatcaggtctgtccatagaaaacagaaactggaattatagtcagtcttgctaacacttagaaactactttaaaatacaataaaattttcatttaccctaaaagtccaaatgggaggggatatattttgttaccaatttcaatgtaacagtatgacaaattcacacctcattttggctgggctttcaaaattaaaaaaaaaaaatcaccttagttctgacattatctaagttgtggctgcttcagaaggtcatatgacaaaatatttaccaaataattaaaaataataataataatattccttttacaaaatggtacagtaataccttaaggaaccggaaaatactaaatgtctttggctatacaactaaaaggccattctttcaaaagaatagggcatattcatttcagaatcaactaaaaaaaacagaaagcataacagaaatatgcatagaatttaagtatactttgtcttgccttcttttcccattctacccacataagcaaggagaatgcaatttatataatctttccagatgagactcaatagcactacaaagaaaatacccaaatttctgcaaaggcaaagtgaattaaaataattacacaactaggtgaagactgaaagggacaaatgttatttgcaattttctttttaacttgtttktaagccttaca

SEQ ID NO: 703586 - DNA, 353 bp, Homo sapiens
ccccttccttaagccttctctgatgacattccatcagcttgccaccacccctccctctcctgattcccactgcactttaycaactcttcccacaatgtaggctaccttcagcctggaaccctggctggtatgtctccttggtagatggtgagcttcttgaagacaatgacattattcataatatataaacaataatgaatgaattaattaaaaatgggaacaaggccaggcacggtggcttatgcctgtaatcccagcactttggaaggccgagctcagcggatcatgaggtcaagagatcgagaccatcctggccaacatggtgaaactctgtctttactaaaaatataaaa

SEQ ID NO: 703587 - DNA, 1510 bp, Homo sapiens
ccctaatgattagtgatgttgggcatcttttcatgagcttgctggtcttttgtatattttctttaaaaaatgtctatttaagtactttgcccatttaaaaatcaggttgtttgtttttttgttgttgagttttaagagttcttcatatattctgcatattaataccttatcagatgtatgatttgctaatattttctcccattccataggttgcctcttcacttctgttgattttgtcctttgatgctaaacctttgtcatccacatctttgtcatccacatctgaaccccatctctcgtttccattggtggtagtcgtggtggtggtgggcctcagtatgactgcagtaatggtacctggtgcgtcttctttccaagactgcccttacttagtttcttttgtttgcaatgagacaaagatttctgagcaccaaatgacaaagaagagttaagtttttaaaagcaattgttttcttcttgaaatgtttctttagttcctgttcaagacaatgctaagcaaaattcagatatcaccacacaacctctggtcttctgtggaaggcaagacttcttcaaatatccaaacaccttgagcccctgagttggtctgactcgctagtcccagggacagacacagtgaggtttatttgctgctgacagccaagctccaaggcaagatgggacagctattgtcatggggggagacattcagatccctcttatgacttgccataaaaatgatgggcctctggtgggatccattcccaactctcttacctcatttcaggtaggttcagtggtgacatccaatcatagctctcttacctaactcacctctccaagggcaagcttctcactattctctaatcaaaatttagaaaacctgccagtacaaccttggagaagaggggctttagccaaaagcaggtgctatattctctccttcctggaagtgtcatctcttttctgggctaagagcacacagattttgatgtaatttgccaagaacaataggaagaagcactgtttctggatgccacatgcttcctgaaagaggaaaattgtaacatgttgatatgatagtggagggtcttggaattttcttggaatcttctcatctcttccatggtgacagagatccagtgagtgcctggtgagataggacttatttgtaaatccttgtgagcctctctctgcaggcactggaatatacactgatgagatttgggcagccaggcttggaaggggatggggctgaggagcaggaggtgagggtctgtgaaattggttttattattgtgactctgacctcaggtggtccctcggcagccctaggaaactcaaaaagtacatgcagctatttatcctgtttcttcacatttacactgatcaagacaaaagtagcatcagggtcgtccatatcctcaggaaaggctgccagaggctgtctgggctggccaggctgatctgccaattccactggaagcctttgyagctgctcccttttccc

SEQ ID NO: 703588 - DNA, 2201 bp, Homo sapiens
tatctagattttctttgcttaatttcagaggctagaacacattagactctaaataaatgtgaatgagtgataaatattatatttacagatagctgccacattacaattctgtcctcccactggtggtggaatcttatgtacttttcaccatctccattttgcattcagactgaacatagctatgttattcctttcacctgggtgatttgaaaccatctctctatttctatttgtagagatcttatctatcaagcccttctcaaatgccacttcaaaatactttttctaatctccaattgtcttagtcaatttatgctcttataacaaaataacacagactaggcaatttatgaaaaccagacgtttatctgtcacagtactggagactaggaagtccaagatcaaggcgttggcaggtctgatgtctggtaagggctgttctctccgttcaagatggtgtcttgatgctgcatcttccagagacaaggaacactgtttcctcatatggtggaaggcgggagagcaagaggaatgaactccctccatggagctctttcatgagggctcctaaacccattcctgtggtaggagtcctgatggtctcatcacttcctgtaggctccacctcaacactgtcacattgtcaacgctgaatcttggaggaggcacagtgaaaccacagcaccaatcaagtatgatctttctcccctcatgtgtttagacctcccatgcacttttatacgttgtgtttcatggtttcttcctgtacaaataaggtgctataaatggatagctatagttttgggtttcatttcaacaaaacacccttcctagttgtttgaaccccaagagaaatatgaggacaggccccaccttccattacaaaagctgaaagggattgcatgatcctttttccagtttcttggccattcacgtgtgggcacatatctaggcccagccaactgatggctctttattagaacttggaacccgatgaaatgatgcaaaagacctgaaagaatcagagatgattctgagaaattgagcagagatacaggtccaggaacgtggcagcaagtgcctaagttcagcagagcccagctacatggtgacaagtgtcaaatgacaacattctagtggtggcattccaagatctgcttccgtcgaatgaacttggctgtgctgagtttccctcagttcttaccttgcttctccarcatcttcaatgattttgtgaactattcaatatcctttcattgaagtcctgttttgcttaagttgtctagaatttgttattttcagtgaaaaatataaaccaattatcccctcacattaaaacacactcctcttaggcatctcctctgatctcactggagaaaactctggacattatttgtaatttgactcagaatcataggattagtttggtactagtaacaatggagataagtaactaactttttgtgaaacttcttcctggggtgaaacaaaatctattggggaaactctttccaattatctctggaaatttattaagtgacctagtatataatgataatttaccatgatatttgataaaatagttttgtgtgttcagaataatttcttttttctttacctttgaaaataatgcattgataggtaattttctcctaaattggctgtttttatttccataaaaggtatttattgaatgtctccttacttttaatataactaggcattgtgtgatcaaagtaaaataaatatgttcttgtttctggaattactaaagctttgaaaatggacttatcgacctcaaaccaatgggacatattcctatgtggcctgctcccctgttagggttcccagggtaagtggtgattcctttcctgtctttttaaagattttagaaatgcagtttcttctgtggaccactaggcggagtacttcaaagcagggtttgtgggagtacaaagctaacttctgctgcttttgcttgatgcttctgcagcttccttgactactggggatgataagtagttattttcttcctcttctttatttttccccctcactctttggagttaacttgaaacatttaggaagtttgttgatcaacatataccgtgttgatgaaaatctgggtaagataatatggtaggactcctttggttataaataatagaattcaaactcaaactggtctaagccaaaaaaaa

SEQ ID NO: 703589 - DNA, 2201 bp, Homo sapiens
tatctagattttctttgcttaatttcagaggctagaacacattagactctaaataaatgtgaatgagtgataaatattatatttacagatagctgccacattacaattctgtcctcccactggtggtggaatcttatgtacttttcaccatctccattttgcattcagactgaacatagctatgttattcctttcacctgggtgatttgaaaccatctctctatttctatttgtagagatcttatctatcaagcccttctcaaatgccacttcaaaatactttttctaatctccaattgtcttagtcaatttatgctcttataacaaaataacacagactaggcaatttatgaaaaccagacgtttatctgtcacagtactggagactaggaagtccaagatcaaggcgttggcaggtctgatgtctggtaagggctgttctctccgttcaagatggtgtcttgatgctgcatcttccagagacaaggaacactgtttcctcatatggtggaaggcgggagagcaagaggaatgaactccctccatggagctctttcatgagggctcctaaacccattcctgtggtaggagtcctgatggtctcatcacttcctgtaggctccacctcaacactgtcacattgtcaacgctgaatcttggaggaggcacagtgaaaccacagcaccaatcaagtatgatctttctcccctcatgtgtttagacctcccatgcacttttatacgttgtgtttcatggtttcttcctgtacaaataaggtgctataaatggatagctatagttttgggtttcatttcaacaaaacacccttcctagttgtttgaaccccaagagaaatatgaggacaggccccaccttccattacaaaagctgaaagggattgcatgatcctttttccagtttcttggccattcacgtgtgggcacatatctaggcccagccaactgatggctctttattagaacttggaacccgatgaaatgatgcaaaagacctgaaagaatcagagatgattctgagaaattgagcagagatacaggtccaggaacgtggcagcaagtgcctaagttcagcagagcccagctacatggtgacaagtgtcaaatgacaacattctagtggtggcattccaagatctgcttccgtcgaatgaacttggctgtgctgagtttccctcagttcttaccttgcttctccaacatcttcaatgattttgtgaactattcaatatcctttcattgaagtcctgttttgcttaagttgtctagaatttgttattttcagtgaaaaatataaaccaattatcccctcacattaaaacacactcctcttaggcatctcctctgatctcactggagaaaactctggacattatttgtaatttgactcagaatcataggattagtttggtactagtaacaatggagataagtaactaactttttgtgaaacttcttcctggggtgaaacaaaatctattggggaaactctttccaattatctctggaaatttattaagtgacctagtatataatgataatttaccatgatatttgataaaatarttttgtgtgttcagaataatttcttttttctttacctttgaaaataatgcattgataggtaattttctcctaaattggctgtttttatttccataaaaggtatttattgaatgtctccttacttttaatataactaggcattgtgtgatcaaagtaaaataaatatgttcttgtttctggaattactaaagctttgaaaatggacttatcgacctcaaaccaatgggacatattcctatgtggcctgctcccctgttagggttcccagggtaagtggtgattcctttcctgtctttttaaagattttagaaatgcagtttcttctgtggaccactaggcggagtacttcaaagcagggtttgtgggagtacaaagctaacttctgctgcttttgcttgatgcttctgcagcttccttgactactggggatgataagtagttattttcttcctcttctttatttttccccctcactctttggagttaacttgaaacatttaggaagtttgttgatcaacatataccgtgttgatgaaaatctgggtaagataatatggtaggactcctttggttataaataatagaattcaaactcaaactggtctaagccaaaaaaaa

SEQ ID NO: 703590 - DNA, 2746 bp, Homo sapiens
ggtggaacatggtgggaagaaccgggaggggtttattgataaatttcaagtactttgtggggctctgaaagactgtcttcaaattctttgtcctactacctctttcatattagttcaaatgtcatatgggtatatcttttgggttaaattaaggaaaatctccatgaaaagtaaaaaaacaaayaaaaaaaccccaaaggaatagaaagagatactatgaaaaatccactcagatttctcagagttttattaactcaaagaagacttggtccagttggaagaagacagaattgattttgacaccgtttagcaaaccctttagcgttcaatgcactctagatcatgagtataaagaagttcacttaataggttcaccaaattagttagtttgtgtagttcaaagggaaacagacacacaggactgtgaggttttgacaggggtgaaaggcaagtctgggtccattgagccctggaaggccatgaaggggcagggcaggagaaggatggtgctgggagcctagggaactggccacttctgtgctggctgaagatcacaaaaatcaacacagctttctccaaatgctgcccgtgcctgatggaattaaacagagctctgagaaagacagcaccggggccgaggatgcgtcctgagctgcctacagtcatcaatatcttggccagtggctatgcactcaggggcaatttggctagctttcttgatccgcaccagaaaactcgcttttgaattggtttggaaagctccaaaagggacgtgcttcatgctattggtattgctgtcaaaaagaaaagattctgcttttcatcagctgttgatttttgctctctgtatttctctagcatgtgttgctggtggccctggttatgctaacaagtagatagtgtagctgcagcagcagaacagaaaagactctcctggattctcagttccaggctggcctcggaacaggcttagggatgtttcaatgcttgaatgcaggtgagctggagatctgtggcaattcttttgacatgaggctggacattctttatagcttccccagacacaggaatttgcagagcttgaaaaagaatcactggcaggaggttcattttctttattgctacttccccagccataaaactaaaagctttttacctaaatcacgttagccatctcgtgacagtaggagatcatttccttcagagtctttcccgattggagtctagtcctagggtggtttgaacggtccgtttgaatttgaagagctttctaattgatgcttctcatcccctctccaaccagtcttatttggtgtcatctgcctttccccttcctccctaccaaacctcagagtcttgaaacaaaaatctttgtattgtaaacttcatcatgttaatttcatcacttcaaatgaaatttcccttgtttgagtttcctccaactgtgtgacttagggctgttgaactctttcaaatacacaggaaaacggaaacctcttttgctgtctattgattgtataataatacattttcagatgctaatcacatgctttgagcttggttaatgaatgaaattctaaggatattcttatttgaaaggtttacaaatataataactgtcattatatctaattctgtctacaattctggtgtgaaatgagaagtcaggagccctgccatctacacagtacatgattctaccagctatttctgtgttacttcaagcaaatcacttcttttctgccttttctttctttttatgtaaaatgtggataactatctgtctcactgaattcacagagtgactgtattatgtacaataaaatttattgaaaagcgtaaagttctataattaggtagaatgttacctgtaatttataagctttttaaatcctggggcagtggaggaagtattcctcttcctgtaaaaggacatccctctaataatctcccttcttttcctgacttttcacggattctgttcattgcttttccatttgtcatctgcatcttcaatctctctccttcttgatgcattctgtcagcatttaaatataaatttttcatttaaaatatcttctgttttggaggaaccttaactttgactctgtgtgctttctagctatcaagccatctcctcctttcttggaaaatttttctcaaggattttccacacttactatctccttttgctcattttcctttcactctttattcaggtcagtttggctttcactttcatcaagcctatgaaactgcttgtgctaaggtcaccatataagagtgctaggggcttccatcacaagctgccacagattgagtggtttatcttctcaagctctgaagactggaaatccaggatggaatgtcagcaggtttgccttcttctgagaactgctgtcttgcagatgcctcccttcttgctgtgtcctcaggctgtgttgcctgtgtctcaatctctttttagatggacacctgccatattggtttagggtccacccatatggcttcatttgacctcacttacctctttgaatgccttctctaaatcagtccctctgaggcagtggggatcagctcttcaacataggaatctggggggacacaattcagcacccccagaattggtgattcctaaacatcatgaacactattcctctttctttctttctctccctttctttctttctttccttcttcctttctttccttctttctttctttctttctttctttctttctttct

SEQ ID NO: 703591 - DNA, 1478 bp, Homo sapiens
gaggttttttattttgattggatactgcattcaattaaaaagcatgaactatcaaagtgaattgaaactatcaatgtgcatatgtgatttttaaaattctaacttcacttactgagagaacatgaaagcaataatatctcatcttgaatatcacttcatcgtaacacaatttcattgctaaataatatgcccactctaagttatcaggattcattaaagaaatagcttattctattctgtgtcagggaatgttcatggtgaaactgagaaatattagtgtaacagaaaacaaagggatgcaaaaatttaaggaaatcatataaaaaaggcagaggagtggcttgaaaaatgttgtaccattgtacaaagatgggactgtcattctgctgaagcatttttagttttaaataaaatgttttatataattttaatgacaaaaagaaaagtatttgaaataaaacacacaaattcttacaaaacaccttagaaataatggtagctcacagttgccaggaataaattgtgttgtttattattgtatcttaacaaaaaggaagggaggaaaggaaggagagatcaagattgcttttcatagactttaatagccatgcccctccttgtgaaaaaaaaaaagaaaaagaaaaaggaaataaagttatacaaataaaactagataagactagattgcatctttgttcattaaccaaatctagaacattaggttggtaagcttaagagaggtaatttaaaatatattcaaaggaatattgttcacatgtcatattaagtatattcctagcagagatggtggaatctgagattataaaaggcataaaaattgaagtttggccagaaaatgcagtcactatatcaagcaaataaaaaatcactgggctgagacaaaccaaatcctgtagtaaaacgaagaaagtgatttctatttctttggttcaaagaatgattatttaatttatagtcaatatcagaggaaagaggaagataaatagagaaaagaggaggaaggaaaaataacatatcttaaaaccaaagtcatctcacaaaaatatggaaggacttcactcttcataactagataaaggagagttttgatttttactattagctatgtagccttcaatattattttaccctcagtcagctcagtttttctcctgtsaaaaatgtgagtgatactaattcaagcacatgctaatgtgtaacagaagtaaacatcacagtaaaacagtactaccattttacactaaaaggagtggcataaacaaaagtgatattgagttctagagaaaatagagatttcttgaatttattcaaattgtttagtgcttttggagggtttccaaaaattctctattaatctctcctttattagtttcttacagcaatcacaggaagtacatgagaacagaaattcttatcctcatttaaaaaaaaaaatgagtaaagcttaggaaaatgac

SEQ ID NO: 703592 - DNA, 1499 bp, Homo sapiens
cctcaaatgatccacccctctcagcctcccaaagtgctgggattccaggtgtaagccaccacgcccagccatgattagctatttttaattggaagattttatcaacaagtggcttcaaatgccgctgatacttcctaaataggtatacatacagaattttcttctggaatacagactaatggttcactaaaatttaaggcatatcaaatgccacataactaaaactagtcaatgttcagtctcatcttacattagttactgtcagtattttactcacttactcccttctctctaaatcactttcttcccttgattttcaggacatcacacactactgtcttctacccacataactactcctcagatcctttcctgtttttcctcattttccagactgaacaacattatagttacatatagcttagttcttgaacctcttctctttgtgcctacttctaagtgaactcactgagtctcatggatttgaatacgtttggtataytggtgtctccacaatttattcaagtcaggtacattcagtggactcttaactggcatatctagttgcctcccctttacatcatcacttagatgtcttgagagtatctaaaaattagcttgttcaaaactgactcttcacaactgaactctcatgcagaagactccttttacagttttaccaactcagttgatacatattccatttttctaaatcttcaagcaaaattttacccacttatgttatctctttctttacttcacatttcaaattattttgcctgtggttttgaaatagtttcagcaactagcaacttcctattatctttacttctatcagtataatccaaactacaataatctcttgcgtaaatgattgtaaatgtctaaaaatttatctctttgcttctaccatgtgcctttttggttcccaacaatgttctttaaaaaattatatcattcttctattcaaaattctgatggcatctcatctcattcaaaagcctacatccttatgttggcccgcaaaatactaggtgatccattaactccaccctctcaaacattctcttttgctgctactgtatgtcttgctcacttggctgcagtcatagcagcttccttgataatccacaaacatgctgggcatgttctcacggcagggcctctaaatggctgctcccttaacctacagttttgcctcccacttccatctcaaatagcctcaaacttattcctttagctaccttgggtttttcctcaaatattgtgttttttaatgaagtctcctggctgcatcacataaaatgacattctatttcacattcttttgctccctaaaatcctaactgtagctattgcacttattactgttaaccaccccccgcccgccccacacacaatttctacattgcctttgtctcccattagaaagtatcctcttaaaggatagggtttctgtcatagtaaaggctcaatacgtttctgataaataaataaac

SEQ ID NO: 703593 - DNA, 1499 bp, Homo sapiens
cctcaaatgatccacccctctcagcctcccaaagtgctgggattccaggtgtaagccaccacgcccagccatgattagctatttttaattggaagattttatcaacaagtggcttcaaatgccgctgatacttcctaaataggtatacatacagaattttcttctggaatacagactaatggttcactaaaatttaaggcatatcaaatgccacataactaaaactagtcaatgttcagtctcatcttacattagttactgtcagtattttactcacttactcccttctctctaaatcactttcttcccttgattttcaggacatcacacactactgtcttctacccacataactactcctcagatcctttcctgtttttcctcattttccagactgaacaacattatagttacatatagcttagttcttgaacctcttctctttgtgcctacttctaagtgaactcactgagtctcatggatttgaatacgtttggtatattggtgtctccacaatttattcaagtcaggtacattcagtggactcttaactggcatatctagttgcctcccctttacatcatcacttagatgtcttgagagtatctaaaaattagcttgttcaaaactgactcttcacaactgaactctcatgcagaagactccttttacagttttaccaactcagttgatacatattccatttttctaaatcttcaagcaaaattttacccacttatgttatctctttctttacttcacatttcaaattattttgcctgtggttttgaaatagtttcagcaactagcaacttcctattatctttacttctatcagtataatccaaactacaataatctcttgcgtaaatgattgtaaatgtctaaaaatttatctctttgcttctaccatgtgcctttttggttcccaacaatgttctttaaaaaattatatcattcttctattcaaaattctgatggcatctcatctcattcaaaagcctacatccttatgttggcccgcaaaatactaggtgatccattaactccaccctctcaaacattctcttttgctgctactgtatgtcttgctcacttggctgcagtcatagcagcttccttgataatccacaaacatgctgggcatgttctcacggcagggcctctaaatggctgctcccttaacctacagttttgcctcccacttccatctcaaatagcctcaaacttattcctttagctaccttgggtttttcctcaaatattgtgttttttaatgargtctcctggctgcatcacataaaatgacattctatttcacattcttttgctccctaaaatcctaactgtagctattgcacttattactgttaaccaccccccgcccgccccacacacaatttctacattgcctttgtctcccattagaaagtatcctcttaaaggatagggtttctgtcatagtaaaggctcaatacgtttctgataaataaataaac

SEQ ID NO: 703594 - DNA, 1499 bp, Homo sapiens
cctcaaatgatccacccctctcagcctcccaaagtgctgggattccaggtgtaagccaccacgcccagccatgattagctatttttaattggaagattttatcaacaagtggcttcaaatgccgctgatacttcctaaataggtatacatacagaattttcttctggaatacagactaatggttcactaaaatttaaggcatatcaaatgccacataactaaaactagtcaatgttcagtctcatcttacattagttactgtcagtattttactcacttactcccttctctctaaatcactttcttcccttgattttcaggacatcacacactactgtcttctacccacataactactcctcagatcctttcctgtttttcctcattttccagactgaacaacattatagttacatatagcttagttcttgaacctcttctctttgtgcctacttctaagtgaactcactgagtctcatggatttgaatacgtttggtatattggtgtctccacaatttattcaagtcaggtacattcagtggactcttaactggcatatctagttgcctcccctttacatcatcacttagatgtcttgagagtatctaaaaattagcttgttcaaaactgactcttcacaactgaactctcatgcagaagactccttttacagttttaccaactcagttgatacatattccatttttctaaatcttcaagcaaaattttacccacttatgttatctctttctttacttcacatttcaaattattttgcctgtggttttgaaatagtttcagcaactagcaacttcctattatctttacttctatcagtataatccaaactacaataatctcttgcgtaaatgattgtaaatgtctaaaaatttatctctttgcttctaccatgtgcctttttggttcccaacaatgttctttaaaaaattatatcattcttctattcaaaattctgatggcatctcatctcattcaaaagcctacatccttatgttggcccgcaaaatactaggtgatccattaactccaccctctcaaacattctcttttgctgctactgtatgtcttgctcacttggctgcagtcatagcagcttccttgataatccacaaacatgctgggcatgttctcacggcagggcctctaaatggctgctcccttaacctacagttttgcctcccacttccatctcaaatagcctcaaacttattcctttagctaccttgggtttttcctcaaatattgtgttttttaatgaagtctcctggctgcatcacataaaatgacattctatttcacattcttttgctccctaaaatcctaactgtagctattgcacttattactgttaaccacccccygcccgccccacacacaatttctacattgcctttgtctcccattagaaagtatcctcttaaaggatagggtttctgtcatagtaaaggctcaatacgtttctgataaataaataaac

SEQ ID NO: 703595 - DNA, 1499 bp, Homo sapiens
cctcaaatgatccacccctctcagcctcccaaagtgctgggattccaggtgtaagccaccacgcccagccatgattagctatttttaattggaagattttatcaacaagtggcttcaaatgccgctgatacttcctaaataggtatacatacagaattttcttctggaatacagactaatggttcactaaaatttaaggcatatcaaatgccacataactaaaactagtcaatgttcagtctcatcttacattagttactgtcagtattttactcacttactcccttctctctaaatcactttcttcccttgattttcaggacatcacacactactgtcttctacccacataactactcctcagatcctttcctgtttttcctcattttccagactgaacaacattatagttacatatagcttagttcttgaacctcttctctttgtgcctacttctaagtgaactcactgagtctcatggatttgaatacgtttggtatattggtgtctccacaatttattcaagtcaggtacattcagtggactcttaactggcatatctagttgcctcccctttacatcatcacttagatgtcttgagagtatctaaaaattagcttgttcaaaactgactcttcacaactgaactctcatgcagaagactccttttacagttttaccaactcagttgatacatattccatttttctaaatcttcaagcaaaattttacccacttatgttatctctttctttacttcacatttcaaattattttgcctgtggttttgaaatagtttcagcaactagcaacttcctattatctttacttctatcagtataatccaaactacaataatctcttgcgtaaatgattgtaaatgtctaaaaatttatctctttgcttctaccatgtgcctttttggttcccaacaatgttctttaaaaaattatatcattcttctattcaaaattctgatggcatctcatctcattcaaaagcctacatccttatgttggcccgcaaaatactaggtgatccattaactccaccctctcaaacattctcttttgctgctactgtatgtcttgctcacttggctgcagtcatagcagcttccttgataatccacaaacatgctgggcatgttctcacggcagggcctctaaatggctgctcccttaacctacagttttgcctcccacttccatctcaaatagcctcaaacttattcctttagctaccttgggtttttcctcaaatattgtgttttttaatgaagtctcctggctgcatcacataaaatgacattctatttcacattcttttgctccctaaaatcctaactgtagctattgcacttattactgttaaccaccccccgcccrccccacacacaatttctacattgcctttgtctcccattagaaagtatcctcttaaaggatagggtttctgtcatagtaaaggctcaatacgtttctgataaataaataaac

SEQ ID NO: 703596 - DNA, 1499 bp, Homo sapiens
cctcaaatgatccacccctctcagcctcccaaagtgctgggattccaggtgtaagccaccacgcccagccatgattagctatttttaattggaagattttatcaacaagtggcttcaaatgccgctgatacttcctaaataggtatacatacagaattttcttctggaatacagactaatggttcactaaaatttaaggcatatcaaatgccacataactaaaactagtcaatgttcagtctcatcttacattagttactgtcagtattttactcacttactcccttctctctaaatcactttcttcccttgattttcaggacatcacacactactgtcttctacccacataactactcctcagatcctttcctgtttttcctcattttccagactgaacaacattatagttacatatagcttagttcttgaacctcttctctttgtgcctacttctaagtgaactcactgagtctcatggatttgaatacgtttggtatattggtgtctccacaatttattcaagtcaggtacattcagtggactcttaactggcatatctagttgcctcccctttacatcatcacttagatgtcttgagagtatctaaaaattagcttgttcaaaactgactcttcacaactgaactctcatgcagaagactccttttacagttttaccaactcagttgatacatattccatttttctaaatcttcaagcaaaattttacccacttatgttatctctttctttacttcacatttcaaattattttgcctgtggttttgaaatagtttcagcaactagcaacttcctattatctttacttctatcagtataatccaaactacaataatctcttgcgtaaatgattgtaaatgtctaaaaatttatctctttgcttctaccatgtgcctttttggttcccaacaatgttctttaaaaaattatatcattcttctattcaaaattctgatggcatctcatctcattcaaaagcctacatccttatgttggcccgcaaaatactaggtgatccattaactccaccctctcaaacattctcttttgctgctactgtatgtcttgctcacttggctgcagtcatagcagcttccttgataatccacaaacatgctgggcatgttctcacggcagggcctctaaatggctgctcccttaacctacagttttgcctcccacttccatctcaaatagcctcaaacttattcctttagctaccttgggtttttcctcaaatattgtgttttttaatgaagtctcctggctgcatcacataaaatgacattctatttcacattcttttgctccctaaaatcctaactgtagctattgcacttattactgttaaccaccccccgcccgcccmacacacaatttctacattgcctttgtctcccattagaaagtatcctcttaaaggatagggtttctgtcatagtaaaggctcaatacgtttctgataaataaataaac

SEQ ID NO: 703597 - DNA, 1186 bp, Homo sapiens
ggcaggtggatcacttgaggtcaggagtttgagaccagcctgctcarcatgatgaaacctcgtctgtactaaaaatactaaaattagctaggcgtggtggtagacacctgttattccagctactcaggagactgaggctcaagaatcgcttgggccagggaggtggaggcagtggtgaggcaagattgcaacagtgcactccagcctgagtgacagagcaagactctgtctcaataaaataaataaataaataaaaaccaatgcccttgatggaatagtgctggagaaatgtcaatgataactgcaaaaagagatagtggatgttatttcagatggcacgaggaagtggttttgttatgggctatatgtattaacctatttgtaaattcctaacaagtacttgtccgaaaatttttagagtctttagaaaatttatcattaaacatactgccagaatttatgctaaactttataaattgtttctctctaatctgaggatttgggggtgatttttgtgtgtgtgcttctctgctttccattgtttttttttttaacttagcattatatttataatacaaacacttgtgaaagttgttgaacttacaaaagtatttaaactaaaaataaagctccttttgctttttaactatattatttaatagttttggaactttcaatttttaatacatctgaagaaaataaatctgtccatgatatggtttatttctattttataattgtccttgccatgaattgcaagaaaaaggatactcaacagatttacttaaagaaaattaaatatcaccatcacatgtaaattatcattttcctataactggtgtagggaccagcctcacagggtcggtggctctctccctgtgtgaggcgatgagagagtgtagaaataaagacacaagacaaagagataagagaaaaggcagctgggcccgggggacgactaccaccaatgcgcggagactggtagtggccccgaatgccaggctgcgctgttatttattgaatacaaggcagaagggaaagggtaaagaatgtgagtcacctccaatgataggtaaggtcatgtgggtcacgtgtccactggacagggggcccttccctgcctggcggacgaggcagagaaggagaggagacagagagaaagacagcttatgccattatttctgca

SEQ ID NO: 703598 - DNA, 1186 bp, Homo sapiens
ggcaggtggatcacttgaggtcaggagtttgagaccagcctgctcaacatgatgaaacctcgtctgtactaaaaatactaaaattagctaggcgtggtggtagacacctgttattccagctactcaggagactgaggctcaagaatcgcttgggccagggaggtggaggcagtggtgaggcaagattgcaacagtgcactccagcctgagtgacagagcaagactctgtctcaataaaataaataaataaataaaaaccaatgmccttgatggaatagtgctggagaaatgtcaatgataactgcaaaaagagatagtggatgttatttcagatggcacgaggaagtggttttgttatgggctatatgtattaacctatttgtaaattcctaacaagtacttgtccgaaaatttttagagtctttagaaaatttatcattaaacatactgccagaatttatgctaaactttataaattgtttctctctaatctgaggatttgggggtgatttttgtgtgtgtgcttctctgctttccattgtttttttttttaacttagcattatatttataatacaaacacttgtgaaagttgttgaacttacaaaagtatttaaactaaaaataaagctccttttgctttttaactatattatttaatagttttggaactttcaatttttaatacatctgaagaaaataaatctgtccatgatatggtttatttctattttataattgtccttgccatgaattgcaagaaaaaggatactcaacagatttacttaaagaaaattaaatatcaccatcacatgtaaattatcattttcctataactggtgtagggaccagcctcacagggtcggtggctctctccctgtgtgaggcgatgagagagtgtagaaataaagacacaagacaaagagataagagaaaaggcagctgggcccgggggacgactaccaccaatgcgcggagactggtagtggccccgaatgccaggctgcgctgttatttattgaatacaaggcagaagggaaagggtaaagaatgtgagtcacctccaatgataggtaaggtcatgtgggtcacgtgtccactggacagggggcccttccctgcctggcggacgaggcagagaaggagaggagacagagagaaagacagcttatgccattatttctgca

SEQ ID NO: 703599 - DNA, 1186 bp, Homo sapiens
ggcaggtggatcacttgaggtcaggagtttgagaccagcctgctcaacatgatgaaacctcgtctgtactaaaaatactaaaattagctaggcgtggtggtagacacctgttattccagctactcaggagactgaggctcaagaatcgcttgggccagggaggtggaggcagtggtgaggcaagattgcaacagtgcactccagcctgagtgacagagcaagactctgtctcaataaaataaataaataaataaaaaccaatgccmttgatggaatagtgctggagaaatgtcaatgataactgcaaaaagagatagtggatgttatttcagatggcacgaggaagtggttttgttatgggctatatgtattaacctatttgtaaattcctaacaagtacttgtccgaaaatttttagagtctttagaaaatttatcattaaacatactgccagaatttatgctaaactttataaattgtttctctctaatctgaggatttgggggtgatttttgtgtgtgtgcttctctgctttccattgtttttttttttaacttagcattatatttataatacaaacacttgtgaaagttgttgaacttacaaaagtatttaaactaaaaataaagctccttttgctttttaactatattatttaatagttttggaactttcaatttttaatacatctgaagaaaataaatctgtccatgatatggtttatttctattttataattgtccttgccatgaattgcaagaaaaaggatactcaacagatttacttaaagaaaattaaatatcaccatcacatgtaaattatcattttcctataactggtgtagggaccagcctcacagggtcggtggctctctccctgtgtgaggcgatgagagagtgtagaaataaagacacaagacaaagagataagagaaaaggcagctgggcccgggggacgactaccaccaatgcgcggagactggtagtggccccgaatgccaggctgcgctgttatttattgaatacaaggcagaagggaaagggtaaagaatgtgagtcacctccaatgataggtaaggtcatgtgggtcacgtgtccactggacagggggcccttccctgcctggcggacgaggcagagaaggagaggagacagagagaaagacagcttatgccattatttctgca

SEQ ID NO: 703600 - DNA, 1186 bp, Homo sapiens
ggcaggtggatcacttgaggtcaggagtttgagaccagcctgctcaacatgatgaaacctcgtctgtactaaaaatactaaaattagctaggcgtggtggtagacacctgttattccagctactcaggagactgaggctcaagaatcgcttgggccagggaggtggaggcagtggtgaggcaagattgcaacagtgcactccagcctgagtgacagagcaagactctgtctcaataaaataaataaataaataaaaaccaatgcccttgatggaatagtgctggagaaatgtcaatgataactgcaaaaagagatagtggatgttatttcagatggcacgaggaagtggttttgttatgggctatatgtattaacctatttgtaaattcctaacaagtacttgtcygaaaatttttagagtctttagaaaatttatcattaaacatactgccagaatttatgctaaactttataaattgtttctctctaatctgaggatttgggggtgatttttgtgtgtgtgcttctctgctttccattgtttttttttttaacttagcattatatttataatacaaacacttgtgaaagttgttgaacttacaaaagtatttaaactaaaaataaagctccttttgctttttaactatattatttaatagttttggaactttcaatttttaatacatctgaagaaaataaatctgtccatgatatggtttatttctattttataattgtccttgccatgaattgcaagaaaaaggatactcaacagatttacttaaagaaaattaaatatcaccatcacatgtaaattatcattttcctataactggtgtagggaccagcctcacagggtcggtggctctctccctgtgtgaggcgatgagagagtgtagaaataaagacacaagacaaagagataagagaaaaggcagctgggcccgggggacgactaccaccaatgcgcggagactggtagtggccccgaatgccaggctgcgctgttatttattgaatacaaggcagaagggaaagggtaaagaatgtgagtcacctccaatgataggtaaggtcatgtgggtcacgtgtccactggacagggggcccttccctgcctggcggacgaggcagagaaggagaggagacagagagaaagacagcttatgccattatttctgca

SEQ ID NO: 703601 - DNA, 1038 bp, Homo sapiens
cgaattatatgatttcatttatatgaaatgtccagaataggcaaatctatagagatagaaggtacattagtggttgactaggtccccagagggtagggtacgaggagtgactgctaatgatatgggatttcttttcagggtgatgaaatattttaaaacttagatcgtgatgaaggttacagagttctgtgtatatactaaaaaccacctattaaaaaaaaaagaayggccaagcgcggtggctctcgcctgtaatcccagcactttgggaggctgaggcgggtggatcacttgaggtcaggagttcgagaccagcctggtcaacatggtgacaaccccgtcactactaaaaatacaaaaattagccaggcataatggcggatgcctgtaatcccagctacttgggaggccgaggcaggagaattgcttgaacctgggaggtggaagttgcagtgagccaagatcatgcccttgcacttcagcctaggtgacatggtgagactctatcacacacaaaaaatacataaataaataaataattaaaattaaaaaatttttaaaaagaaaaagatatttaaaaatagctacttaaatgtctgtgatgagacaggttaagtgccaattgagtggtacacacaggccaagaaggaggcgtgcatgaccgtgtggtagttcacaggcctttggaagtgcctgtgggctgagctcctcaggcattttgtttccagagatgcctgccatgaaaatgcatgctttatttaacaaattagatttaaagcatcatctagatgtaatctgtcttaaaattttgtgaggtttaagaagtgagtaatatagtgggtctatggttttctgacccactggaactacctataaaccaaaaaaacgttagtgtctgctagcatgcaacatgaattctggactaaatagaggatattcttttatgattgtactaacgtatgacttaccctctctgaatctgttttaatatcaataaagtgagaggactgactatgcagccattcactcatttagtgg

SEQ ID NO: 703602 - DNA, 1038 bp, Homo sapiens
cgaattatatgatttcatttatatgaaatgtccagaataggcaaatctatagagatagaaggtacattagtggttgactaggtccccagagggtagggtacgaggagtgactgctaatgatatgggatttcttttcagggtgatgaaatattttaaaacttagatcgtgatgaaggttacagagttctgtgtatatactaaaaaccacctattaaaaaaaaaagaatggccaagcgcggtggctctcgcctgtaatcccagcactttgggaggctgaggcgggtggatcacttgaggtcaggagttcgagaccagcctggtcaacatggtgacaaccccrtcactactaaaaatacaaaaattagccaggcataatggcggatgcctgtaatcccagctacttgggaggccgaggcaggagaattgcttgaacctgggaggtggaagttgcagtgagccaagatcatgcccttgcacttcagcctaggtgacatggtgagactctatcacacacaaaaaatacataaataaataaataattaaaattaaaaaatttttaaaaagaaaaagatatttaaaaatagctacttaaatgtctgtgatgagacaggttaagtgccaattgagtggtacacacaggccaagaaggaggcgtgcatgaccgtgtggtagttcacaggcctttggaagtgcctgtgggctgagctcctcaggcattttgtttccagagatgcctgccatgaaaatgcatgctttatttaacaaattagatttaaagcatcatctagatgtaatctgtcttaaaattttgtgaggtttaagaagtgagtaatatagtgggtctatggttttctgacccactggaactacctataaaccaaaaaaacgttagtgtctgctagcatgcaacatgaattctggactaaatagaggatattcttttatgattgtactaacgtatgacttaccctctctgaatctgttttaatatcaataaagtgagaggactgactatgcagccattcactcatttagtgg

SEQ ID NO: 703603 - DNA, 1038 bp, Homo sapiens
cgaattatatgatttcatttatatgaaatgtccagaataggcaaatctatagagatagaaggtacattagtggttgactaggtccccagagggtagggtacgaggagtgactgctaatgatatgggatttcttttcagggtgatgaaatattttaaaacttagatcgtgatgaaggttacagagttctgtgtatatactaaaaaccacctattaaaaaaaaaagaatggccaagcgcggtggctctcgcctgtaatcccagcactttgggaggctgaggcgggtggatcacttgaggtcaggagttcgagaccagcctggtcaacatggtgacaaccccgtcactactaaaaatacaaaaattagccaggcataatggcggatgcctgtaatcccagctacttgggaggcygaggcaggagaattgcttgaacctgggaggtggaagttgcagtgagccaagatcatgcccttgcacttcagcctaggtgacatggtgagactctatcacacacaaaaaatacataaataaataaataattaaaattaaaaaatttttaaaaagaaaaagatatttaaaaatagctacttaaatgtctgtgatgagacaggttaagtgccaattgagtggtacacacaggccaagaaggaggcgtgcatgaccgtgtggtagttcacaggcctttggaagtgcctgtgggctgagctcctcaggcattttgtttccagagatgcctgccatgaaaatgcatgctttatttaacaaattagatttaaagcatcatctagatgtaatctgtcttaaaattttgtgaggtttaagaagtgagtaatatagtgggtctatggttttctgacccactggaactacctataaaccaaaaaaacgttagtgtctgctagcatgcaacatgaattctggactaaatagaggatattcttttatgattgtactaacgtatgacttaccctctctgaatctgttttaatatcaataaagtgagaggactgactatgcagccattcactcatttagtgg

SEQ ID NO: 703604 - DNA, 1038 bp, Homo sapiens
cgaattatatgatttcatttatatgaaatgtccagaataggcaaatctatagagatagaaggtacattagtggttgactaggtccccagagggtagggtacgaggagtgactgctaatgatatgggatttcttttcagggtgatgaaatattttaaaacttagatcgtgatgaaggttacagagttctgtgtatatactaaaaaccacctattaaaaaaaaaagaatggccaagcgcggtggctctcgcctgtaatcccagcactttgggaggctgaggcgggtggatcacttgaggtcaggagttcgagaccagcctggtcaacatggtgacaaccccgtcactactaaaaatacaaaaattagccaggcataatggcggatgcctgtaatcccagctacttgggaggccgaggcaggagaattgcttgaacctgggaggtggaagttgcagtgagccaagatcatgcccttgcactycagcctaggtgacatggtgagactctatcacacacaaaaaatacataaataaataaataattaaaattaaaaaatttttaaaaagaaaaagatatttaaaaatagctacttaaatgtctgtgatgagacaggttaagtgccaattgagtggtacacacaggccaagaaggaggcgtgcatgaccgtgtggtagttcacaggcctttggaagtgcctgtgggctgagctcctcaggcattttgtttccagagatgcctgccatgaaaatgcatgctttatttaacaaattagatttaaagcatcatctagatgtaatctgtcttaaaattttgtgaggtttaagaagtgagtaatatagtgggtctatggttttctgacccactggaactacctataaaccaaaaaaacgttagtgtctgctagcatgcaacatgaattctggactaaatagaggatattcttttatgattgtactaacgtatgacttaccctctctgaatctgttttaatatcaataaagtgagaggactgactatgcagccattcactcatttagtgg

SEQ ID NO: 703605 - DNA, 2312 bp, Homo sapiens
taaataaagataaaaggagttaactagaattaatggtaaaaaaggaaaaaaatagatcaaaggggattttccaacactgaatggtacccgggaaaataaaacatttccaccttctctggcgccctcttgtgcttcctagctgcaactgtcaagattgcgatgcttccaggagtgcaggacggtgatactggatctggatttatgttctgcgttgtacacacaaacctttataaactaaacttgtttttcttccctgtatgttactctaatcagtgcttatgtcaggaattgtaaaatatcctttaacctgggtttcctaggctgaaattgtccttatccatttgaagtcccttcagctcctgctcctgaagactcacacaatctatgaaatgcgtttttggaagtatgtctccctgtctgactgtgttatttgataagattgttctcattgcattctctctctctctctctttccctctccctcccctcctccatctaccctcttcctcctttctgaggccaaggctctgaattctttgaggagttaaaactgcaggaaattccttttggaagaataaaatacagccattctccttccacttttcctttatttaaaggcagcctccaagcagtgctgcttgttcttcattgtcttgcagagctttttgttcattccttagtaaaacaagcgttttggtttttcgggttcactgtgtgtgcaccacaggactgttacacaaagccatgggaaactagcagaagctcaggaagtaaatgtcattaagaaacagatcctacgttgtatttgaatcaccctccttcctttctgatggctaaatctttcttatgaggtgaaacttttcgtaccaggatctttcttttgtttggatgcgttatctcccaggaagctcctcagaccccagcaagtagactttgggtgtcctgtcccagtggctggataaacaggctcggatatttcaaattcttagttagaattaaactggaacttgttttatgtttacatgaaactgaataattagtgataatattaaaattaataataattggccgggcatggtggctcatgcctgtaatcccagcactgtgggagacgaggcgggtggatcacctgaggtcaggagatcaagaccagcctggccaacatggtgaaactctgtctctactaaaaatacaaaatgaatccataataatcataattcctgatttataaggatgttcataagtttttttttttttaaaggaggagagttgaaccccagtttgcttcaggccactacatggtctttctaaggtgaagactatgttcattttctttatggatattatatcttaataccatgtccttccacagtgaatttctcctttaactgggcagcagtatgactcaaggagtttttaaaactgctgttcctaattcagtaggtctagggcaaactcaggcatctttatttttctaaagcttcaagggatgtccatgtgtagtcagaattgcaaatcgccaccatgtggccacgtggtatactgtcacagcacacaaccagtgctgtgtggtatctgatttgaactttgctataaacctatgcaataagcaggtttgccattaccctcaacttacagataaaaagactaaaactaagagcttgaccaaaygtacatagctagtcagtatacaaactggggcttatacgtgggtcatatgactcaaaaacttatgctctttccatgttgttggagagaacaagattgattttttaaaaaataaggtctttcatatgcattacttcctcctctttcctgcagtggctacatcggtccatattttcatcatcccgtaggttactttggcaagagctttcaccagaagccccctcctgtctttatctcttccctgaacactaccttcggcttaatctttaaccattaagtgcagagttcatcaagtaactctttcgtttaaaaatgaccaatatttgtcctgtttaccgactatattagtccattctcctgctgttaatagacatacctgagactgggtaatttatgaaggaaagaggtttaattgactcacatttcagcgtggctggggaggcctcaggaaacttacaatcatggtggaaggggaagcaaacatatccttcttcacacaatgacaggagagagaagaatgagagctaagcaaaggcggaagccccttataaaaccatgagatcttgtgagaacttactatcatgagaatagcatgggagaaactgcccccacgattcaattactttccactgggtccctcccac

SEQ ID NO: 703606 - DNA, 2312 bp, Homo sapiens
taaataaagataaaaggagttaactagaattaatggtaaaaaaggaaaaaaatagatcaaaggggattttccaacactgaatggtacccgggaaaataaaacatttccaccttctctggcgccctcttgtgcttcctagctgcaactgtcaagattgcgatgcttccaggagtgcaggacggtgatactggatctggatttatgttctgcgttgtacacacaaacctttataaactaaacttgtttttcttccctgtatgttactctaatcagtgcttatgtcaggaattgtaaaatatcctttaacctgggtttcctaggctgaaattgtccttatccatttgaagtcccttcagctcctgctcctgaagactcacacaatctatgaaatgcgtttttggaagtatgtctccctgtctgactgtgttatttgataagattgttctcattgcattctctctctctctctctttccctctccctcccctcctccatctaccctcttcctcctttctgaggccaaggctctgaattctttgaggagttaaaactgcaggaaattccttttggaagaataaaatacagccattctccttccacttttcctttatttaaaggcagcctccaagcagtgctgcttgttcttcattgtcttgcagagctttttgttcattccttagtaaaacaagcgttttggtttttcgggttcactgtgtgtgcaccacaggactgttacacaaagccatgggaaactagcagaagctcaggaagtaaatgtcattaagaaacagatcctacgttgtatttgaatcaccctccttcctttctgatggctaaatctttcttatgaggtgaaacttttcgtaccaggatctttcttttgtttggatgcgttatctcccaggaagctcctcagaccccagcaagtagactttgggtgtcctgtcccagtggctggataaacaggctcggatatttcaaattcttagttagaattaaactggaacttgttttatgtttacatgaaactgaataattagtgataatattaaaattaataataattggccgggcatggtggctcatgcctgtaatcccagcactgtgggagacgaggcgggtggatcacctgaggtcaggagatcaagaccagcctggccaacatggtgaaactctgtctctactaaaaatacaaaatgaatccataataatcataattcctgatttataaggatgttcataagtttttttttttttaaaggaggagagttgaaccccagtttgcttcaggccactacatggtctttctaaggtgaagactatgttcattttctttatggatattatatcttaataccatgtccttccacagtgaatttctcctttaactgggcagcagtatgactcaaggagtttttaaaactgctgttcctaattcagtaggtctagggcaaactcaggcatctttatttttctaaagcttcaagggatgtccatgtgtagtcagaattgcaaatcgccaccatgtggccacgtggtatactgtcacagcacacaaccagtgctgtgtggtatctgatttgaactttgctataaacctatgcaataagcaggtttgccattaccctcaacttacagataaaaagactaaaactaagagcttgaccaaacgtacatagctagtcagtatacaaactggggcttatacgtgggtcatatgactcaaaaacttatgctctttccatgttgttggagagaacaagattgattttttaaaaaataaggtctttcatatgcattacttcctcctctttcctgcagtggctacatcggtccatattttcatcatcccgtaggttactttggcaagagctttcaccagaagccccctcctgtctttatctcttccctgaacactaccttcggcttaatctttaaccattaagtgcagagttcatcaagtaactctttcgtttaaaaatgaccaatatttgtcctgtttaccgactatattagtccattctcmtgctgttaatagacatacctgagactgggtaatttatgaaggaaagaggtttaattgactcacatttcagcgtggctggggaggcctcaggaaacttacaatcatggtggaaggggaagcaaacatatccttcttcacacaatgacaggagagagaagaatgagagctaagcaaaggcggaagccccttataaaaccatgagatcttgtgagaacttactatcatgagaatagcatgggagaaactgcccccacgattcaattactttccactgggtccctcccac

SEQ ID NO: 703607 - DNA, 1695 bp, Homo sapiens
gtatagtactaagaatagcaaaatgtgcataaatttttaaaagataaaacgttaagacttttaagaaagttgaggccagacgcagtggctcacacctgtaatcccagcactttgggaggctgagatgggctgatcatttgaactcaggagtttgagaccagcctgggcaacatggcaaaaccccatctctaccaaaaatacaaaaattagccaggcatggtggctcatgcctctagtcccagttacttggcggggcagaggctgcagcgagccaagatcatgccactgcactccagcctgggaacctgtctcaaaaaaaaaaaaaagaaaagaaagttgagtctgtaactagaatactgcttcaggatagatttctccaaatctctacacaaataaaagctcttctttccgctcagtcattagggagactgacggaaaagtttaagaatcactgcctccaagtctcttccaatgctaagctgccatgctgacagtcaaggctggagatgccatatctcattccatttgttgctggataattaatagagaggaagacattggaaattacctttccaatcattcctgtttactaaatatattcctgcagtcccgtagccatacaaatgcataatatgatgcatttgatggtttttgtattatataatattttatattctttagtactgccaaatagctagggttctccaaagtgtatgaaaaacagaaacttgcacaaaccttaacttgtagatataaaaaattgcttgatttatcagctcctttagaggatagcaagttgaaatgtttgcaccctccagcttttgccagctctgcagacttcagcacataatctcggtcaacacgaacaaatccctcctaagggggaaaaggacatgagttatttccaaaaagcagcaagttcatcttaaagattactacttggcttgggtagcaggctgggaggcctagaaggatggagatctaaataaaatgtgtccaagcaatacatgaaagtcaggcttagaccctgggaaaggctccaggtctggtcctctggataggcacaccagctttagcagcaagactggactgcaataaggaaacaaggacaatgacattgaaacacagacaccaaacaaatctgcaaagaacaaagggaacagtaagatcaggctgagaaactacttttaagccagacttttttttttgtcttaataacttcacaactttacactcctgttttctgtgtcaattctaatgtggtagggtctccgagtaygggtgaggacactccccaggcactaagagaacaaagtctatttaattcccaatttttgtgtatgctctacaatgtacctcacacattagtaaagaatgcatcctcaaacgtttttattaatgggtctctagtcaaaagtgtttggagacacccaatctagattcagtccagtgaaggcagtggctgggtcttttttcttaattcatctctcagcatcagcacatgtccagcatatggtagatgctccaaaaatgaatgaacaaaacgccaatgaaagcagagaaaaggtaaatccagtcagaaacaaacagaactaagtggcaataaaagggggagggaagagaatgacacaaataacagaatatagactcacttccagggcctaactgaaaagcatgcacctttacccagaaaag

SEQ ID NO: 703608 - DNA, 1695 bp, Homo sapiens
gtatagtactaagaatagcaaaatgtgcataaatttttaaaagataaaacgttaagacttttaagaaagttgaggccagacgcagtggctcacacctgtaatcccagcactttgggaggctgagatgggctgatcatttgaactcaggagtttgagaccagcctgggcaacatggcaaaaccccatctctaccaaaaatacaaaaattagccaggcatggtggctcatgcctctagtcccagttacttggcggggcagaggctgcagcgagccaagatcatgccactgcactccagcctgggaacctgtctcaaaaaaaaaaaaaagaaaagaaagttgagtctgtaactagaatactgcttcaggatagatttctccaaatctctacacaaataaaagctcttctttccgctcagtcattagggagactgacggaaaagtttaagaatcactgcctccaagtctcttccaatgctaagctgccatgctgacagtcaaggctggagatgccatatctcattccatttgttgctggataattaatagagaggaagacattggaaattacctttccaatcattcctgtttactaaatatattcctgcagtcccgtagccatacaaatgcataatatgatgcatttgatggtttttgtattatataatattttatattctttagtactgccaaatagctagggttctccaaagtgtatgaaaaacagaaacttgcacaaaccttaacttgtagatataaaaaattgcttgatttatcagctcctttagaggatagcaagttgaaatgtttgcaccctccagcttttgccagctctgcagacttcagcacataatctcggtcaacacgaacaaatccctcctaagggggaaaaggacatgagttatttccaaaaagcagcaagttcatcttaaagattactacttggcttgggtagcaggctgggaggcctagaaggatggagatctaaataaaatgtgtccaagcaatacatgaaagtcaggcttagaccctgggaaaggctccaggtctggtcctctggataggcacaccagctttagcagcaagactggactgcaataaggaaacaaggacaatgacattgaaacacagacaccaaacaaatctgcaaagaacaaagggaacagtaagatcaggctgagaaactacttttaagccagacttttttttttgtcttaataacttcacaactttacactcctgttttctgtgtcaattctaatgtggtagggtctccgagtatgggtgaggacactccccaggcactaagagaacaaagtctatttaattcccaatttttgtgtatgctctacaatgtacctcacacattagtaaagaatgcatcctcaaacgtttttattaatgggtctctartcaaaagtgtttggagacacccaatctagattcagtccagtgaaggcagtggctgggtcttttttcttaattcatctctcagcatcagcacatgtccagcatatggtagatgctccaaaaatgaatgaacaaaacgccaatgaaagcagagaaaaggtaaatccagtcagaaacaaacagaactaagtggcaataaaagggggagggaagagaatgacacaaataacagaatatagactcacttccagggcctaactgaaaagcatgcacctttacccagaaaag

SEQ ID NO: 703609 - DNA, 2080 bp, Homo sapiens
tcagggttttcagattgggactgaattaatttcatgcctaggatgtttcctataaccaattactataaataaatctctttcattggtctaaatacttattatttattcatgtcagtttcattttaacttccaggaaatcaagtattgttagaaattaccttaataaaatactttgacatatcaaatatcttgtttacttataaggccagccataaattatttcctgaaggaatgtattttgtgaatattttaaaatacaaactttctccatttttgttgggtaactggcaaaataattttctattgaactctaaaatgctaaagttctcttctacactcaaaatagtttctttaattaaaaaattgtgataaaaatacttaacaaatgtagtcctaaaactcagcattttataggttcaaaaagactgctaatttaatgttccagtttaaagctaagttgttttctagaaaattttccatacataaatatatgtaatttgtattttcagtaaactttaaaaacttcctcttctaagatcttgtatgcaaaatatcaaaataacaaaaactttgcaactttgatagccacttcgatactctggcagatttacatggtgttctccacatttacagatttgtttggttttgtgcagaagagtcatttggtgaaatgaaccaagacaagaaattctcccaacagggcctatgcagccaagaatcaagttgcaaagtaacacacagcaggagagatgaaatagagaaattagtccacaacaaaacaagaaaattgctcaaggaacttggagctggcagtctcgcaatgtgaaaggttaatcacaagatttaaaatctaatcttgctttcaaaggcagttcatgtaattgcatacattgtgaaggaacatgagaacagtgggaacagaaaaaaaatttaaacaagcgggcttgatataagctgtaaatttaatatggagaaatgtaaaaagttagcaagagtaagcacagacctcagtaaagggtcagcccgggasctgggacagcagaaatggccacaaatcgccaccttgaaaggaaaagaaagtttaaattttggataaacatgtattcggatgggatactccctaaaagacccattaaattaaattccattcattcatgttgtctaacccatatttataggggacctatcatttgctgatatcgtgggaatacgcagataaatgagacactagaggaagaaagtcatagttccttagagcacgaagcagaaagtttggaagtggaagaactcactccataaaggggatggcatttaaactatgccttgaagaagggcaggacttggtcatacggaggtgggaatgggaaaacacagctggcagaggcaacttcaggagcaggacactagactatgcacagaagccagggagcacttcaggctgaacagcagtggcttcctatgtgggaacagtgggggctggaaaggtaagaggcctggaggagtttcgcttaattctatggaaagcaggaaaccttcccctggaggttttagagtccaagaataatatgatgctaaaggttaatttatttatttttaaaattaattttttttttgagacagcatctctgtctactagactagagtgcagtggcacgatcttggctcactgcaacctccgcctcctgggttcaagcaattctcctgcctcagactcccaagtagctgggattacaggtgtctgccaccatgcctggctaatttttgtatttttagtagagacagagtttcgccatgttggccaggctggtcttgaactcttgacctcaggtgatccgcccgcctcagcctcacaaagtgctgggattataggcgtgagccactgcgctcggcccaaaggttaatttgacatctattgtgaggcaatctagaagaggaagaggataatataatcttagcagaatatatttcaatatagcaaaaatgtagaggtctatattcttggactagaaagtacagaagccgtatttatgagttaagtgtttctaaattccaagactactacttcttgttaactggaaaa

SEQ ID NO: 703610 - DNA, 633 bp, Homo sapiens
tgtggcttccaatgttgctaaaatgcctgcctctgggtatctgttccctatgtaattgatcttcaaaatccttccgttgtgaaaattatatagttctatttctgttcaatcatcaagttcaaatgaacaactactttattgtggaattgcatttgtaagggaaaaatcttaattttgatatttgatactacagagtctactgcagtaattggttaatttcttctcctggtggcaatggcagtgtgaccttccaattaagggctattcattctggtccttacagcaaattgatattgttatcacagaattaaaatgttgtgttcttatgttttctactacctcttcctgcctctctgcaaatgcctagaccgtctggatttcataaactttcttgaagctctttccatgatgaagaattgyagtccctatcgcagttgcatccaaggaacatctgctcagagaagccagtcaatattgtggaaaagttcaaagaatgtagatcattactagtgtcagctttacaaacaggaggtaatggcgttaaagggaatggtcataatacccaacaatagtaacctcattaaccagtgatttatcatgatgaaaagacctgtttaacctttggtctccaca

SEQ ID NO: 703611 - DNA, 596 bp, Homo sapiens
gtctttaagaataaaaattcagggccacgtgtagtggctcatgcytgtaattccagctactcaggaggctgaggcaggaagatagcttgaacctattcaaagcaatatgcaagatatttgatatttggataacataaataaaagcaacatgttttcttaaagatagcataaaatatttaacttataaccaaaatctggggctcaggtttacccctgaatacaagtcttataaaggatgaccttttttcaaacatctcttatacccctgtgtcagtaataaaaccatgagagcaagcaacttcaatgcctgtcatcacattcagaaagctggattctttctaaactccttcagttaaaagtcctccagttggtcttatttactgtggtcagatgatcaaatagtagggtctctcgcctcagggatccagggtataaattacagagaaggcacaagcgaactgagtttggtggcttcagttgagaccctgatggacatttgtctactccacaaaagcctctgtacaattgggttcaatttgtcacaattgacagtttctgctctaaagaatctggagtggcacagatgttatagtttg

SEQ ID NO: 703612 - DNA, 2080 bp, Homo sapiens
tactaagccatctagtgcacctatatcaaattattcatcaagtgctcttgaaaattttccataaggagaaacttagaaactaccagcttaacagagtgaattttaaagcttgagctttccttattgggatgaaaatgcttctcggcctggcgcgatagctcacgcctgtaatctcagcacttcgggaggccraggcgggcagatcaagaggtcaggagatggagaccatcctggctaacatggcgaaaccacatctctactaaaaatacaaaaaattagccgggcatggtggcacgcgcctgtagtcccagctactcaggaggttgagtcaggagaatcgcttgaacctgggaggcggaggttgcagtgaaccgagatcacgccactgcactccagcctgggcgacagagtgagacttcatttcaaaaataaaaataaatttaaaaaaaaaattaaaaaaaaaaagaaaatgcttctcatagtatactataagaaatttggaaaagtttatttaccataagtatttctggtaaatagtgacaattcaaatactaacactgattttatttaaacaattacatttttaaaaggcctcatttagatcgtcataattttgcagaagaagagttagaaacgtattttcaatggtggggatggtgattcctgtttctaacccacagaagcacaattattacaaataaaaataaaaagccaagcatgcaagccagccagaaagcaagaaaaaaacagacaaaaaagcaagtttgaacaaaagcctattgggaaggcaaggggctcactagactataagtcattaattgaatcacacaatgatgccttagttcagagaagttttattttattttttaaggttttagcctgtttccttcattactttgatttagacccattattgaaaataatttaagaagataatgtcattatttgcataagacttctgcccccttgaaagccactatgcatgagaaagacagaaaaatacagagaaagatactcaaaaagtacaaatatctatggaaaatttctcacattagggaatgccaatgacacaatatgtatttttgtattcaactgacacttaaaaataaaggcttcttttcaaatctaacatttttgttaaaagtaattatttaaattctgccattaattagttttgccttttattcaacaaggctttttaaaaataatttgaggttaaattattcatctcttataaatcatttatgcatacatttcttagatcatacctgtgcatgatcaagtacatctattcttgttttccagatgacatgatgtctctacaaacaaatgccttttccaaatctacaatttgtcataggtaaaataagtcactctcatgaattctaggtagagtgagggaagactatagtgtaaaactaagttccatgctcagggatcttcctttcaaaatcgtccaatctcccttaaataaaatgctacaatagcactatttatagctgtagaatgagagaaatttggagcttggtctcactgagatgtcatattactgtccttaatcatgaagcaacaagaacaatcttgaagctggaagttgcctaaagaaaaaaaagaaaagagctagattctaaagaaaagcattagcaaggctgctcaacaatttagagctttagaaatagtgaaatcagtcatcatcctcataaagttagcaattccttgctgaaactcagactttctgttctaaaatcttaagaggaactcaaattctcattattttagatggaaaacattataaatgttacaggaatatttaaaactcttgaaacaacttccaaaaatgtaaataaactctttagaatgccaagaagaagtatcaaactattatctaaaaatatgaaatgcttacacattgctacctagtctccaaaatgtcaatatggttattaacaaacaggctgggcgctgtggctcaggcctgtaatcccagcactttgggaggccgaggtgggtggatcaactgaggtaaggagtttgagacagcctggtggacaacatggtgaaaacccgtctctactaaaaa

SEQ ID NO: 703613 - DNA, 2080 bp, Homo sapiens
tactaagccatctagtgcacctatatcaaattattcatcaagtgctcttgaaaattttccataaggagaaacttagaaactaccagcttaacagagtgaattttaaagcttgagctttccttattgggatgaaaatgcttctcggcctggcgcgatagctcacgcctgtaatctcagcacttcgggaggccgaggcgggcagatcaagaggtcaggagatggagaccatcctggctaacatggcgaaaccacatctctactaaaaatacraaaaattagccgggcatggtggcacgcgcctgtagtcccagctactcaggaggttgagtcaggagaatcgcttgaacctgggaggcggaggttgcagtgaaccgagatcacgccactgcactccagcctgggcgacagagtgagacttcatttcaaaaataaaaataaatttaaaaaaaaaattaaaaaaaaaaagaaaatgcttctcatagtatactataagaaatttggaaaagtttatttaccataagtatttctggtaaatagtgacaattcaaatactaacactgattttatttaaacaattacatttttaaaaggcctcatttagatcgtcataattttgcagaagaagagttagaaacgtattttcaatggtggggatggtgattcctgtttctaacccacagaagcacaattattacaaataaaaataaaaagccaagcatgcaagccagccagaaagcaagaaaaaaacagacaaaaaagcaagtttgaacaaaagcctattgggaaggcaaggggctcactagactataagtcattaattgaatcacacaatgatgccttagttcagagaagttttattttattttttaaggttttagcctgtttccttcattactttgatttagacccattattgaaaataatttaagaagataatgtcattatttgcataagacttctgcccccttgaaagccactatgcatgagaaagacagaaaaatacagagaaagatactcaaaaagtacaaatatctatggaaaatttctcacattagggaatgccaatgacacaatatgtatttttgtattcaactgacacttaaaaataaaggcttcttttcaaatctaacatttttgttaaaagtaattatttaaattctgccattaattagttttgccttttattcaacaaggctttttaaaaataatttgaggttaaattattcatctcttataaatcatttatgcatacatttcttagatcatacctgtgcatgatcaagtacatctattcttgttttccagatgacatgatgtctctacaaacaaatgccttttccaaatctacaatttgtcataggtaaaataagtcactctcatgaattctaggtagagtgagggaagactatagtgtaaaactaagttccatgctcagggatcttcctttcaaaatcgtccaatctcccttaaataaaatgctacaatagcactatttatagctgtagaatgagagaaatttggagcttggtctcactgagatgtcatattactgtccttaatcatgaagcaacaagaacaatcttgaagctggaagttgcctaaagaaaaaaaagaaaagagctagattctaaagaaaagcattagcaaggctgctcaacaatttagagctttagaaatagtgaaatcagtcatcatcctcataaagttagcaattccttgctgaaactcagactttctgttctaaaatcttaagaggaactcaaattctcattattttagatggaaaacattataaatgttacaggaatatttaaaactcttgaaacaacttccaaaaatgtaaataaactctttagaatgccaagaagaagtatcaaactattatctaaaaatatgaaatgcttacacattgctacctagtctccaaaatgtcaatatggttattaacaaacaggctgggcgctgtggctcaggcctgtaatcccagcactttgggaggccgaggtgggtggatcaactgaggtaaggagtttgagacagcctggtggacaacatggtgaaaacccgtctctactaaaaa

SEQ ID NO: 703614 - DNA, 2080 bp, Homo sapiens
tactaagccatctagtgcacctatatcaaattattcatcaagtgctcttgaaaattttccataaggagaaacttagaaactaccagcttaacagagtgaattttaaagcttgagctttccttattgggatgaaaatgcttctcggcctggcgcgatagctcacgcctgtaatctcagcacttcgggaggccgaggcgggcagatcaagaggtcaggagatggagaccatcctggctaacatggcgaaaccacatctctactaaaaatacaaaaaattagccgggcatggtggcacgcgcctgtagtcccagctactcaggaggttgagtcaggagaatcgcttgaacctgggaggcggaggttgcagtgaaccgagatcacgccactgcactccagcctgggcgacagagtgagacttcatttcaaaaataaaaataaatttaaaaaaaaaattaaaaaaaaaaagaaaatgcttctcatagtatactataagaaatttggaaaagtttatttaccataagtatttctggtaaatagtgacaattcaaatactaacactgattttatttaaacaattacatttttaaaaggcctcatttagatcgtcataattttgcagaagaagagttagaaacgtattttcaatggtggggatggtgattcctgtttctaacccacagaagcacaattattacaaataaaaataaaaagccaagcatgcaagccagccagaaagcaagaaaaaaacagacaaaaaagcaagtttgaacaaaagcctattgggaaggcaaggggctcactagactataagtcattaattgaatcacacaatgatgccttagttcagagaagttttattttattttttaaggttttagcctgtttccttcattactttgatttagacccattattgaaaataatttaagaagataatgtcattatttgcataagacttctgcccccttgaaagccactatgcatgagaaagacagaaaaatacagagaaagatactcaaaaagtacaaatatctatggaaaatttctcacattagggaatgccaatgacacaatatgtatttttgtattcaactgacacttaaaaataaaggcttcttttcaaatctaacatttttgttaaaagtaattatttaaattctgccattaattagttttgccttttattcaacaaggctttttaaaaataatttgaggttaaattattcatctcttataaatcatttatgcatacatttcttagatcatacctgtgcatgatcaagtacatctattcttgttttccagatgacawgatgtctctacaaacaaatgccttttccaaatctacaatttgtcataggtaaaataagtcactctcatgaattctaggtagagtgagggaagactatagtgtaaaactaagttccatgctcagggatcttcctttcaaaatcgtccaatctcccttaaataaaatgctacaatagcactatttatagctgtagaatgagagaaatttggagcttggtctcactgagatgtcatattactgtccttaatcatgaagcaacaagaacaatcttgaagctggaagttgcctaaagaaaaaaaagaaaagagctagattctaaagaaaagcattagcaaggctgctcaacaatttagagctttagaaatagtgaaatcagtcatcatcctcataaagttagcaattccttgctgaaactcagactttctgttctaaaatcttaagaggaactcaaattctcattattttagatggaaaacattataaatgttacaggaatatttaaaactcttgaaacaacttccaaaaatgtaaataaactctttagaatgccaagaagaagtatcaaactattatctaaaaatatgaaatgcttacacattgctacctagtctccaaaatgtcaatatggttattaacaaacaggctgggcgctgtggctcaggcctgtaatcccagcactttgggaggccgaggtgggtggatcaactgaggtaaggagtttgagacagcctggtggacaacatggtgaaaacccgtctctactaaaaa

SEQ ID NO: 703615 - DNA, 1303 bp, Homo sapiens
ttttagttgacaagactcagttatgtatactcttctttgccccttatactaatcactgtgtgctgataacaatgtgaagctttggcttttctcttttggccatgcgaagtacacaagttctcactgtgattttaaccggttacataggagatgaggaagaattttttttgacattctgaacatctatcaaaaaatgtatcatcatattataacctaaactgtcaggctattatattaattcctttgaaagatttcaatttagctaaagtttcaagtagtgataatcttggttcttaatggatattattctagtagcatatccagacatacacaaaaaaatcactttctcaagtgttaaatatatttgaagataacttcagaaaaccattatgagatgatgatgatcttagattatagtcacaaaaagtctttatttctaaaacatcaggatataggtacatgtatttgcttttatatgtatgtgtattatacacgtaaatataaacacacaggtatacacacaaaagtgactgtgtgtgtgtatgcatagatataaaatcattatatgtayatataaaaacattctcttttgctagcctatgtttttccatcactggagagtctgctttaattttacataaactcttgtctggaatcaagtaatttaagtaattaacaatttatttaattagtcttagttataggaaacatcactcaaatttaaattcatatttattggttactaaaattttaattttaatagctctattagacaaaaattgattgtaatctccttcaaattttaatagtcattcattcagatatttgtatcaagaaacagttattgagacttgagataaagcagtaatgaagagagatgtggctcctttccttcatagatcttccattttattagaggaggaggcaggatattataattaagtaaacaaattaataatcaagataattcccaagattgttaagtgtcctaaagaaaatcaaactaaaggttggaatagagagttgattggttctgggaggttccaatttaagtagtcaaaggaggcgactcttctatgttacactcaaactgaattatgagaagctaggtgtgtagaaatcaaacagaagagaattgaagatgacaattctcttcaattgaagagaattgaagagaagaggtctgagatgttagaacagagaagtggtcattccatatggcaacatgaagattatttttgctgttcatataagatgaataaatgaagtggaggagcccaaattcctcttactcagggttaag

SEQ ID NO: 703616 - DNA, 632 bp, Homo sapiens
tttttgagacggagtcttgctctgttgcccagcctggagtgcagtggcacgatcttggctcactgcaatctccgcctcccaggttcaagcaattctctgcctcagcctcctgagtagctgggattacaggtgcctgccaccacgcctggctaattttttgtatttttagtacagacagggtttcaccatcttggccaggctggtcttgaacycctgaccttgtgatccactcgcctcgacctccaaaagtgctggggttacagacatgagccatcacacccggccaactcctgcatcttttagggcagggagatgttcaagccataacaccccctcacaggattgtcaaatggatgaaatgagctaacgcatgctgtgccaggcacaaagtcatcactcagtgaatgttctttattatcatattgttattatttctctgcacagtggctgccagtgtgctgcactgggtcctatggggtggccatcccagggtagtgcaagtgccccacaaatccctgaaatgtgaccagcagtggctccagaatttcacagtaaggaggaacttgggggcgtgggagggagatcaggttggaaggggctcagcacgctcactgatggatctaagctctcat

SEQ ID NO: 703617 - DNA, 632 bp, Homo sapiens
tttttgagacggagtcttgctctgttgcccagcctggagtgcagtggcacgatcttggctcactgcaatctccgcctcccaggttcaagcaattctctgcctcagcctcctgagtagctgggattacaggtgcctgccaccacgcctggctaattttttgtatttttagtacagacagggtttcaccatcttggccaggctggtcttgaacccctgaccttgtgatccactcgcctcgacctccaaaagtgctggggttacagacatgagccatcacacccggccaactcctgcatcttttagggcagggagatgttcaagccataacaccscctcacaggattgtcaaatggatgaaatgagctaacgcatgctgtgccaggcacaaagtcatcactcagtgaatgttctttattatcatattgttattatttctctgcacagtggctgccagtgtgctgcactgggtcctatggggtggccatcccagggtagtgcaagtgccccacaaatccctgaaatgtgaccagcagtggctccagaatttcacagtaaggaggaacttgggggcgtgggagggagatcaggttggaaggggctcagcacgctcactgatggatctaagctctcat

SEQ ID NO: 703618 - DNA, 621 bp, Homo sapiens
ataagataaatacaagagtctctagacatataattcccaattctccactgttactcataaaattgagaagaaaaaatgtcttcacaactcaaaagtattagccattgccttttctaacaaaagggaacaaccgcttattccagacatgatagckgtgctttggaattctcagaatacaagggctatagagaatgacttcacctctccagagaactaaagataagattgggaaagagcatctgtaatttaatgttataaccagaagaaaatgagaatagatggggttgaacatgtcagagcagtaaaaggcagtgaaattatggaacgcagccaaatgccaggaaatacatagattataacatagagattaataatgccctttctcaaattaactttttttcctttcctgttctgatatttcaggtttggtattatgttttgatataactgttcatggattaaatcaagtacgatttttctgtttttatcttttttttaagttcacaacctgatatgaaagtcctccagcatgaaaagcatgcactcagactgtggagacatgcctgactgtctatttcaacacaactcgtgctcagggctgtatgtaagcacagagcagaa

SEQ ID NO: 703619 - DNA, 621 bp, Homo sapiens
ataagataaatacaagagtctctagacatataattcccaattctccactgttactcataaaattgagaagaaaaaatgtcttcacaactcaaaagtattagccattgccttttctaacaaaagggaacaaccgcttattccagacatgatagcggtgctttggaattctcagaatacaagggctatagagaatgacttcacctctccagagaactaaagataagattgggaaasagcatctgtaatttaatgttataaccagaagaaaatgagaatagatggggttgaacatgtcagagcagtaaaaggcagtgaaattatggaacgcagccaaatgccaggaaatacatagattataacatagagattaataatgccctttctcaaattaactttttttcctttcctgttctgatatttcaggtttggtattatgttttgatataactgttcatggattaaatcaagtacgatttttctgtttttatcttttttttaagttcacaacctgatatgaaagtcctccagcatgaaaagcatgcactcagactgtggagacatgcctgactgtctatttcaacacaactcgtgctcagggctgtatgtaagcacagagcagaa

SEQ ID NO: 703620 - DNA, 610 bp, Homo sapiens
ctctacactccatcaacaaggctccttcaccctctggctttgttcctcctcctgccagttgaaagcgtaggcagaaaatgagtaggcagtgacatgctgggaagctagaggttgggtgtctacttccttagctcactttctgtcgggtcacagtggccttggcagtgttcctgaacagtttctgatgggcactggtgcctgacactacagctgacattggtgttkgtaactgctctctccctatctctttaaagctttaagtagtaatagtatcttcctattgcttgtccctctggcttctccatctctccttcagtgtctcttaacccagcaagcacttatatatagtcacttaatttaactttctatattgtctttcatcccaatgtgtaacatacatgcagtaaattgtgtataatgaatatgttttaggcgtataccatcattggtcttacagttatatatttgtgtaactacacccgaggtgaagatgcatctagcatctcataaagttaccacatgctattcttggtttaccatcatcactccccaccttgtgtcctgtgggcagcctggccaataaagtggaaagactgaataaatgatgtga

SEQ ID NO: 703621 - DNA, 324 bp, Homo sapiens
actcatgaatgaatggtaatacatctacctgattcttgtgatagtattcttyatatacagggaatttgataaatgcatagaatataactgaataactttgtacatgcctattgctacaaattagaacttttactatgtcagctgctcaaaagtttgcttgcaactctgatggtaatagacgggtgtctccatgaataattagtgagacaattataaacaaaactgtttacatgttacagcaccatcacaatttaaaaaccagattattaataaatgcaatatataattgtagttgaaacaaataacctgagattacattgatta

SEQ ID NO: 703622 - DNA, 652 bp, Homo sapiens
tcatctgtggcctcttccccctctctttccttccttttattcccagggctggttcagggtttataatcatcaggctgactataaagcacccaagtattttcttttctcttcaggattcagagagtgtcctcagttctaaagtccctttcataagcaaataatcacctaattttacagactttaggcccagttcttatctttcttaagactagtctttttaaatcctctttaatttgttcctctagtctagtttctggcctgcttcttctgtttccctttccaccttttgtctccagctcttggttattgaaaccatcagcattattttgacaacagtagtgctatttatttgttcccctatttgttaggtgctgggtattttattgttgttgttctttttaatttttttttttttggtcaattccctctccrtgactcagtttccttatctgtaaaatagggataataataaagagctattgtaaggatgaacaagttaatttttgtaaaacacttagaacagtgcctgtatgtaataagtgccaaacatgtatgtaaaagtaagtaaaaatagcttactgttatttatagtaagctgttggcttggaaatacaagtggggtcagaggtgagtggaagaagtggaaaatgag

SEQ ID NO: 703623 - DNA, 652 bp, Homo sapiens
tcatctgtggcctcttccccctctctttccttccttttattcccagggctggttcagggtttataatcatcaggctgactataaagcacccaagtattttcttttctcttcaggattcagagagtgtcctcagttctaaagtccctttcataagcaaataatcacctaattttacagactttaggcccagttcttatctttcttaagactagtctttttaaatcctctttaatttgttcctctagtctagtttctggcctgcttcttctgtttccctttccaccttttgtctccagctcttggttattgaaaccatcagcattattttgacaacagtagtgctatttatttgttcccctatttgttaggtgctgggtattttattgttgttgttctttttaatttttttttttttggtcaattccctctccgtgactcagtttccttatctgtaaaatagggataataataaagagctattgtaaggatgaacaagttaatttttgtaaaacacttagaacagtgcctgtatgtaataagtgccaaacatgtatgtaaaagtaagtaaaaatagcttactgttatttayagtaagctgttggcttggaaatacaagtggggtcagaggtgagtggaagaagtggaaaatgag

SEQ ID NO: 703624 - DNA, 663 bp, Homo sapiens
agagcatcaggacaaatagctaacacatacagggcttaaaacctagatgacgggttgataggagcagcaaaccaccatggcacatgtatacctatgtaacaaacctccatgttctgcacatgtatcccagaacttaaaataaaataaaaaaagattatactacttaaaagtcagagaatcctatgatttaattctgactttgctatgtgacaagtttcttggacaaagtttctttacctttctgaktctgtttctttctcagtaaacaacagatgatagtgcttagatagtattgttgcaaatgctaatgagtaatatttgtaaaggacttatgtaagaaccaggtatgtagtaaattctcataaatttacatttgtttaaattgttattttggccattattatactttttatgtcataggaaaaaaccctgtgaaaatctatgtaagattgtggtgttgtcttctttatcaacttctgattctatgtacttatttgtggaacaagctatgtgaacctgtctggaataattgattgtagaaaatttttgtggtatgtaaggtgactactttaagttttgcttaaacctcaccaggtatctcttttcagttgtttctgtacttgctctgaaattgtaaacatgttgtcattatgtcattgagtg

SEQ ID NO: 703625 - DNA, 776 bp, Homo sapiens
  misc_feature 676, 677, 678, 679, 680, 681, 682, 683, 684, 685, 686, 687,688, 689, 690, 691, 692, 693, 694, 695, 696, 697, 698, 699,700, 701, 702, 703, 704, 705, 706, 707, 708, 709, 710, 711,712, 713, 714, 715, 716, 717, 718, 719, 720, 721, 722: n = A,T,C or G
  misc_feature 723, 724, 725, 726, 727, 728, 729, 730, 731, 732, 733, 734,735, 736, 737, 738, 739, 740, 741, 742, 743, 744, 745, 746,747, 748, 749, 750, 751, 752, 753, 754, 755, 756, 757, 758,759, 760, 761, 762, 763, 764, 765, 766, 767, 768, 769: n = A,T,C or G
  misc_feature 770, 771, 772, 773, 774, 775: n = A,T,C or G
tttaagataaactttttgtttgttttgttttgttttgttttgagacagagtcttgctctgtcacccaggagggagtgcagtggcacagtcttggctcactgcaacttccacctcccrggttcaagcaattctcctgcctcagcctcctgagtagctgggattacaggtgtgcaccaccatacccaactaatttttgtatttttagtagagacatgttggccaggctggtcttgaactcctgacctcaagtgatccgcccacctcggcctcccaaagtgctgggattagaggcatgagccaccgcgcacggccaagataaactttaaaaagaaaaaaagactttaattagctggaaatccactaaccagcactctgacttaattaggactataaactatcaggaaaagaaacaaatgataacaaaaaaagataaaaataatagctatttattgtgtcacttccatatgccaggaagttattgcgtatactttttacaccaaccctggggaaactctaaatgtcaaagaggttaagtaagctagctaagagcatacctccatttacaagtgagtcaaaactcaacctcaggttctatgctctacagagctattctatacgcctaagttttgtcgtgtattgccataacaaaatacctgaggatgtgtaatttaaaaannnnnnnnnnnnnnnnnnnnnnnnnnnnnnnnnnnnnnnnnnnnnnnnnnnnnnnnnnnnnnnnnnnnnnnnnnnnnnnnnnnnnnnnnnnnnnnnnnnnc

SEQ ID NO: 703626 - DNA, 538 bp, Homo sapiens
ccgggttagtctcctgaatatcttttgctgctactttggtcagcgttgttgtcagtttaccttgtggtggccaagcccttaaatgcactattaggttatgcagtgtaattctgcagggcagaagggtaaagagccatagtgaagagcaaaaatacctcttatcttgaccgggaattraacccgggtctcccgcgtgggaggcgagaattctaccactgaaccaccagtgcctctctctagcaaccctgggagaattatcaaaaagagtatccagaaagacttagaaacttccaagcggccttttcaagtgtcgactcaaagctaacaaagacatccaaaccaaatgtttttataggaaacttttactaaacaaagttataaatatcaaaatagctcatttgtcggatcaaactcttaactctgaaaaaggtctttctacctgcattacatacccctataataaaacgtcacaaattcattcatgtttcttttttctaatcctaaatcttcaattgtcaacgtcaaactgctgccttag

SEQ ID NO: 703627 - DNA, 538 bp, Homo sapiens
ccgggttagtctcctgaatatcttttgctgctactttggtcagcgttgttgtcagtttaccttgtggtggccaagcccttaaatgcactattaggttatgcagtgtaattctgcagggcagaagggtaaagagccatagtgaagagcaaaaatacctcttatcttgaccgggaattaaacccgggtctcccgcgtgggaggcgagaattctrccactgaaccaccagtgcctctctctagcaaccctgggagaattatcaaaaagagtatccagaaagacttagaaacttccaagcggccttttcaagtgtcgactcaaagctaacaaagacatccaaaccaaatgtttttataggaaacttttactaaacaaagttataaatatcaaaatagctcatttgtcggatcaaactcttaactctgaaaaaggtctttctacctgcattacatacccctataataaaacgtcacaaattcattcatgtttcttttttctaatcctaaatcttcaattgtcaacgtcaaactgctgccttag

SEQ ID NO: 703628 - DNA, 538 bp, Homo sapiens
ccgggttagtctcctgaatatcttttgctgctactttggtcagcgttgttgtcagtttaccttgtggtggccaagcccttaaatgcactattaggttatgcagtgtaattctgcagggcagaagggtaaagagccatagtgaagagcaaaaatacctcttatcttgaccgggaattaaacccgggtctcccgcgtgggaggcgagaattctaccactgaaccaccagtgcctctctctagcaaccctgggagaattatcaaaaagagtatccagaaagacttagaaacttccaagyggccttttcaagtgtcgactcaaagctaacaaagacatccaaaccaaatgtttttataggaaacttttactaaacaaagttataaatatcaaaatagctcatttgtcggatcaaactcttaactctgaaaaaggtctttctacctgcattacatacccctataataaaacgtcacaaattcattcatgtttcttttttctaatcctaaatcttcaattgtcaacgtcaaactgctgccttag

SEQ ID NO: 703629 - DNA, 597 bp, Homo sapiens
ttatgtatgttgaagagaatatatgaatatatataaaaccttcattatcacattattctcaatccagcattttctcagcccctgattttcatgttagttcagcattcttacatctttacagattttcatctaagactacatttctattgttttatataatcagcccccctaagatcaacatgtccacattttttggcaaagacaaagcctactgatttcaggrtcattattttcctttttcaaaagcacaaacccaaactgagaaataaatcaagagaaattctccttttttctatgctaatttagaagtagagtctttatttcttttcaaacccaaagagaatcagacatacaatatgaatttatctactttcacttgctcagactgagaggaaagattaatattttcaggctgttagtcaaaactgttcattcaaatattatttaataaaatccaagaaccagctaaaaagtcgcttaagctaagaaaccttcaccagcctcatgggaaattgtgtacagttttccactagaatagcctataaatgcttactgaaaatgtctaagttcatatcttggtaactaacattttaattc

SEQ ID NO: 703630 - DNA, 597 bp, Homo sapiens
ttatgtatgttgaagagaatatatgaatatatataaaaccttcattatcacattattctcaatccagcattttctcagcccctgattttcatgttagttcagcattcttacatctttacagattttcatctaagactacatttctattgttttatataatcagcccccctaagatcaacatgtccacattttttggcaaagacaaagcctactgatttcaggatcattmttttcctttttcaaaagcacaaacccaaactgagaaataaatcaagagaaattctccttttttctatgctaatttagaagtagagtctttatttcttttcaaacccaaagagaatcagacatacaatatgaatttatctactttcacttgctcagactgagaggaaagattaatattttcaggctgttagtcaaaactgttcattcaaatattatttaataaaatccaagaaccagctaaaaagtcgcttaagctaagaaaccttcaccagcctcatgggaaattgtgtacagttttccactagaatagcctataaatgcttactgaaaatgtctaagttcatatcttggtaactaacattttaattc

SEQ ID NO: 703631 - DNA, 597 bp, Homo sapiens
ttatgtatgttgaagagaatatatgaatatatataaaaccttcattatcacattattctcaatccagcattttctcagcccctgattttcatgttagttcagcattcttacatctttacagattttcatctaagactacatttctattgttttatataatcagcccccctaagatcaacatgtccacattttttggcaaagacaaagcctactgatttcaggatcattattttcctttttcaaaagcacaaacccaaactgagaaataaatcaagagaaattctccttttttctatgctaatttagaagtagagtctttatttcttttcaaacccaaagagaatcagacatacaatatgaatttatctactttcrcttgctcagactgagaggaaagattaatattttcaggctgttagtcaaaactgttcattcaaatattatttaataaaatccaagaaccagctaaaaagtcgcttaagctaagaaaccttcaccagcctcatgggaaattgtgtacagttttccactagaatagcctataaatgcttactgaaaatgtctaagttcatatcttggtaactaacattttaattc

SEQ ID NO: 703632 - DNA, 597 bp, Homo sapiens
ttatgtatgttgaagagaatatatgaatatatataaaaccttcattatcacattattctcaatccagcattttctcagcccctgattttcatgttagttcagcattcttacatctttacagattttcatctaagactacatttctattgttttatataatcagcccccctaagatcaacatgtccacattttttggcaaagacaaagcctactgatttcaggatcattattttcctttttcaaaagcacaaacccaaactgagaaataaatcaagagaaattctccttttttctatgctaatttagaagtagagtctttatttcttttcaaacccaaagagaatcagacatacaatatgaatttatctactttcacttgctcagactgagaggaaagattaatattttcaggctgttagtcaaaactgttcattcaaatattatttaataaaatccaagaaccagctaaaaagtcgcttaagctaagaaaccttcaccagcctcatgggaaattgtgtacagttttcyactagaatagcctataaatgcttactgaaaatgtctaagttcatatcttggtaactaacattttaattc

SEQ ID NO: 703633 - DNA, 2026 bp, Homo sapiens
taacaagaccccacttctaaaaaaaaagttaaaaaaataataatgatagcatttctgattttggataccaaagtaagagattatatatttataacatggaagtttaatttttttatattaggcacatcatatagcatgaggaatagaactgaaagtcacaaattactattagaaatccagcctttcacgtttcaagtatcaatcaaaatcataaaggaaatcttggtcaatgtgggaggttgtagtcaatagttggatagagactatttttccaactggcagcactgtttttgttttgttttgttttttaatcttcaactaatcaagctgtttgagaaggacaaggcgtctcttgtggtttttgtgttgcttaaaattctacatgatatcttaaggacagcaacattcaggttcctttctctgattattgaagtgaaaattaatgtccagtagtaatgaaattgttttttccacttaactattcaacagtttttactatcaaaataaaaatattaatggctttaaattatatattcacatgtcaattataggagttttaggcttctatcatacatattttcagtaagacactgctttttaaaactcccatttctaatactgttatagttccaataacatatccytaagtcatagcaattatataactaccatttttatcaagttatttctatcaaataacttattcaaattcatattttcttttccaattacttacattgccagcctttaaaaataaatatcttttggactattgtctgtctgtctaatttcctcataatgttcaatatgacctgtacaatgtttgcaatgttttcccttgaatctaacgaaatagccagttttattgaaatgtatgttcttagactgtgagaggcaaacttccctactcattatagagcaagtttgttccttatctcaaggtgtctctaaggaatttttgaaaagaaccctgcctttgatttcatctaatcatgagaacagtaaatcagactaataaattcaagtatacttgtatttgaaatttttagtaccatatatatatacatataaatacatacacatatagtcaataaatctatgatagttttcaatgcaagtcataaattcccaaaagcaacaaaatgactcattaaataaggtaaggcggtctctttaccttctaccccaaagtatcctttctttttctccatcagagtttcctgctattctgtcacataacacacatacacaaacatacacacacacacacacacacacaatattccaaccgacgtataaaattctttctcacacttctgttcttcttcgttcttttgtctaaccaaccaacaaatccctattcatatttcaaaattcaatttgaatatcaccccttttttgaagcttccccttaatattgcaaggcgtttttcttctttattctcacagacccttttaccggtgtttattttagcacatacattactgatagaaatattttctacttgttctcatccctctcgactgtgaacttttgaaggacaggacaaatgatcaattactctttttatgtaaagcccagcaaaacactgggcacattaaagataatttaataattattataaacaaattcggaagagttatttctcaaaatggtggatttcttaaactcttcatccttaggcatacctcaaactaatattttcatttacttgcaaactgtactcatttttaatcattatgccataaattaatagcttctctttcattataaagggttcttttaaaagtctttctatattctgagattgcttacggaaaatgccttatttttgtcccagtgagaaagaagaacaatacattctttcttcctccatatcattcctatacttatttcttttaaaatgttgcttatgtccaggcactgcttttaacaccaacataaagcaacgagcaaaaaatccaaagtctctatgctcatagagctgatattctagttggatgagacaaaaataaataaatcaaa

SEQ ID NO: 703634 - DNA, 2026 bp, Homo sapiens
taacaagaccccacttctaaaaaaaaagttaaaaaaataataatgatagcatttctgattttggataccaaagtaagagattatatatttataacatggaagtttaatttttttatattaggcacatcatatagcatgaggaatagaactgaaagtcacaaattactattagaaatccagcctttcacgtttcaagtatcaatcaaaatcataaaggaaatcttggtcaatgtgggaggttgtagtcaatagttggatagagactatttttccaactggcagcactgtttttgttttgttttgttttttaatcttcaactaatcaagctgtttgagaaggacaaggcgtctcttgtggtttttgtgttgcttaaaattctacatgatatcttaaggacagcaacattcaggttcctttctctgattattgaagtgaaaattaatgtccagtagtaatgaaattgttttttccacttaactattcaacagtttttactatcaaaataaaaatattaatggctttaaattatatattcacatgtcaattataggagttttaggcttctatcatacatattttcagtaagacactgctttttaaaactcccatttctaatactgttatagttccaataacatatccctaagtcatagcaattatataactaccwtttttatcaagttatttctatcaaataacttattcaaattcatattttcttttccaattacttacattgccagcctttaaaaataaatatcttttggactattgtctgtctgtctaatttcctcataatgttcaatatgacctgtacaatgtttgcaatgttttcccttgaatctaacgaaatagccagttttattgaaatgtatgttcttagactgtgagaggcaaacttccctactcattatagagcaagtttgttccttatctcaaggtgtctctaaggaatttttgaaaagaaccctgcctttgatttcatctaatcatgagaacagtaaatcagactaataaattcaagtatacttgtatttgaaatttttagtaccatatatatatacatataaatacatacacatatagtcaataaatctatgatagttttcaatgcaagtcataaattcccaaaagcaacaaaatgactcattaaataaggtaaggcggtctctttaccttctaccccaaagtatcctttctttttctccatcagagtttcctgctattctgtcacataacacacatacacaaacatacacacacacacacacacacacaatattccaaccgacgtataaaattctttctcacacttctgttcttcttcgttcttttgtctaaccaaccaacaaatccctattcatatttcaaaattcaatttgaatatcaccccttttttgaagcttccccttaatattgcaaggcgtttttcttctttattctcacagacccttttaccggtgtttattttagcacatacattactgatagaaatattttctacttgttctcatccctctcgactgtgaacttttgaaggacaggacaaatgatcaattactctttttatgtaaagcccagcaaaacactgggcacattaaagataatttaataattattataaacaaattcggaagagttatttctcaaaatggtggatttcttaaactcttcatccttaggcatacctcaaactaatattttcatttacttgcaaactgtactcatttttaatcattatgccataaattaatagcttctctttcattataaagggttcttttaaaagtctttctatattctgagattgcttacggaaaatgccttatttttgtcccagtgagaaagaagaacaatacattctttcttcctccatatcattcctatacttatttcttttaaaatgttgcttatgtccaggcactgcttttaacaccaacataaagcaacgagcaaaaaatccaaagtctctatgctcatagagctgatattctagttggatgagacaaaaataaataaatcaaa

SEQ ID NO: 703635 - DNA, 2787 bp, Homo sapiens
tagcaaatgctcagtagttgattaaagcattaattattctattaatagcagttttatgaaacctgttcttacagggggaaaaagtggttataattatgacagaaatataaatgttgtagttcagggaagcatatatggaaataatcttaggtgagcatacaggtgtccagatgcttttctacaaaatgattttttaaatatacaccataatatggctgatgatgtatgtatagcatgtatttattaatatttcagaggtcagcatgagtttttgttaaaagttcagatagtaaatattttaggtcatgtaggagagatgggttatattataattattcaactctgtcactgtagcaagaaagcaataaacacataaagtgtgttgaaacaggcttagttcataatgatgaccattgcttgctgacctcygctttatttaatcaattaatccaaagaaactttcatgatggtttcaacaataatatgtatctttaatcttcagactgggtaaaaaatataagtaaaagtaatgctaaaattctataattcaaaattttatgaaataatatgaacaaaatcctattttaattataaaactttgcactccatgcattatcttggtatcttaaaaaaacctcctgatattctgatgaagttatctacactataggccactctttgaatgcttgccaaaatagagaaaataagctatgttttctcttacacattttttccagttcttttaaagggtgttaaatacattccttttcaatatgcacatggaaactatgtcagaacaaaattgttaacaatgaatacttaatctaattcttcatttttggcttaatacattttttctttttttaatacaaattttgtttttaaacattattaaaatgacctttaaaagttatttattttgggccaggttcggtggctccctcctgtaatcccagcactttgggaggcaaggcaggcagatcactaggtcaggagatcgaggtcatcctggccaatatggtgaaaccccgtctctactaaaatacaaaaaaaaaaaaaaaaatagctgggcctggtggcatgagcctgtagtcccagctactcaggaggttgaggcgagggaattgcttgaacacaggaggcgggggttgcagtgagccgagatcacgccactgcactccagcctggtgacagagcgaaactccgtctcaaaaaaaaacagaaacaaaaacaaaaacaaaacaaacacacaaaaaaaatttatttattttgaaaacattactcaatgatattttaagccctcccccaaacaaatactagtctataaggagttttgattccaaattgcagaagcattaccacttgggatatattttcaaaactaaggatgctgataaggctactgcaattagaagtgctttcatatagcagttaaaggcacaggaattttggtaatttttgatttaggaaataatatacatatatttagtgatattttatgatttaggaatcagaataaacatgaaagacttatatttatggtgtacctttattcgcttttcttatcccatttgtgctgtttggagatagcaattattcttgcaatatgatcccaaaaatagagtaatttccactttttaatggacaattaacaattttttaagatttctatgcttttctcatatagaaaatgcctccataagctagaacttttcttccgaacctttttaaactgccaagtaaatagaaaaatatttaattttgccctaagaatcataagaattgaggctgagtatgagtgatagattacttatttaaatctctttgtcatttccttgattccttactattttccattattctttttatttttgtccaacaacaaaaacattcaaaagatatccttcctaaaattattaatcatttgttgctcaaaataaacatgagtattgtcagctcactcctgcttcatttataaacctagaaaccatattcactttcattattttcataattatttcattttcatttttatgtactatggttcaggtgaagtatgcactctaatcacaaccttgcagttggaaagtcaagttgtcctcctccgtttataaagacctctgtcaaattattactatttactcatttagcttacttggtagtcaattttatgacaaagaatctcataattccccaccctcaaaaaaaagaaaggaaaagaacccagaaaatatatttaaagaaaataaaacaccaccaccaccacaagagctaggattccaagctcttcaatactgtgagtaaaagtgttaaaaaataaaatttactatttaagttttcacaatatgtcattacgaaaaatatggagaaacctcagccaagataagagcacagggttaataatataactgcatattgaaactgataaaaatctttgggagcattgtaacatgcttttactcattgcttctcatgttacttaggatgtatttcttttacattttactttttaaaaagtaatacagtaaatattttgagagaattaatcacagtctaattttgattatagtttctaaaaataggattttattttattaaaaatggtatttttacaaaaaaaattatcctgcttaataaatttacagtatacatccttataggatggcatataaaacatctactcttgttgaagacaaatattaaataacattatttctctcagtagatttagttgccctaaaatgttccgccactttcccacagttactgattgcagtattcttccaa

SEQ ID NO: 703636 - DNA, 637 bp, Homo sapiens
tgggcagtcaagctttcataggggatgattcaactttgtccgagcaccaatatattagaaacaatgcgaaaactcccagtgactggagcctggcttgtaactgtagacaaagaggaacttttctgctggtggttcgcaaggaaaggcttgtcgaagagagttaattcaagcagcctgaaattacgtcaaccctgtacatttaagcactgttaatctgcagctttgcacattgtattttcaaagcagttcagctgaagggtgggagaataactaggtttacagaatcatttagaaacgttaaatttcttaactcccaactttgacaagaaaatgctcattagtgttatgggatgagagaggagaaaaaaaatttgaaaatcaaattaagattattattttatattattttatgacacatttaattttttccagaataaatgagcaaattcattgatgaataaaattatagaaatgtrgatatatatgtaaagtacttactaggtcaagaccttcatcttcattttatagagcagtacagatgagtacttcttaatgagttttgtaactctcatttacatagaaaacattacaaattcgctatcaatatgaatcatttgaaattcttattttcgattta

SEQ ID NO: 703637 - DNA, 637 bp, Homo sapiens
tgggcagtcaagctttcataggggatgattcaactttgtccgagcaccaatatattagaaacaatgcgaaaactcccagtgactggagcctggcttgtaactgtagacaaagaggaacttttctgctggtggttcgcaaggaaaggcttgtcgaagagagttaattcaagcagcctgaaattacgtcaaccctgtacatttaagcactgttaatctgcagctttgcacattgtattttcaaagcagttcagctgaagggtgggagaataactaggtttacagaatcatttagaaacgttaaatttcttaactcccaactttgacaagaaaatgctcattagtgttatgggatgagagaggagaaaaaaaatttgaaaatcaaattaagattattattttatattattttatgacacatttaattttttccagaataaatgagcaaattcattgatgaataaaattatagaaatgtggatatatatgtaaagtacttactaggtcaakaccttcatcttcattttatagagcagtacagatgagtacttcttaatgagttttgtaactctcatttacatagaaaacattacaaattcgctatcaatatgaatcatttgaaattcttattttcgattta

SEQ ID NO: 703638 - DNA, 637 bp, Homo sapiens
tgggcagtcaagctttcataggggatgattcaactttgtccgagcaccaatatattagaaacaatgcgaaaactcccagtgactggagcctggcttgtaactgtagacaaagaggaacttttctgctggtggttcgcaaggaaaggcttgtcgaagagagttaattcaagcagcctgaaattacgtcaaccctgtacatttaagcactgttaatctgcagctttgcacattgtattttcaaagcagttcagctgaagggtgggagaataactaggtttacagaatcatttagaaacgttaaatttcttaactcccaactttgacaagaaaatgctcattagtgttatgggatgagagaggagaaaaaaaatttgaaaatcaaattaagattattattttatattattttatgacacatttaattttttccagaataaatgagcaaattcattgatgaataaaattatagaaatgtggatatatatgtaaagtacttactaggtcaagaccttcatcttcattttatagagcagtacagwtgagtacttcttaatgagttttgtaactctcatttacatagaaaacattacaaattcgctatcaatatgaatcatttgaaattcttattttcgattta

SEQ ID NO: 703639 - DNA, 637 bp, Homo sapiens
tgggcagtcaagctttcataggggatgattcaactttgtccgagcaccaatatattagaaacaatgcgaaaactcccagtgactggagcctggcttgtaactgtagacaaagaggaacttttctgctggtggttcgcaaggaaaggcttgtcgaagagagttaattcaagcagcctgaaattacgtcaaccctgtacatttaagcactgttaatctgcagctttgcacattgtattttcaaagcagttcagctgaagggtgggagaataactaggtttacagaatcatttagaaacgttaaatttcttaactcccaactttgacaagaaaatgctcattagtgttatgggatgagagaggagaaaaaaaatttgaaaatcaaattaagattattattttatattattttatgacacatttaattttttccagaataaatgagcaaattcattgatgaataaaattatagaaatgtggatatatatgtaaagtacttactaggtcaagaccttcatcttcattttatagagcagtacagatgagtacttcttaatgagttttgtaactctcatttacatagaaaacattacaaattcsctatcaatatgaatcatttgaaattcttattttcgattta

SEQ ID NO: 703640 - DNA, 920 bp, Homo sapiens
agctgcttgggactcagcgtgtgtatgggacccagcacaaactacctctccagaataatgccatcatgtggactcccagcagcttcctatactagtctcagggtccacaagcatcaagggactcttccatggttgggacggcaggagtcaatggtgggaatgtggactgctgggtatacttcatttaccttttccctgcagtggagtttctcctggctccaagtgaccgtgaccaggatggctgctttatttccttcattttccatgcctcagaggctccctgtcactcctcggctaaatttcagtgttctctctcagatgatctatccaaagtgtggttatctacttactgttttggtccttctttgtggaagaaataaatgmcgggtgccatctagtcacctctactgaaactcatattttgatagaataatctattattctattagtttaatgagtgagcactcactgtcacacatttatttctcacatatgtttcagcttatgttagcatagttgtagttgttcagacttcaacttacatacatttttttaaaatcacttctcattcaaaagtattttatattggaaagtgtaattttctttgccaagaataggaacccccctaaaacttttaaatactatcttaaccttagttatgaagatgtctattccatcaaagggtaaggaggattagcacattcattcatatttctattggaaaaagagaagcgattaatttattgcttctctgcccgagtgattaagcaataacttattctggcatccttgtcaactgatagcaattgagtttgtttccaaacgacaaatataaatataaaccaaatctattttagttttttgagagattaaaccaatgttatttaaactttatttcttaatgaaaccatcaaaggaac

SEQ ID NO: 703641 - DNA, 1022 bp, Homo sapiens
ggaagctttgccttacatgctgcttttcctttcgtggcattcaacagaatctgtatgcagaatgtgtttaggcatactgctcacatactcattttctcaaggtgcctaccagtaaaatgtgactggtagtaacactcacctggttaccaaggacaaagagatttaattaaccagttatggcagaatatagtatataaataatggagcatgagagaaataggggttatgatgtataaatattcagatcctgcaaaatctttttctggatttggtttcaaatggaagaaaattaaaataaagtgcatttctatttgtttctgatgatgctttctgacaccttgagctcctaacattaaaacgtacatacataatgtagatatatggagattaacaagacaagaagtcactccaaaaggtcatttccaaccacctatgtcttgtatgtgttggtagcaattggtagcagtcggaatcagccatctgtagctgctaagataaagactgctatgcctatatattttactacttgttaaatataggtaattgcaaatgattaatgtgtagtttcagtaaaatctattgaaatgccaaaataccaaacgactttagttcagcagctactactgtttgagaatataggtaaactattgaaataaaaaaataataacatccaggayagaaaaactgcaaaagctaataaaatttttaattgtttgtaatgtatgatttaaaatggcatttgcacttgattttttcctctaggaataattgatagctgtcttgaaatattccaatcatgtataaatagggagaatgttatcattaatggttattcattttcccaaaacttgatgagtataaatctaaattccactttatcaaaaatgtaaataaaactatacaaatattttactatttgtctacctagcttgaatgccagttaaattttaggctagttttgtattagcgttcctttctataatcacctttgatctcgaacataaggtagggaaacttaggca

SEQ ID NO: 703642 - DNA, 629 bp, Homo sapiens
cgcaggatttctgattgctcatcatcacccctgttctcattcagctcttcacccttgtgtgtctcctctatggagagcttccattcatctgaatagcagctttagtcaaggaagatgtgagtgagtatgagaaggaagatgatcttcagaatatgaaaaaaaattagactgtggcagagctcttttttctgaaattctcatagcattgactcacttaccaacttgcttatgtgatagtacccattttacaatttttacatttcccccttttctcaactgataactaatgctaatataattcagatgaatgagacttataaaatagttatatgttttcagattaaaaggtaatgtcccattgaccactgactaaatgggatttagagacacaatgaaaaacaatttaatagtcttccttgcatagaatagaataagaagtcattttatcaaatttgcatagaaaatataccttatgttttgacatgaaagataacaacttcattgtagaacaataacataacttattctctgggaataaccttgaattatgtaatttaagaattctctaacaatgccaagtgaaatctattaaatcaacactcatctactytggctttagtatttcaggt

SEQ ID NO: 703643 - DNA, 589 bp, Homo sapiens
gaaggataaattggtataatatatgagagtttcattatttgaatacacttcatttaagagatttagtaaggaaggtttttggcatttggatgtgtgagtgtgtgtgtgtgtgtgcacgtgtgtgtgtgtagccaaaatctcagcacttgtgggaagtcaaggcaggaggatcacttgagcccaggagtttgagaaccatctggataatacagcaagaccctgtctctacaaaaaaatagtaaaaactaactattagctgtgcatggtaccaagcatctgtggtcccagctacttgagaggcgcacrcacacgtgaatttcatctctttaatacacattgcttttgtccacctagtatgcatcctatctcagtcatatagaaaagtagattcaccttctgctttcagtgccaaatcaaaagtaaggagtagaaatgtcagaaagtgggtgggaattgaaatatctgttaacagaacacgtgtaagataggcaaaacaaatatgtactttagaagaaaaattgaaatatttgaccatgatcagctccctggataactgaataaaagatacaaaatttgaaaagtatgaaaa

SEQ ID NO: 703644 - DNA, 624 bp, Homo sapiens
caggttcaagcgattctcctgcctcagcttcccgagtagctgggattacaggtgtgtgccatcacacctggctgacggagtttcaccacgttggccaggctggtcttgaactcctgacctcaggtgatctgcctgccgtggcctcccaaagtgctgggattacaggcataagccaccgtgcctggcctcttaattcctttttctaggaccagagtggcaacaggaggccctgacaggcctcctattgctagcccagatggccctgtcctctgggcagatacagtcctcttcaggctcactgctgggtaacagaagctccattcacttccttagtagtacacaactgtacatggtggtaatgaattgtgattatgtaaaaatgacccacatcaaaatgggtagaaaacatctatttgtctatttggtaggtaggttcgrgcgctcttacattgtctccaccatttactttcctcccaaccttttgagggtggactcatgacataaatcttaagcatgcaggttgatgactttttacataagtacacacccaattaaccaccacccagatgaaaacagagaacacttcttgtgtctcagagactcatgctcctccccagtcaacac

SEQ ID NO: 703645 - DNA, 618 bp, Homo sapiens
tgaagttagagggaaacgattccattagtctcacttatcaaggccatctaactctttgtttagataagcattccagatagaaaataagttccaaaaaaaaaaaaaatacataaaagcacgcagattggttagatagaagcgaaaagggacagagggaggaaattagggtaaatattatttttccctcaatgggagtattttaaagctaaatgccctgccctaaaaagtcaagagttatgtaaagtattggtggttgtagtcatttgagaaaagtacaacccgaatatgcatttctcttatgggtcaaasagaagtcacgataattgtgtgtcctttacactaccccaagattgttatttaaagatgagcatagtgaaaactataatactatcatttgtccactacccatgtatgctagcaaataattataaatatttttaccaatgaactgaatcagaaattggtaacaattttaaaagtagcttttctgctattgtgcaacatcaatgcccttctattacaattagttccaaaaagataattctcttatctgacagcattataaaagcaaagtatttcatgcatggcagtgttgaggagcttggtcatgggggacag

SEQ ID NO: 703646 - DNA, 832 bp, Homo sapiens
ccaaatgaccttcagagtgcatctgtaatatcagttctttctgtttctccagcagattgcttttcaactcaaacttcactctttcctgagtctccagcctgccagactcccacatcagatttgggacttgtcaagtccccgtaatcatatgaatcaatttcttaaaataaatgtcttgtactcatacacacacactctatttgttctgtttctctgtagaacattgacaaatacagtttctttcagctgcaaacatgttctaccagctagactctattatgtctattgtcacaaaaagctaaaacattggggatttattttttcacatcaatgtgtttgcttataagcagtttggtactggcagaactgtggctttgcatctctcctcgtctttggtcttccctttaaagacacagtatggtggctgcactttcaaacaattggattatcatgtagtcacatcaaagaaaggaaagaacaaatgatggatctcctctaatggttttcccatttatcaaggaggaaaatcttttcctgaagcctcccacattacttctcatrtgtctttctgacttgaatggatttacttttccataccttattgcaagggaagctgggaaaatgttatgatagaaaaaaggaatgatggggaaatagctgttgttagacaactatgtcataggccatgtgtcataagaaaatatggaaacaatataatggaaatacgataggattctaaatgagtcacacctggtacataagatttctgttgctgcatagcaaattgccacaaattcagtggctttaaataacagacatttattatctcaca

SEQ ID NO: 703647 - DNA, 1549 bp, Homo sapiens
gcttgctaaattaggcaaactattttaaattaactgacttgagtcaaatgtgtctcttatttattcattaataacttttatagttatttgaggagttgattattatgattaygagtagttctgatttaactctactcatacaaattctgcttttttctgatattgtgactaagactataattggccatctaaatgttcaaactagttaaatagtcttaatgcatagcatattccttcataagatgctaattggtggcttatggattttttggaaaaagtttatttcatcaaaactctaaatagatttttgatacagacaagcttatctttttccctgagtagtcagaattgattttattgtatgaaactatatgctttgatttagaggctagaagtagaacatttattcctgaataatatcatgttagtaatagaggtgaggcagagataaataagaaaaagatgaaagcagattaaaagtcagattaacatctgcaataaactttatcttcaaagattagtaaatattctgaaatattctccttagaaaaatgaagctacaagttagctcatccagtaggtatctgtgatttatttgagaattcccaagcgtacaattactgagacttattaaaactaatgaactgtcaaaaaaaaaaaaaaaaaaaaaccttgttctgacagttctgacaagatggtaaggaagactttattacagaaccattgcaataggtataaaagctatcaaaatactggaaagaaatcaggctcaattctgaatacagcaaaaactagtgggagatttataacaaaagagcagtttggagagtcgttggtagacaaaaaattactaaaaggagacatgaagggcagcaggggttctggtgaaactgacctaacaagactcttgctgaaggcaggccagaatggtcaggtattgatggtagggcatgaggaatctgattattaatagatactaagagtgatcaaatatcaagggttgagagattctctctgaattaacttagcaggattcttgctataactggaccccaggaaaacagggaaacctgaggttgaagcctagctgagaagagggctcagaggagcctgactacagtttggtcaaagagagtctttgtcagaaacttatagctgaaagtcaagactaaaaaatgagacacgtttacacacttcttcaaagggctggcatttggcccccaaattcatttctgaaaaattatcctgaaatttaatgttataagtgaaatggttatccttgaggacaatctataatggaaataatattgcaagatttgtagctgtgtttgattcatcacagcattacaatatgaaaaagagccaaaggacgacaaaaattgcatattgacgaaatgaacaaagccagctttctcatcatcatctcttgcctttattggatgaaagcacttttcaccaagttctgagaaaaaaaaatatgtccttagaaccatgttgaccaataacatcacaaatggcccctgtaattgtctctaaacagtattttttt

SEQ ID NO: 703648 - DNA, 657 bp, Homo sapiens
aaaataacagattctttttaatgaggatttaacatagcctaggatcaataattagaggatagatataagcatcatataataaagagaatagtggaatggaaacattgtttttgaggcttgttttattcttttcctattgaataggtactgacaccaaactgtgcttctagaaattttggtagaattttgtaaaataaaatcttgacataagcctatttttttgtgtgctccttcattttttcagctttttgaggaaaaacatagttaattcaatgttccagtcrtatggattaaatttaatcagaatttcaccatgctgaaacaaaaactcttgaaacggtacacataaactcagtcatcttctttcttttgaggccacagactttaaagtcagtggttaaataaccaatccacgaaaaaaatgacaattttcttttgccaacattattttaattgtaagttccagtttcttcagcattttgtttgctgatacatggctagcttacacagcaccttggtttgctgttccaagtaatgtattggtttttcttctttcctataattaaattcaagtaaattttttccccaatgtacaactcataattagcagttaagtgcatgaaatttttcattagctttgtttctatattattaaaa

SEQ ID NO: 703649 - DNA, 1677 bp, Homo sapiens
agttaaggtggaagaaagagaaactaaatacataggtatgtagtatgccagtgggcaacatgacacagaagaataaaataggctaagtggtcagaatgagagtgagccatggttcttccacagcacggttagagaaggcattctaagatggtaacacttgagcagagataaggatatgagggagaaggttatttaatatttggaaaaatagttatttaatatttgaaaaaagatggaattccagttgcaatggctctcagtcaggagcgtgcttggcttggagcagcaggggaggtcgrtgtggctaggtcaggaaagcactgctgggctggtctgagtggcccagtagaagagtagtcaaagaccagatcgtaaagagacttatgggccatgataaggttttggcttttattctgtgagagctgggaagctacaggagaattttaaatagaaaatggcgtgatctgactcgcactttcgaagactcactcctcctgctgattgaagaatagaccacaggaaagggaggcatgaaaatctaaggtcaaggttaagtttccccaggacttcacagccttactcaaatgcactcgagtattctttttggctgataccgttggcatttattttcattcttttattgggcagatttttttgttatgcataagtttttagactattctcacttttctgctctgaagtgtcatagtgatgtgttttggatcatgaggcatttgtgtttaaaatttatcttgctcagcagcttgtggatatttttaaaggcttgcgtctccagctctggaaattattttctattatttctttaaaaatatgtttttctctcatgttcctctattctttccttctaggattttattatatataactttctatttaactttgtcttttgtattaaaaaaatttattattatagagtttagaaaagttgtttgttttctctggctctgttaaagcaggaagaccaaaggtagaataaaaagaccatatgtttcaagaaatagctggagtatctttaatgtttttgtgtgaaattgaataatattttaatgtctttgttgtatatgattttcataaaccttcaccagttcactcctttctgattctgaatttataattttctttctccttcattttaaattatttcactaggatctcagaaaataagaaataagtttgttctataaacctaactcatttcaatgatgtcactatatttaagggagaagaaaacgggggtttgttcagtaattttagactacttggttaatattacaagttttttttttttttcacaaagccacccctgaattttgcctctgtatttcccaacattgaatctatcagtttgtatagtataatcatttcttccaatagctcttttcagatgccacctgaaaatcatttgatggaaataaactgcagaattttataagagagttctctctcagattttgaaccatggcttgacgttgtggctttaaatatcatctacagagataatcatttacctactgcataaaaaaataggagtaactgaaacattaagttcatacattttgaatagtgtataggattttaaagagagtagacacagagacaatgtaaatttaggatacctttttaaaaaagtaaattaagcttatacaggtagataca

SEQ ID NO: 703650 - DNA, 566 bp, Homo sapiens
cacaatctcggctcacggcaacctctgcctcccaggttcaagcagttctcaagattctcctgcctcagcctcctgagtagctgggattaaaaacatgtgccaccacgccctcctaatttttgtagttttagtggagatggagtttcaccacattggcctgcctggtcccgaactcctgacctcaagtgatccacccacctcagccttccaaattgttgggtttacaggcgtgagccaccacacccagcctgtgttcagccttgtatactcatgtaaatgctagtctttattttttatttatctacgctcctgtataaatatagtatattatatcatttagtacttaaaaatttctgcctccgaaggcatcatagagttaagctttttctattgccagaatttacattccttgttttttaagaaatagmagcagttttttttcctgggaagtatatgttgaatacaatggcaattctagagaatagtcacattttgcttttcttaagaggttgatgttttaaaataatattaaacacaatgcctgaaacatattatgggattaataa

SEQ ID NO: 703651 - DNA, 1811 bp, Homo sapiens
gcatccaatctggttaaattatattgtacaatataacacaaaaattaaaacacaagtgagtagaaacacaaattgcaaaacaatctttctacaggtaaaatttactgtattatcaaagtataccttgaatctctataattggatctccatctttacggccaccaccttattttctggccatcatcctaccttgcccgaactactataatatctttgtaactggtttttctgcttcttttttgcccccttcaatctattctccacacttcagcaaaaataatttgaaagttgtcctttcctctttaagacactctaattgcttcccattgtacagaatgtaaacccctccctgtatgaccaagccctgactgtgctctgacatcgcttggattcctcttcctcacgaccacagctgctctgaarcactgcttttctttaatatgttgactttccaccaattttatagccggccatttgcatgtgctgattttatctataattttttttttttttttttttttgagacagagtcttgctctgtcacctggctggagcgcagtggcacaatctcggctcactgcaatctccacctcctggattcaagcaattcccctgcctcagcctcccaagtagctgggactacaggcacgcaccaccgcgcccagctaattttttgtattttactagagacagagtttaccatgttggccaggatggtctcgatctgctgacctcatgatccacctgcctcagtgtcccaaagtgctgggattacaggcgtaagccatcgttgactcttccattttcctctcgttcggtccttattctttggagggtcattatagagggtcaatttggcaactaaggcctgagaagttttcttaaaatgcttgttgcttgtcaggtgaagatgaacttgactttcttaggacatttacttggtgagatttaatttaaaagattagattccttttattctttatttttatctccatatcagtcatatgaagtctttcctgatcctctcatctaatggaggcttcttttgcaaatctgttctctatttcaaccatttgcttcctttatagcacttagaaggtatcacaactgttttaagtatttgtctcctcaactggaatatgggaacaacacagtgcctgatgcataatagatgcttaagctattttgttgcatggattagcaaaagaaagatctgaaccatttgtaaatatattcccagtctcacaaactgggatgatgagagagagtcacacaaatcacaatacaccaccctttcataaacctgaccttgatgctgaagatggataacttcactctcaggctgatgttaagggtccagcattgccaggtttgcctaatatggtgagaacagcacaggaggaagcagataatctattacggcatctgtgaaccatagcaggtaatgagtcatcattatattcttttgtattctcacctattttttttttttttgagatggagttttgctcttgttgcccaggctgaagtgcgatggtgcgatctcggctcaccacaacctccgcctcctgggttcaaacgattctcctgcctcagcctctcaagtagctggaattacaggcatgagccaccacgcctgccgaattttttgtatttttagtagagacagggtttctccatgttggtcaggctggtctcgaactcccaacctcaggtgatctacccaccttggcctcccaaagtgctaggattacaggagtgagccactgcccctggcctgtactctcacctttaatccccatgtgatgcca

SEQ ID NO: 703652 - DNA, 1811 bp, Homo sapiens
gcatccaatctggttaaattatattgtacaatataacacaaaaattaaaacacaagtgagtagaaacacaaattgcaaaacaatctttctacaggtaaaatttactgtattatcaaagtataccttgaatctctataattggatctccatctttacggccaccaccttattttctggccatcatcctaccttgcccgaactactataatatctttgtaactggtttttctgcttcttttttgcccccttcaatctattctccacacttcagcaaaaataatttgaaagttgtcctttcctctttaagacactctaattgcttcccattgtacagaatgtaaacccctccctgtatgaccaagccctgactgtgctctgacatcgcttggattcctcttcctcacgaccacagctgctctgaagcactgcttttctttaatatgttgactttccaccaattttatagccggccatttgcatgtgctgattttatctataattttttttttttttttttttttgagacagagtcttgctctgtcacctggctggagcgcagtggcacaatctcggctcactgcaatctccacctcctggattcaagcaattcccctgcctcagcctcccaagtagctgggactacaggcacgcaccaccgcgcccagctaattttttgtattttactagagacagrgtttaccatgttggccaggatggtctcgatctgctgacctcatgatccacctgcctcagtgtcccaaagtgctgggattacaggcgtaagccatcgttgactcttccattttcctctcgttcggtccttattctttggagggtcattatagagggtcaatttggcaactaaggcctgagaagttttcttaaaatgcttgttgcttgtcaggtgaagatgaacttgactttcttaggacatttacttggtgagatttaatttaaaagattagattccttttattctttatttttatctccatatcagtcatatgaagtctttcctgatcctctcatctaatggaggcttcttttgcaaatctgttctctatttcaaccatttgcttcctttatagcacttagaaggtatcacaactgttttaagtatttgtctcctcaactggaatatgggaacaacacagtgcctgatgcataatagatgcttaagctattttgttgcatggattagcaaaagaaagatctgaaccatttgtaaatatattcccagtctcacaaactgggatgatgagagagagtcacacaaatcacaatacaccaccctttcataaacctgaccttgatgctgaagatggataacttcactctcaggctgatgttaagggtccagcattgccaggtttgcctaatatggtgagaacagcacaggaggaagcagataatctattacggcatctgtgaaccatagcaggtaatgagtcatcattatattcttttgtattctcacctattttttttttttttgagatggagttttgctcttgttgcccaggctgaagtgcgatggtgcgatctcggctcaccacaacctccgcctcctgggttcaaacgattctcctgcctcagcctctcaagtagctggaattacaggcatgagccaccacgcctgccgaattttttgtatttttagtagagacagggtttctccatgttggtcaggctggtctcgaactcccaacctcaggtgatctacccaccttggcctcccaaagtgctaggattacaggagtgagccactgcccctggcctgtactctcacctttaatccccatgtgatgcca

SEQ ID NO: 703653 - DNA, 600 bp, Homo sapiens
ttctttggaagattctacttgcaaaagctgtctttacttttactgactcagagttgactcaatgcaaatagatttttcctggaatgggaggagaggacatttgtgaaaaacaattattagagacaattgtttaacattgtgaatgccagaagtagtggagaacaggaggcaaacaatagggtagtcataacrtttaaaaggaaaagttggagaatgagatgtccttgggggagattgaaaagctgcaacatatttctggaaatctaaaaggccacacacagagggctctgcatatgcccaggaaaagacctgagaatctcctaaattttcacctgtggttaagctggaggctgtgcactagcaggaaatgcaggctaggcacattataaaattcctgctgagtgttgaaggcatgccttaagacatttcctgataaagaaaaactgagtttgttgctagcagatctgccctaccagaaatactaaagagagtccttcaggctaaaatgaaccagatggtgactcaaatccacatggaaaaataaagaatactcataaaggtatttaccggtgatgctgtgaagctacagaagcctcagtc

SEQ ID NO: 703654 - DNA, 1380 bp, Homo sapiens
catcttttttttctgaacccattgactttgctccaaagattaaaaaactattaccattatcctccctcttgtctacatcatctcttatttggattgattccatttatatatttgtttcaaagtttgatttatttggaacttacatcaaacgtttaatgaaatacagacatcattttttcttgatttcttgttacaaagtaattggcttaacatacaggagttgcatacataattgtactttcatctatatctcaatctttggctccattcttggttttatgcctgtatctatccattgaggaaccaaaaacaatgcaaaatataatgcaataccagaactacgaagaaaaacaaagtacatgtttacaggtgaaagtgtcccacagaactgttaagagttggtaaaaattctgcctctgaacctcctagaaagcacagtattaaagaaaacacatttctttgcaaagagaaaagtttaagtaaagaaagaaaaactatatgatcttgagcaaactaagtaaccaccctatgcctcagttttcttatatgtcaaatggaaatgagagaagtaattttttcttttcttttcttttyttttcttttttttttttttttttgagacagagtcctgttctgtcgcccaggctggagtgcagagtggtgcgatctcggctcaagcaagctccgcctcccaggttcacgccattctcctgcctcagcctcccgagtagctgggactacaggcgcccgccaccacgcctggctaatttttttttttttttttttttttagtaaatacggggtttcaccgtgttagccaggatggtctcgatctcctgacctcgtgatctgcccacctccgcctctcaaagtgctgggattacaggcgtgagccaccgcgcccggccgagaagtaaatttttcatggcatgttacaagtattaaattaaacataccagtattagtaaagcatttagaacagtggctggcacaaagtaagcactatttaagtgttttttaactaaaaaataaaataaatgctaagggaatttctcaaggaatgcagttttacccagcacctaattttaaaagatagttctcatcgggagcttcaccttatctataggacagtgagaggtaaggcaaaatgttctctgatgacttctctattgcaaacacatttatgggattcatgaaatgttttcttgacttatccctcagtaagcactgagaacagaacgctgaactcagggaaagcaattttgcagcaggccaagataatatgttccgaacctgcaatgttctggtgatcaggctttaggtctagattataaagaaatgaatgggctcatttcattcaaataacactttataaatatc

SEQ ID NO: 703655 - DNA, 659 bp, Homo sapiens
tggactccaacctctctccaggctccaggtcagttaggaatataggacaatctgagagagaacaaacatttccaactacctttagtgcaagccaataaaacctggaggtttcctctggagctagctctccttgctacttactttcccctttaactcatatttgaaggccaagatctgattaaaatatttgcatatcatatagcaatcaacaaatataattagaaagtttttgcaacaattgatttgttaacataatgggattctgtttgtactattttgtctttggaattccaatgataaactattctgctgaagttagaaaattcctccccacatataccatgtactgatctgccctttccctaagtttaccaaaggaagagtataaagaagaaaggatctgatgacttcatcccatacctagtagaccgtcaatctcctccaagtttccattatgctgtctctccacayaaagtctcagtaactggaaatacggagccaggcacagtggagataccaatctgagaaggaaaaataaatttctagaccacacttcataggtgtattactccacatacatagggagatattactccacatacacagggagcacaacttctttttttgagacagtcttgctctgtcacccaggctggagt

SEQ ID NO: 703656 - DNA, 659 bp, Homo sapiens
tggactccaacctctctccaggctccaggtcagttaggaatataggacaatctgagagagaacaaacatttccaactacctttagtgcaagccaataaaacctggaggtttcctctggagctagctctccttgctacttactttcccctttaactcatatttgaaggccaagatctgattaaaatatttgcatatcatatagcaatcaacaaatataattagaaagtttttgcaacaattgatttgttaacataatgggattctgtttgtactattttgtctttggaattccaatgataaactattctgctgaagttagaaaattcctccccacatataccatgtactgatctgccctttccctaagtttaccaaaggaagagtataaagaagaaaggatctgatgacttcatcccatacctagtagaccgtcaatctcctccaagtttccattatgctgtctctccacataaagtctcagtaactggaaatacggagccaggcacagtggagayaccaatctgagaaggaaaaataaatttctagaccacacttcataggtgtattactccacatacatagggagatattactccacatacacagggagcacaacttctttttttgagacagtcttgctctgtcacccaggctggagt

SEQ ID NO: 703657 - DNA, 659 bp, Homo sapiens
tggactccaacctctctccaggctccaggtcagttaggaatataggacaatctgagagagaacaaacatttccaactacctttagtgcaagccaataaaacctggaggtttcctctggagctagctctccttgctacttactttcccctttaactcatatttgaaggccaagatctgattaaaatatttgcatatcatatagcaatcaacaaatataattagaaagtttttgcaacaattgatttgttaacataatgggattctgtttgtactattttgtctttggaattccaatgataaactattctgctgaagttagaaaattcctccccacatataccatgtactgatctgccctttccctaagtttaccaaaggaagagtataaagaagaaaggatctgatgacttcatcccatacctagtagaccgtcaatctcctccaagtttccattatgctgtctctccacataaagtctcagtaactggaaatacggagccaggcacagtggagataccaatctgagaaggaaaaataaatttctagaccacacttcataggtgtattactccacatacayagggagatattactccacatacacagggagcacaacttctttttttgagacagtcttgctctgtcacccaggctggagt

SEQ ID NO: 703658 - DNA, 675 bp, Homo sapiens
ccaggaacttttcattatcatctgctaacaaagctaatggcaagatgtatacattataatgtatttataagtagttatcaagaatttctyttgtgtaaatgcccaagtactctggctgtgtcctttctgtcatccctaagctctggggccattttgtttacaggcaaggacctaagtgagccctgagaattgtgccttctcttctcttactgctcacgtatgcggtctctttcttgggcccatttttcaccactgttagttgacacagacgtctgcaggatcaaaggtagaagcagagacaccctggagcacagtcactttctctacattagccaaatgcagtcatgatgcctccacccaggtgtgggcctgggtctcaggtgctgagtggaattgagggtgcccgtcttggggaagtaatcaaaggcagcctcataccagggtgcacgacagcaccaggagcctttcacagtgtctagtgagcactgcagccaggtactcatactggtcagcagacctaccctcatggtccctgggcttacttactttgtcacctgtcacctgccaggtttcattttttgtcatcaaacccgattccaatgttgagtatttatttttttctttttaagaagaaaaatgcctggcaagcaattctgtacagatttttctttttca

SEQ ID NO: 703659 - DNA, 675 bp, Homo sapiens
ccaggaacttttcattatcatctgctaacaaagctaatggcaagatgtatacattataatgtatttataagtagttatcaagaatttcttttgtgtaaatgcccaagtactctggctgtgtcctttctgtcatccytaagctctggggccattttgtttacaggcaaggacctaagtgagccctgagaattgtgccttctcttctcttactgctcacgtatgcggtctctttcttgggcccatttttcaccactgttagttgacacagacgtctgcaggatcaaaggtagaagcagagacaccctggagcacagtcactttctctacattagccaaatgcagtcatgatgcctccacccaggtgtgggcctgggtctcaggtgctgagtggaattgagggtgcccgtcttggggaagtaatcaaaggcagcctcataccagggtgcacgacagcaccaggagcctttcacagtgtctagtgagcactgcagccaggtactcatactggtcagcagacctaccctcatggtccctgggcttacttactttgtcacctgtcacctgccaggtttcattttttgtcatcaaacccgattccaatgttgagtatttatttttttctttttaagaagaaaaatgcctggcaagcaattctgtacagatttttctttttca

SEQ ID NO: 703660 - DNA, 675 bp, Homo sapiens
ccaggaacttttcattatcatctgctaacaaagctaatggcaagatgtatacattataatgtatttataagtagttatcaagaatttcttttgtgtaaatgcccaagtactctggctgtgtcctttctgtcatccctaagctctggggccattttgtttacaggcaaggacctaagtgagccctgagaattgtgccttctcttctcttactgctcacgtatgcggtctctttcttgggcccatttttcaccactgttagttgacacagacgtctgcaggatcaaaggtagaagcagagacaccctggagcacagtcactttctctacattagccaaatgcagtcatgatgcctccacccaggtgtgggcctgggtctcaggtgctgagtggaattgagggtgcccgtcttggggaagtaatcaaaggcagcctcataccagggtgcacgacagcaccaggagcctttcacagtgtctrgtgagcactgcagccaggtactcatactggtcagcagacctaccctcatggtccctgggcttacttactttgtcacctgtcacctgccaggtttcattttttgtcatcaaacccgattccaatgttgagtatttatttttttctttttaagaagaaaaatgcctggcaagcaattctgtacagatttttctttttca

SEQ ID NO: 703661 - DNA, 2430 bp, Homo sapiens
ttatttctctgccattggactttatcctcagagttaattgggcagatttcagcacttgtcttgctcatgctattctttctaccttttcagtttctgttcatctggcctcattcactcagatgtggcagacaatttattgttttcatgaagctttctctgactgttctctcattgaccttatgtgttagcaatcactgtctagtctgcgcagaaaaacttagttcttaattttacatggcttttttttatggaagataattttctctcattataaatttgcttaatgggggaataatatataatatgtatgccacctatccttgcatacattgaaartattttagcttcgaagtttgtagcatacaattcaatactttataccataccaattatttcttctttgagaccttgacacagtaaggtttatattctaagtgtgtttttagcaattatatatcaaatctaaaccaattagtttaatacaggagacttgttaaatcacatatttatgtttttctctctatgaaaaagaatctaaattggccttttttcactatgcagcagaactgtatttctggactgctaccagtttgtcagctgaacagttctgggtgcagcttgtctgatgacggatagcacagcacctcaatctgagtgctcagcagagtgcttgtgaaggcagcaccacagcaacagttgctcagagggaacggattcaggagccttgatttagcaatagagtccagggttttcagctcagtgtctttagcctgtctctgctggtcatgtcagttatgtactattcaatccaggaggtgatgtttacattgtagtacatacatagtcattgcctaatgagtcatacagagagaaaagtaagttataaattatgtcccccatttgctgcaactctcagtggtaagaatgattcagtgcagctataggagagtacttccattggcatgccacctgcctaaaatacacaattttgttaagatatgcaataaaattattatgttaatagcaaatattttatgtagctcactatgttccacgtagtcttctaagtgtttcatgttagtccccagttaaacacctggttttggaaggctgaagcaggaggatcgtttgagcccatgagtttgagaccagccagagcaatatagtgagaccctgtctcaaaaaaaaaaaaaaaattaaacacttatctgaggcatggtggtgcacgcctgtagtcccagctacattgggaggctgtggtaggagggtcgtttgagcttggaatattgaggctgtagtgaacagtgatcaagccactgcactccaggctgggtaacagagggagactctgtctcataaataaaacgttttgtatagattcccatagaaatgagttagacatcagtcatagaattattagccactttgatgtctaccttgggagtaaaacatataataaggggcagcgttaaaccatctcaatcaatagcctccaacttctcgagaaggttcttatttcatgaatttctaaacaagccactacctggattaagacatttggtggacaccattttgagatgaagaatcttgagtgagaagaagggagatttctacttactgaagcttcccaatgacatagttaagtgtcccccaaaagaaactttagaacaagactttcatcatgccatatctctatggaaaaggaatttctttaaaagaaaacaaagtcaaacaattgataatatgattctcatgggaaagttttcatcataaaagaaaaagagggctgggtgccgtggctcacgtctgtaatcccaacactttgggaggctgaggtgcgtggattacctgaggtcagcagttcaaaaacagcctggccaacatggtgaaaccctgtctctactgaaaatacaaaaattagccaggtgtggtggtgtgcacctgtagtcccagctacttgggaggccgagacaggagaatcacttgaacccaggaggtggtatttgcagtaagccgagatggtgccactgcactccagcctggatgacacagtgtgactccatctcaaaaaaaagaaaaaaagaaaaaaaagggacaaattatactggtccaaaaaagaagaaagcaagaaaaaaaggacaaagtatactggttagtatcataacagtgagatagtccccctttgagattagaaaataacagtatactcaaagtaacattaatgagaaccaacataaaatagacaacattcactatctacaaaagtaatctgcaccaattagcaatgtatgagcatgtggttgagaatattttctataatatgtgtactagaaggaagagacctcaagaaaatggtcagagctggaaatgtagattagggaatctaggtcaaagttttgagattttaggagccctgagagaatttaaaaa

SEQ ID NO: 703662 - DNA, 2430 bp, Homo sapiens
ttatttctctgccattggactttatcctcagagttaattgggcagatttcagcacttgtcttgctcatgctattctttctaccttttcagtttctgttcatctggcctcattcactcagatgtggcagacaatttattgttttcatgaagctttctctgactgttctctcattgaccttatgtgttagcaatcactgtctagtctgcgcagaaaaacttagttcttaattttacatggcttttttttatggaagataattttctctcattataaatttgcttaatgggggaataatatataatatgtatgccacctatccttgcatacattgaaaatattttagcttmgaagtttgtagcatacaattcaatactttataccataccaattatttcttctttgagaccttgacacagtaaggtttatattctaagtgtgtttttagcaattatatatcaaatctaaaccaattagtttaatacaggagacttgttaaatcacatatttatgtttttctctctatgaaaaagaatctaaattggccttttttcactatgcagcagaactgtatttctggactgctaccagtttgtcagctgaacagttctgggtgcagcttgtctgatgacggatagcacagcacctcaatctgagtgctcagcagagtgcttgtgaaggcagcaccacagcaacagttgctcagagggaacggattcaggagccttgatttagcaatagagtccagggttttcagctcagtgtctttagcctgtctctgctggtcatgtcagttatgtactattcaatccaggaggtgatgtttacattgtagtacatacatagtcattgcctaatgagtcatacagagagaaaagtaagttataaattatgtcccccatttgctgcaactctcagtggtaagaatgattcagtgcagctataggagagtacttccattggcatgccacctgcctaaaatacacaattttgttaagatatgcaataaaattattatgttaatagcaaatattttatgtagctcactatgttccacgtagtcttctaagtgtttcatgttagtccccagttaaacacctggttttggaaggctgaagcaggaggatcgtttgagcccatgagtttgagaccagccagagcaatatagtgagaccctgtctcaaaaaaaaaaaaaaaattaaacacttatctgaggcatggtggtgcacgcctgtagtcccagctacattgggaggctgtggtaggagggtcgtttgagcttggaatattgaggctgtagtgaacagtgatcaagccactgcactccaggctgggtaacagagggagactctgtctcataaataaaacgttttgtatagattcccatagaaatgagttagacatcagtcatagaattattagccactttgatgtctaccttgggagtaaaacatataataaggggcagcgttaaaccatctcaatcaatagcctccaacttctcgagaaggttcttatttcatgaatttctaaacaagccactacctggattaagacatttggtggacaccattttgagatgaagaatcttgagtgagaagaagggagatttctacttactgaagcttcccaatgacatagttaagtgtcccccaaaagaaactttagaacaagactttcatcatgccatatctctatggaaaaggaatttctttaaaagaaaacaaagtcaaacaattgataatatgattctcatgggaaagttttcatcataaaagaaaaagagggctgggtgccgtggctcacgtctgtaatcccaacactttgggaggctgaggtgcgtggattacctgaggtcagcagttcaaaaacagcctggccaacatggtgaaaccctgtctctactgaaaatacaaaaattagccaggtgtggtggtgtgcacctgtagtcccagctacttgggaggccgagacaggagaatcacttgaacccaggaggtggtatttgcagtaagccgagatggtgccactgcactccagcctggatgacacagtgtgactccatctcaaaaaaaagaaaaaaagaaaaaaaagggacaaattatactggtccaaaaaagaagaaagcaagaaaaaaaggacaaagtatactggttagtatcataacagtgagatagtccccctttgagattagaaaataacagtatactcaaagtaacattaatgagaaccaacataaaatagacaacattcactatctacaaaagtaatctgcaccaattagcaatgtatgagcatgtggttgagaatattttctataatatgtgtactagaaggaagagacctcaagaaaatggtcagagctggaaatgtagattagggaatctaggtcaaagttttgagattttaggagccctgagagaatttaaaaa

SEQ ID NO: 703663 - DNA, 2430 bp, Homo sapiens
ttatttctctgccattggactttatcctcagagttaattgggcagatttcagcacttgtcttgctcatgctattctttctaccttttcagtttctgttcatctggcctcattcactcagatgtggcagacaatttattgttttcatgaagctttctctgactgttctctcattgaccttatgtgttagcaatcactgtctagtctgcgcagaaaaacttagttcttaattttacatggcttttttttatggaagataattttctctcattataaatttgcttaatgggggaataatatataatatgtatgccacctatccttgcatacattgaaaatattttagcttcgaagtttgtagcatacaattcaatactttataccataccaattatttcttctttgagaccttgrcacagtaaggtttatattctaagtgtgtttttagcaattatatatcaaatctaaaccaattagtttaatacaggagacttgttaaatcacatatttatgtttttctctctatgaaaaagaatctaaattggccttttttcactatgcagcagaactgtatttctggactgctaccagtttgtcagctgaacagttctgggtgcagcttgtctgatgacggatagcacagcacctcaatctgagtgctcagcagagtgcttgtgaaggcagcaccacagcaacagttgctcagagggaacggattcaggagccttgatttagcaatagagtccagggttttcagctcagtgtctttagcctgtctctgctggtcatgtcagttatgtactattcaatccaggaggtgatgtttacattgtagtacatacatagtcattgcctaatgagtcatacagagagaaaagtaagttataaattatgtcccccatttgctgcaactctcagtggtaagaatgattcagtgcagctataggagagtacttccattggcatgccacctgcctaaaatacacaattttgttaagatatgcaataaaattattatgttaatagcaaatattttatgtagctcactatgttccacgtagtcttctaagtgtttcatgttagtccccagttaaacacctggttttggaaggctgaagcaggaggatcgtttgagcccatgagtttgagaccagccagagcaatatagtgagaccctgtctcaaaaaaaaaaaaaaaattaaacacttatctgaggcatggtggtgcacgcctgtagtcccagctacattgggaggctgtggtaggagggtcgtttgagcttggaatattgaggctgtagtgaacagtgatcaagccactgcactccaggctgggtaacagagggagactctgtctcataaataaaacgttttgtatagattcccatagaaatgagttagacatcagtcatagaattattagccactttgatgtctaccttgggagtaaaacatataataaggggcagcgttaaaccatctcaatcaatagcctccaacttctcgagaaggttcttatttcatgaatttctaaacaagccactacctggattaagacatttggtggacaccattttgagatgaagaatcttgagtgagaagaagggagatttctacttactgaagcttcccaatgacatagttaagtgtcccccaaaagaaactttagaacaagactttcatcatgccatatctctatggaaaaggaatttctttaaaagaaaacaaagtcaaacaattgataatatgattctcatgggaaagttttcatcataaaagaaaaagagggctgggtgccgtggctcacgtctgtaatcccaacactttgggaggctgaggtgcgtggattacctgaggtcagcagttcaaaaacagcctggccaacatggtgaaaccctgtctctactgaaaatacaaaaattagccaggtgtggtggtgtgcacctgtagtcccagctacttgggaggccgagacaggagaatcacttgaacccaggaggtggtatttgcagtaagccgagatggtgccactgcactccagcctggatgacacagtgtgactccatctcaaaaaaaagaaaaaaagaaaaaaaagggacaaattatactggtccaaaaaagaagaaagcaagaaaaaaaggacaaagtatactggttagtatcataacagtgagatagtccccctttgagattagaaaataacagtatactcaaagtaacattaatgagaaccaacataaaatagacaacattcactatctacaaaagtaatctgcaccaattagcaatgtatgagcatgtggttgagaatattttctataatatgtgtactagaaggaagagacctcaagaaaatggtcagagctggaaatgtagattagggaatctaggtcaaagttttgagattttaggagccctgagagaatttaaaaa

SEQ ID NO: 703664 - DNA, 2430 bp, Homo sapiens
ttatttctctgccattggactttatcctcagagttaattgggcagatttcagcacttgtcttgctcatgctattctttctaccttttcagtttctgttcatctggcctcattcactcagatgtggcagacaatttattgttttcatgaagctttctctgactgttctctcattgaccttatgtgttagcaatcactgtctagtctgcgcagaaaaacttagttcttaattttacatggcttttttttatggaagataattttctctcattataaatttgcttaatgggggaataatatataatatgtatgccacctatccttgcatacattgaaaatattttagcttcgaagtttgtagcatacaattcaatactttataccataccaattatttcttctttgagaccttgacacagtaaggtttatattctaagtgtgtttttarcaattatatatcaaatctaaaccaattagtttaatacaggagacttgttaaatcacatatttatgtttttctctctatgaaaaagaatctaaattggccttttttcactatgcagcagaactgtatttctggactgctaccagtttgtcagctgaacagttctgggtgcagcttgtctgatgacggatagcacagcacctcaatctgagtgctcagcagagtgcttgtgaaggcagcaccacagcaacagttgctcagagggaacggattcaggagccttgatttagcaatagagtccagggttttcagctcagtgtctttagcctgtctctgctggtcatgtcagttatgtactattcaatccaggaggtgatgtttacattgtagtacatacatagtcattgcctaatgagtcatacagagagaaaagtaagttataaattatgtcccccatttgctgcaactctcagtggtaagaatgattcagtgcagctataggagagtacttccattggcatgccacctgcctaaaatacacaattttgttaagatatgcaataaaattattatgttaatagcaaatattttatgtagctcactatgttccacgtagtcttctaagtgtttcatgttagtccccagttaaacacctggttttggaaggctgaagcaggaggatcgtttgagcccatgagtttgagaccagccagagcaatatagtgagaccctgtctcaaaaaaaaaaaaaaaattaaacacttatctgaggcatggtggtgcacgcctgtagtcccagctacattgggaggctgtggtaggagggtcgtttgagcttggaatattgaggctgtagtgaacagtgatcaagccactgcactccaggctgggtaacagagggagactctgtctcataaataaaacgttttgtatagattcccatagaaatgagttagacatcagtcatagaattattagccactttgatgtctaccttgggagtaaaacatataataaggggcagcgttaaaccatctcaatcaatagcctccaacttctcgagaaggttcttatttcatgaatttctaaacaagccactacctggattaagacatttggtggacaccattttgagatgaagaatcttgagtgagaagaagggagatttctacttactgaagcttcccaatgacatagttaagtgtcccccaaaagaaactttagaacaagactttcatcatgccatatctctatggaaaaggaatttctttaaaagaaaacaaagtcaaacaattgataatatgattctcatgggaaagttttcatcataaaagaaaaagagggctgggtgccgtggctcacgtctgtaatcccaacactttgggaggctgaggtgcgtggattacctgaggtcagcagttcaaaaacagcctggccaacatggtgaaaccctgtctctactgaaaatacaaaaattagccaggtgtggtggtgtgcacctgtagtcccagctacttgggaggccgagacaggagaatcacttgaacccaggaggtggtatttgcagtaagccgagatggtgccactgcactccagcctggatgacacagtgtgactccatctcaaaaaaaagaaaaaaagaaaaaaaagggacaaattatactggtccaaaaaagaagaaagcaagaaaaaaaggacaaagtatactggttagtatcataacagtgagatagtccccctttgagattagaaaataacagtatactcaaagtaacattaatgagaaccaacataaaatagacaacattcactatctacaaaagtaatctgcaccaattagcaatgtatgagcatgtggttgagaatattttctataatatgtgtactagaaggaagagacctcaagaaaatggtcagagctggaaatgtagattagggaatctaggtcaaagttttgagattttaggagccctgagagaatttaaaaa

SEQ ID NO: 703665 - DNA, 969 bp, Homo sapiens
ctcaccgccgccatctctggtctcactctggtctcacacacatrcacaaattaaatttaatttaaaaatttaaaaattgttttaaaataagtggaatatttacatggattatgtatacattcattttgtaggactatagatcccatgtaactgggaactctttactcttctaacacaacatttatttagccacaaatgaaagaccagtgatgtagcctgtacacaaaaaagtaagaaaacactggttaggctgtggcaggggtggggggaagagatctacaaatttaaaattttattgggaaggatcactaattagaatcagaacaattactgctttaaagtagttaagaacagagcacaaggaacccagagaagaagcagatatgattcagagcagagcttacagagcagatggtatctgagccgagactgatagaataacattaataagggcattcacggccatttattatcacttaactgcaatgcattttgtataagttatttctactcttcatatcaaccatggaaaataatacttattcttctcttttgaagttaaagaagtggtaagtggtctaagaagataaattaacataccaacaccaaatagctcaagttcagtgactcaagagggcccgcgtctccccaagaggttactcagcaagcagacgaggtagagagcccttccaagaagtgacagtgagatgtgaaaggtctcagtgtgtctctgagaacaacagaaaccagtatgtagaccaagtgggaaaagccacggaagaggcagggatttcctcttaagatagcaagaataaacagagcagggctgaggaaagccatggaaaacgggcagaatgccatgcatttagtgagaaaaaaaacaacttttactttagaaagggggaaagaatggtggtggtctaggtaagcctagaagcagaggaaagggcaatggagaaaaaataaaca

SEQ ID NO: 703666 - DNA, 969 bp, Homo sapiens
ctcaccgccgccatctctggtctcactctggtctcacacacatacacaaattaaatttaatttaaaaattwaaaaattgttttaaaataagtggaatatttacatggattatgtatacattcattttgtaggactatagatcccatgtaactgggaactctttactcttctaacacaacatttatttagccacaaatgaaagaccagtgatgtagcctgtacacaaaaaagtaagaaaacactggttaggctgtggcaggggtggggggaagagatctacaaatttaaaattttattgggaaggatcactaattagaatcagaacaattactgctttaaagtagttaagaacagagcacaaggaacccagagaagaagcagatatgattcagagcagagcttacagagcagatggtatctgagccgagactgatagaataacattaataagggcattcacggccatttattatcacttaactgcaatgcattttgtataagttatttctactcttcatatcaaccatggaaaataatacttattcttctcttttgaagttaaagaagtggtaagtggtctaagaagataaattaacataccaacaccaaatagctcaagttcagtgactcaagagggcccgcgtctccccaagaggttactcagcaagcagacgaggtagagagcccttccaagaagtgacagtgagatgtgaaaggtctcagtgtgtctctgagaacaacagaaaccagtatgtagaccaagtgggaaaagccacggaagaggcagggatttcctcttaagatagcaagaataaacagagcagggctgaggaaagccatggaaaacgggcagaatgccatgcatttagtgagaaaaaaaacaacttttactttagaaagggggaaagaatggtggtggtctaggtaagcctagaagcagaggaaagggcaatggagaaaaaataaaca

SEQ ID NO: 703667 - DNA, 969 bp, Homo sapiens
ctcaccgccgccatctctggtctcactctggtctcacacacatacacaaattaaatttaatttaaaaatttaaaaattgttttaaaataagtggaatatttacatggattatgtatacattcattttgtaggactatagatcccatgtaactgggaactctttactcttctaacacaacatttatttagccacaaatgaaagaccagtgatgtagcctgtacacaaaaaagtaagaaaacactggttaggctgkggcaggggtggggggaagagatctacaaatttaaaattttattgggaaggatcactaattagaatcagaacaattactgctttaaagtagttaagaacagagcacaaggaacccagagaagaagcagatatgattcagagcagagcttacagagcagatggtatctgagccgagactgatagaataacattaataagggcattcacggccatttattatcacttaactgcaatgcattttgtataagttatttctactcttcatatcaaccatggaaaataatacttattcttctcttttgaagttaaagaagtggtaagtggtctaagaagataaattaacataccaacaccaaatagctcaagttcagtgactcaagagggcccgcgtctccccaagaggttactcagcaagcagacgaggtagagagcccttccaagaagtgacagtgagatgtgaaaggtctcagtgtgtctctgagaacaacagaaaccagtatgtagaccaagtgggaaaagccacggaagaggcagggatttcctcttaagatagcaagaataaacagagcagggctgaggaaagccatggaaaacgggcagaatgccatgcatttagtgagaaaaaaaacaacttttactttagaaagggggaaagaatggtggtggtctaggtaagcctagaagcagaggaaagggcaatggagaaaaaataaaca

SEQ ID NO: 703668 - DNA, 969 bp, Homo sapiens
ctcaccgccgccatctctggtctcactctggtctcacacacatacacaaattaaatttaatttaaaaatttaaaaattgttttaaaataagtggaatatttacatggattatgtatacattcattttgtaggactatagatcccatgtaactgggaactctttactcttctaacacaacatttatttagccacaaatgaaagaccagtgatgtagcctgtacacaaaaaagtaagaaaacactggttaggctgtggcakgggtggggggaagagatctacaaatttaaaattttattgggaaggatcactaattagaatcagaacaattactgctttaaagtagttaagaacagagcacaaggaacccagagaagaagcagatatgattcagagcagagcttacagagcagatggtatctgagccgagactgatagaataacattaataagggcattcacggccatttattatcacttaactgcaatgcattttgtataagttatttctactcttcatatcaaccatggaaaataatacttattcttctcttttgaagttaaagaagtggtaagtggtctaagaagataaattaacataccaacaccaaatagctcaagttcagtgactcaagagggcccgcgtctccccaagaggttactcagcaagcagacgaggtagagagcccttccaagaagtgacagtgagatgtgaaaggtctcagtgtgtctctgagaacaacagaaaccagtatgtagaccaagtgggaaaagccacggaagaggcagggatttcctcttaagatagcaagaataaacagagcagggctgaggaaagccatggaaaacgggcagaatgccatgcatttagtgagaaaaaaaacaacttttactttagaaagggggaaagaatggtggtggtctaggtaagcctagaagcagaggaaagggcaatggagaaaaaataaaca

SEQ ID NO: 703669 - DNA, 969 bp, Homo sapiens
ctcaccgccgccatctctggtctcactctggtctcacacacatacacaaattaaatttaatttaaaaatttaaaaattgttttaaaataagtggaatatttacatggattatgtatacattcattttgtaggactatagatcccatgtaactgggaactctttactcttctaacacaacatttatttagccacaaatgaaagaccagtgatgtagcctgtacacaaaaaagtaagaaaacactggttaggctgtggcaggggtggggggaagagatctacaaatttaaaattttattgggaaggatcactaattagaatcagaacaattactgctttaaagtagttaagaacagagcacaaggaacccagagaagaagcagatatgattcagagcagagcttacagagcagatggtatctgagccgagactgatagaataacattaataagggcattcacggccatttattatcacttaactgcaatgcattttgtataagttatttctactcttcatatcaaccatggaaaataatacttattcttctcttttgaagttaaagaagtggtaagtggtctaagaagataaattaacataccaacaccaaatagctcaagttcagtgactcaagagggcccgcgtctccccaagaggttrctcagcaagcagacgaggtagagagcccttccaagaagtgacagtgagatgtgaaaggtctcagtgtgtctctgagaacaacagaaaccagtatgtagaccaagtgggaaaagccacggaagaggcagggatttcctcttaagatagcaagaataaacagagcagggctgaggaaagccatggaaaacgggcagaatgccatgcatttagtgagaaaaaaaacaacttttactttagaaagggggaaagaatggtggtggtctaggtaagcctagaagcagaggaaagggcaatggagaaaaaataaaca

SEQ ID NO: 703670 - DNA, 969 bp, Homo sapiens
ctcaccgccgccatctctggtctcactctggtctcacacacatacacaaattaaatttaatttaaaaatttaaaaattgttttaaaataagtggaatatttacatggattatgtatacattcattttgtaggactatagatcccatgtaactgggaactctttactcttctaacacaacatttatttagccacaaatgaaagaccagtgatgtagcctgtacacaaaaaagtaagaaaacactggttaggctgtggcaggggtggggggaagagatctacaaatttaaaattttattgggaaggatcactaattagaatcagaacaattactgctttaaagtagttaagaacagagcacaaggaacccagagaagaagcagatatgattcagagcagagcttacagagcagatggtatctgagccgagactgatagaataacattaataagggcattcacggccatttattatcacttaactgcaatgcattttgtataagttatttctactcttcatatcaaccatggaaaataatacttattcttctcttttgaagttaaagaagtggtaagtggtctaagaagataaattaacataccaacaccaaatagctcaagttcagtgactcaagagggcccgcgtctccccaagaggttactcagcargcagacgaggtagagagcccttccaagaagtgacagtgagatgtgaaaggtctcagtgtgtctctgagaacaacagaaaccagtatgtagaccaagtgggaaaagccacggaagaggcagggatttcctcttaagatagcaagaataaacagagcagggctgaggaaagccatggaaaacgggcagaatgccatgcatttagtgagaaaaaaaacaacttttactttagaaagggggaaagaatggtggtggtctaggtaagcctagaagcagaggaaagggcaatggagaaaaaataaaca

SEQ ID NO: 703671 - DNA, 593 bp, Homo sapiens
caggctcccctgccctgtggcctttgaatcccacgccccggggctgtgagggtctcgctctggctgttcccgccgcctgggtctcctggacactcccgaagcctccattaccacctggatgtggggggcgcggagggtcttctccaggcagcgctcactgtgcacctctggcactcggcacctccatggcacgtccagggctcccctgccaccctcatttctgctctggtcccagcccagagcatctgccagcggcccgctccagccccaccgctcgcaggcggaccctggacgtgccataggtcctcctcccctcccgccaacacccgggcagctgccacatcctgggcgwgcggctccatgcgctcccagggcctcgtgctggggttagtgccatgctgtcgccgcctggagattcggggttggtttccgttttacaccgggtccccgcggtgtgcagccatctgcctgctcaggcccagcgaagcatctggaacacccagccgcttttcctgtcgctgcctcgcagcccagcccaggcctccttcgcggttccctgcctgcgggagcagcccctaaggcttatcgcctcc

SEQ ID NO: 703672 - DNA, 593 bp, Homo sapiens
caggctcccctgccctgtggcctttgaatcccacgccccggggctgtgagggtctcgctctggctgttcccgccgcctgggtctcctggacactcccgaagcctccattaccacctggatgtggggggcgcggagggtcttctccaggcagcgctcactgtgcacctctggcactcggcacctccatggcacgtccagggctcccctgccaccctcatttctgctctggtcccagcccagagcatctgccagcggcccgctccagccccaccgctcgcaggcggaccctggacgtgccataggtcctcctcccctcccgccaacacccgggcagctgccacatcctgggcgagcggctccatgcgctcccagggcctcgtgctggggttagtgccatgctgtcgccgcctggagattcggggttggtttccgttttacaccgggtccccgcggtgtgyagccatctgcctgctcaggcccagcgaagcatctggaacacccagccgcttttcctgtcgctgcctcgcagcccagcccaggcctccttcgcggttccctgcctgcgggagcagcccctaaggcttatcgcctcc

SEQ ID NO: 703673 - DNA, 921 bp, Homo sapiens
tgcatttattaatgcttcaatgcaggaagtgtccactggattctcttgcagggaatgctaggggacagctgagtaagggacacataaaaatctgagcctttggactcctttctctatatgccsaatattaaccaactgtgcatattaataatgcctattccaaggggtcagctaacacattaaatctcaaactcccggtgagtgtgcctgtccaggaatttggcccgttcaagccttgtattttatcctctgggatgtaatatacttagattccatttccttaagtgcactccaaagaggggtgtagttctgtaactttttcaatatacaggttaatttgtcttgaaggagacgttctacttctctatccaggatgcgttagtatcttgtaagagccctggagaaaatgatgggtattgagggatgaatcttgagacaaatacacatcagtttctgaggcaactaaccaaggtgcagtcactaggtggctttaagtggagaaaagaggggtgggcttgtggatcagagggagatagagtgattcttcccacttaactcttggtcaagattgtctttgctaaagcctatgcttgcaaataaattttaggataagcttgcttatgcctattttaaaaaacttgacctgatgtgatagaaatcacactaaacttataagttaatttgggaagaattgacaattttactatgttgaactttccatcccttggacatgatatgtctctccatttatttaggtctcttttggtttctttcatcaacatcttacaattttcagcgtgcataacctggacaagttttgttagatttataattgagtatttaatattctttgaagagaaaggtactgtgttttaaatttcagtttccaaatctgcataattaacgtgtagaaatgtgatt

SEQ ID NO: 703674 - DNA, 1189 bp, Homo sapiens
tgtaattttaaaaatactagttttctttctatcatcccatcctctaaaacttgaaaaacagaaggactctgcctgccatatttataagtgtatattcagacaacagctgtattcctgacacagaataaaaatgctttaaacttttctgaggaatgtatggatgaatgaatgcatgaatgaatggatgggtgaatggtcatatggatggaacaaatgaggcaactgtgatggcaatattttcaaaataatctttcgagaactataatctgaaaaataaagtcatgctactttcttatgtgaaagacaagctgagaaatacctgaaatgttttagtaattatttaaaaacaaaagggaaaaattgaaatatggactgttataaaacaaattgaatacatataatttctaaacagtagtaccccattaagctaataatctcccatgaagaattgccggatatgagtttactatagttcaaatctatagtatttacacatgtttttgtgatttctattgatatagtttgttttaatttggtcttgagttctctcccttgaaaagtgaccataagaagttagccactttctaggaaagctgtgtccgagggcaagttaggttcagatatgtgtgtcaggtgagacacaatggggaggtgaaaccaaactgtataaacagaagaaatttattactcacaggtctcagagaggttgagtgtttcaatgagagcctatggaaagttctgaggtgacagggagctcaaccagcaagcgaaaagggagactgagaggacgtttaagactattcccttattaaggtccatgggattatcccctagatttttccacaggggttatggactggctagttttttaaaaacatgcgtaaagggaaaaatttatttatatgactctggtattgggacattaattttatcacaataagtagctgtggggtgagttgggttttgggttagggagatgaggaacaagtaggctatatcaaaaacaaccacacaggggcagggagttttaagcaagcaaaaggtgatgaattttagataactatatcaggcctaaacataaatgctaaggaagcaactacaaaatatttatgacatatgtgtattatagagaaacagtgctacattattttggattaaagctaaaatgatcaaatggaaayataatttt

SEQ ID NO: 703675 - DNA, 1000 bp, Homo sapiens
ttttgagaaaaatgtagtggtggttgaccctcaataaaatggtaatatctcgtgatttcttaattattttgtctacgtattggggtcagatattttgaatgttctttaaatatattttaggtgatcctagtgttacacatttgaaaatgataatgtggcacaatttttcatcaaaatataaccacaatcttgatgcttcaaatacacacctttctaagatttgatgaaagatatggtggattcattggcascttcctaatacctatttgataagtgcatcctttgtcaggatgctgccaagatagtgctatttagtgacaggcttcaaatgtatacagccaatatagagcttctgaggttattaaagttcttctgtaacagagtaatggatggctttaatcctttttaggctggctataaacttgtaatactttgctgactgtgcaaaatagcctataatatagacttataccttttcttatgtgtgtgtttccaagatctattcatcagcttaatgactgatttttcctgaggtcggttttagggcttggagccaatcacactgaaactatttgggagaaaaggaaaacatttcactgtcaaataccttgtgtatgttaataaattttatacatatcttaatgttgttttgtacatgtcttacaagtaccatcttatctttacttagtaagcatttcagttctctcatggtggggctaatccaaagcaaatcttcaaattaactggtatttgttactggcatctcctcttccattgaatccagaaacaaaacagtgctttggcaaattataaagttcctgattgatagcacctcagctatggctctcttcttcccagcaagccttacctgaacacatgtttccattctctcctaaccctgttctttgctttgtacagaacagcattttgacaggtcaaagaaggctaagatgataaatagcttcagacattagccttccaatggtgatttcatgttaat

SEQ ID NO: 703676 - DNA, 1000 bp, Homo sapiens
ttttgagaaaaatgtagtggtggttgaccctcaataaaatggtaatatctcgtgatttcttaattattttgtctacgtattggggtcagatattttgaatgttctttaaatatattttaggtgatcctagtgttacacatttgaaaatgataatgtggcacaatttttcatcaaaatataaccacaatcttgatgcttcaaatacacacctttctaagatttgatgaaagatatggtggattcattggcaccttcctaatacctatttgataagtgcatcctttgtcaggatgctgccaagatagtgctatttagtgacaggcttcaaatgtatacagccaatatagagcttctgaggttattaaagttcttctgtaacagagtaatggatggctttaatcctttttaggctggctataaacttgtaatactttgctgactgtgcaaaatagcctataatatagacttataccttttcttatgtgtgtgtttccaagatctattcatcagcttaatgactgatttttcctgaggtcggttttagggcttggagccaatcacactgaaactatttgggagaaaaggaaaacatttcactgtcaaataccttgtgtatgttaataaattttatacatatcttaatgttgttttgtacatgtcttacaagtaccatcttatctttacttagtaagcatttcagttctctcatggtggggctaatccaaagcaaatcttcaaattaactggtatttgttactggcatctcctcttccattgaatccagaaacaaaacagtgctttggcaaattataaagttcctgattgatagcacctcagctatrgctctcttcttcccagcaagccttacctgaacacatgtttccattctctcctaaccctgttctttgctttgtacagaacagcattttgacaggtcaaagaaggctaagatgataaatagcttcagacattagccttccaatggtgatttcatgttaat

SEQ ID NO: 703677 - DNA, 1000 bp, Homo sapiens
ttttgagaaaaatgtagtggtggttgaccctcaataaaatggtaatatctcgtgatttcttaattattttgtctacgtattggggtcagatattttgaatgttctttaaatatattttaggtgatcctagtgttacacatttgaaaatgataatgtggcacaatttttcatcaaaatataaccacaatcttgatgcttcaaatacacacctttctaagatttgatgaaagatatggtggattcattggcaccttcctaatacctatttgataagtgcatcctttgtcaggatgctgccaagatagtgctatttagtgacaggcttcaaatgtatacagccaatatagagcttctgaggttattaaagttcttctgtaacagagtaatggatggctttaatcctttttaggctggctataaacttgtaatactttgctgactgtgcaaaatagcctataatatagacttataccttttcttatgtgtgtgtttccaagatctattcatcagcttaatgactgatttttcctgaggtcggttttagggcttggagccaatcacactgaaactatttgggagaaaaggaaaacatttcactgtcaaataccttgtgtatgttaataaattttatacatatcttaatgttgttttgtacatgtcttacaagtaccatcttatctttacttagtaagcatttcagttctctcatggtggggctaatccaaagcaaatcttcaaattaactggtatttgttactggcatctcctcttccattgaatccagaaacaaaacagtgctttggcaaattataaagttcctgattgatagcacctcagctatggctctcttcttcccagcaagccttacctgaacacatgtttccattctctcctaaccctgttctttgctttgtacagaacrgcattttgacaggtcaaagaaggctaagatgataaatagcttcagacattagccttccaatggtgatttcatgttaat

SEQ ID NO: 703678 - DNA, 601 bp, Homo sapiens
tgccaaaatgaacacaagattctccccctactcaaaaactcctcctactcctatcttctgaatcttctcagttgttcagacaaaaatccttggagtcatccttgactcctttctttcttgtcgcaccacatcagataatttttttgaaattccttcttcaaaatataaccaaactctgaccactttccaacacctccattactactatctcttctaagctgccattatctctcacttcttattgcaaaaatcccttaactttgtttttccttctctccttattcctctgaagtctattttcaacccagcagatggagtgaacctttttttttttttwaaaaatctaagtaaaataatgtgacttttttcctcaaaaccctcccatggcttcctgactctctcagtttaaaaatcaaaatcctcttcatcacctgctagatcctacctttctgtcttcatctcccaccactccctctctggctcactctgctcagccacactggtgtccttcctagaacatgtcaggcttgcctcagggcctttgcatgggttagatcctttaccctgagattttatcacacaggttccccatggctcactc

SEQ ID NO: 703679 - DNA, 1847 bp, Homo sapiens
ataatcagtataaaaatattgatgttttgcatctgcatcagccaacaatctttttgtggcaatagtacactaccttgagaaatacagggacataataagatacttttctggcctcaaagatcctccaccctggatgaggagtcaaagttgaagacagttgaaaaaaatagaacagtgattcttaacactggggaacattcaggaaatttcaggggacagtgactggggagtactcctggtgcttggtgggcagaggccagggaggctagatgtcctgggatacatgggacagcctttcaccagggaggtttgctgtgtgtcccacacaacttccaaaaagtcccagcagctattcacataggtgaaaaaacaaaatgcatttataattctctgagcctagaacccaactactttttacgtataagtattaaatatttttacatggttttaatccacaccaaattttctagtaatgcagcaatagtgtatattgtgaagatggcactttgttacatttgaaacctttcaaagaatcattcatcatatcaggaaaaaggaaaatttttctaacataacacccctgtattcattttcatgctactgttacttttgtggtaattctccccataagagaaatcatagcaaacccttagatagcacttactgttctaagagccttatgtatatgcactaatttaatcctcacaacaaccctgtaaggtagaaactattattctcattttccatgtgagtaaactgaagtatgggaaatttaaatagcttccccaaggtcacacagctaatcagttatagtagtttttgactactttttaaaatgtagttgtgtacaagtatttatattttgtagtatttgatagaaattactcatttctcctttatttcactgataagccattatactgattttttttttwaatctatgtagggagtatttagcctatatgtattcagtacagtattatgaaggaagtgtatttaggaatttcatttcaggatgaatacttgttataaaaagtaaaaagtaactgagtcttaagtttgtcaaagaataaaattgatggatggatggatttttttttttttaaaggagggggaaggcagtgagcctgactgcagagtgtaatttgcatttaaatgacaagtggtatgacacttccacctgttcttcagggagcctcaccaagtatgttttgcctcgaggcctttgcttttgccattcctcacttggttttcccttctctaccctacctctcaccccgcaatccacatggcttgtttcctttcttcagatctcctggtatacgtcatctcatcagaggggctttccatgatcaccttatagcaacctctatccgtaatccttatcccttctttctctccattgtgcttatcaccccatgacgtattatgtatttattaacttagttttggaatataagctgcaggtgagaaagctttgtttctctttctcaggcagtgcctgacatagagtaggagcttaataaatattgaatgaaggggcagatgtagaatcgttagaatttggaaaaaggctggaatatttggtcctaagatgtactttgaatgatttaaatctgactgagaaaaccagtttgaggttggcagagtagaagaaggagggtattttaggccgagaatttggtaagacagagatgggattgtcagctgtatggtgaaggtggaggaatactagtctttcaggaacagagcaaatgtaatagagcagctgaaaataggcttggcgttggggattaaggtcagatatggcagtctggaatttacagagggatgtgatgaagcaggca

SEQ ID NO: 703680 - DNA, 1847 bp, Homo sapiens
ataatcagtataaaaatattgatgttttgcatctgcatcagccaacaatctttttgtggcaatagtacactaccttgagaaatacagggacataataagatacttttctggcctcaaagatcctccaccctggatgaggagtcaaagttgaagacagttgaaaaaaatagaacagtgattcttaacactggggaacattcaggaaatttcaggggacagtgactggggagtactcctggtgcttggtgggcagaggccagggaggctagatgtcctgggatacatgggacagcctttcaccagggaggtttgctgtgtgtcccacacaacttccaaaaagtcccagcagctattcacataggtgaaaaaacaaaatgcatttataattctctgagcctagaacccaactactttttacgtataagtattaaatatttttacatggttttaatccacaccaaattttctagtaatgcagcaatagtgtatattgtgaagatggcactttgttacatttgaaacctttcaaagaatcattcatcatatcaggaaaaaggaaaatttttctaacataacacccctgtattcattttcatgctactgttacttttgtggtaattctccccataagagaaatcatagcaaacccttagatagcacttactgttctaagagccttatgtatatgcactaatttaatcctcacaacaaccctgtaaggtagaaactattattctcattttccatgtgagtaaactgaagtatgggaaatttaaatagcttccccaaggtcacacagctaatcagttatagtagtttttgactactttttaaaatgtagttgtgtacaagtatttatattttgtagtatttgatagaaattactcatttctcctttatttcactgataagccattatactgattttttttttaaatctatgtagggagtatttagcctatatgtattcagtacagtattatgaaggaagtgtatttaggaatttcatttcaggatgaatacttgttataaaaagtaaaaagtaactgagtcttaagtttgtcaaagaataaaattgatggatggatggatttttttttttttaaaggagggggaaggcagtgagcctgactgcagagtgtaatttgcatttaaatgacaagtggtatgacacttccacctgttcttcagggagcctcaccaagtatgttttgcctcgaggcctttgcttttgccattcctcacttggttttcccttctctaccctacctctcaccccgcaatccacatggcttgtttcctttcttcagatctcctggtatacgtcatctcatcagaggggctttccatgatcaccttatagcaacctctatccgtaatccttatcccttctttctctccattgtgcttatcaccccatgacgtattatgtatttattaacttagttttggaatataagctgcaggtgagaaagctttgtttctctttctcaggcagtgcctgacatagrgtaggagcttaataaatattgaatgaaggggcagatgtagaatcgttagaatttggaaaaaggctggaatatttggtcctaagatgtactttgaatgatttaaatctgactgagaaaaccagtttgaggttggcagagtagaagaaggagggtattttaggccgagaatttggtaagacagagatgggattgtcagctgtatggtgaaggtggaggaatactagtctttcaggaacagagcaaatgtaatagagcagctgaaaataggcttggcgttggggattaaggtcagatatggcagtctggaatttacagagggatgtgatgaagcaggca

SEQ ID NO: 703681 - DNA, 1847 bp, Homo sapiens
ataatcagtataaaaatattgatgttttgcatctgcatcagccaacaatctttttgtggcaatagtacactaccttgagaaatacagggacataataagatacttttctggcctcaaagatcctccaccctggatgaggagtcaaagttgaagacagttgaaaaaaatagaacagtgattcttaacactggggaacattcaggaaatttcaggggacagtgactggggagtactcctggtgcttggtgggcagaggccagggaggctagatgtcctgggatacatgggacagcctttcaccagggaggtttgctgtgtgtcccacacaacttccaaaaagtcccagcagctattcacataggtgaaaaaacaaaatgcatttataattctctgagcctagaacccaactactttttacgtataagtattaaatatttttacatggttttaatccacaccaaattttctagtaatgcagcaatagtgtatattgtgaagatggcactttgttacatttgaaacctttcaaagaatcattcatcatatcaggaaaaaggaaaatttttctaacataacacccctgtattcattttcatgctactgttacttttgtggtaattctccccataagagaaatcatagcaaacccttagatagcacttactgttctaagagccttatgtatatgcactaatttaatcctcacaacaaccctgtaaggtagaaactattattctcattttccatgtgagtaaactgaagtatgggaaatttaaatagcttccccaaggtcacacagctaatcagttatagtagtttttgactactttttaaaatgtagttgtgtacaagtatttatattttgtagtatttgatagaaattactcatttctcctttatttcactgataagccattatactgattttttttttaaatctatgtagggagtatttagcctatatgtattcagtacagtattatgaaggaagtgtatttaggaatttcatttcaggatgaatacttgttataaaaagtaaaaagtaactgagtcttaagtttgtcaaagaataaaattgatggatggatggatttttttttttttaaaggagggggaaggcagtgagcctgactgcagagtgtaatttgcatttaaatgacaagtggtatgacacttccacctgttcttcagggagcctcaccaagtatgttttgcctcgaggcctttgcttttgccattcctcacttggttttcccttctctaccctacctctcaccccgcaatccacatggcttgtttcctttcttcagatctcctggtatacgtcatctcatcagaggggctttccatgatcaccttatagcaacctctatccgtaatccttatcccttctttctctccattgtgcttatcaccccatgacgtattatgtatttattaacttagttttggaatataagctgcaggtgagaaagctttgtttctctttctcaggcagtgcctgacatagagtagragcttaataaatattgaatgaaggggcagatgtagaatcgttagaatttggaaaaaggctggaatatttggtcctaagatgtactttgaatgatttaaatctgactgagaaaaccagtttgaggttggcagagtagaagaaggagggtattttaggccgagaatttggtaagacagagatgggattgtcagctgtatggtgaaggtggaggaatactagtctttcaggaacagagcaaatgtaatagagcagctgaaaataggcttggcgttggggattaaggtcagatatggcagtctggaatttacagagggatgtgatgaagcaggca

SEQ ID NO: 703682 - DNA, 1847 bp, Homo sapiens
ataatcagtataaaaatattgatgttttgcatctgcatcagccaacaatctttttgtggcaatagtacactaccttgagaaatacagggacataataagatacttttctggcctcaaagatcctccaccctggatgaggagtcaaagttgaagacagttgaaaaaaatagaacagtgattcttaacactggggaacattcaggaaatttcaggggacagtgactggggagtactcctggtgcttggtgggcagaggccagggaggctagatgtcctgggatacatgggacagcctttcaccagggaggtttgctgtgtgtcccacacaacttccaaaaagtcccagcagctattcacataggtgaaaaaacaaaatgcatttataattctctgagcctagaacccaactactttttacgtataagtattaaatatttttacatggttttaatccacaccaaattttctagtaatgcagcaatagtgtatattgtgaagatggcactttgttacatttgaaacctttcaaagaatcattcatcatatcaggaaaaaggaaaatttttctaacataacacccctgtattcattttcatgctactgttacttttgtggtaattctccccataagagaaatcatagcaaacccttagatagcacttactgttctaagagccttatgtatatgcactaatttaatcctcacaacaaccctgtaaggtagaaactattattctcattttccatgtgagtaaactgaagtatgggaaatttaaatagcttccccaaggtcacacagctaatcagttatagtagtttttgactactttttaaaatgtagttgtgtacaagtatttatattttgtagtatttgatagaaattactcatttctcctttatttcactgataagccattatactgattttttttttaaatctatgtagggagtatttagcctatatgtattcagtacagtattatgaaggaagtgtatttaggaatttcatttcaggatgaatacttgttataaaaagtaaaaagtaactgagtcttaagtttgtcaaagaataaaattgatggatggatggatttttttttttttaaaggagggggaaggcagtgagcctgactgcagagtgtaatttgcatttaaatgacaagtggtatgacacttccacctgttcttcagggagcctcaccaagtatgttttgcctcgaggcctttgcttttgccattcctcacttggttttcccttctctaccctacctctcaccccgcaatccacatggcttgtttcctttcttcagatctcctggtatacgtcatctcatcagaggggctttccatgatcaccttatagcaacctctatccgtaatccttatcccttctttctctccattgtgcttatcaccccatgacgtattatgtatttattaacttagttttggaatataagctgcaggtgagaaagctttgtttctctttctcaggcagtgcctgacatagagtaggagcttaataaatattgaatgaaggggcagatgtagaatcgttagaatttggaaaaaggctggaatatttggtcctaagatgtactttgaatgatttaaatctgactgagaaaaccagtttgaggttggcagagtagaagaaggagggtattttaggccgagaatttggtaagacagagatgggattgtcagctgtatggtgaaggtggaggaatactagtctttcaggaacagagcaaatgtaatagagcagctgaaaataggcttggcgytggggattaaggtcagatatggcagtctggaatttacagagggatgtgatgaagcaggca

SEQ ID NO: 703683 - DNA, 599 bp, Homo sapiens
ggcctcttgagttcctatgcatattactattcttatggagggatgactgaccttctaattagtagggctccttccttatgaatggcttttgctgctagcagagagaatgacacccctaataagtctattccagacacttaatgcttcataattacactgtaattaaaattgcttgatctaagaaaaaacaatggatttcgtttaaaactaataataaaagtrtgaaaactttggtttctaaattttacagtcactttctttttgttataaaatgaaacttaaaagaaaaagctttgtagaaagaatgatttgatagcacttttttttcattttttaagagcaaccaatttcatgcatcttaaaaatatatgcattttttctggtatgaaatataagagaaaaagtgaaaaagaaaacttatggtaataatatttattgataaaagccatgctcaccattttttctagcatatatataattaatataggctagtaaatataatagaagttacttgttccaaatttgtagcatcattatacattaatgtttcacgtgtttttgcaatgttatccactactgggaacacaggcagtttatca

SEQ ID NO: 703684 - DNA, 599 bp, Homo sapiens
ggcctcttgagttcctatgcatattactattcttatggagggatgactgaccttctaattagtagggctccttccttatgaatggcttttgctgctagcagagagaatgacacccctaataagtctattccagacacttaatgcttcataattacactgtaattaaaattgcttgatctaagaaaaaacaatggatttcgtttaaaactaataataaaagtatgaaaactttggtttctaaattttacagtcactttctttttgttataaaatgaaacttaaaagaaaaagctttgtagaaagaatgatttgatagcacttttttttcattttttaagagcaaccaatttcatgcatcttaaaaatatatgcattttttctggtatgaaatataagagaaaaagtgaaaaagaaaacttatggtaataatatttattgataaaagccatgctcaccatttttyctagcatatatataattaatataggctagtaaatataatagaagttacttgttccaaatttgtagcatcattatacattaatgtttcacgtgtttttgcaatgttatccactactgggaacacaggcagtttatca

SEQ ID NO: 703685 - DNA, 632 bp, Homo sapiens
ttcttaaaaagtatgaggaccaaggaatcatttttttctgacaaaatactaaataaatgggagaaaatataaaattgagtttaaaaagtaaaaaaaagtgaagccagtaaaaatttgcactggttcttagagatagttggcctgttggttctgagaaggattcttttacctctcttctgaaactgaaatacagccacttgcccagtgctgtcttctgagttttctccatgtttttagttaaacgcttcttacacaaccccaactgctattttaattagtttaccaatttccttaagtyttctgtttcatatttttcaacattgtatacaacagtgttcatcccatcctctacttcacagacaaacaaacaagtaaataataaagttcaacaggaagaaaagttgagcctaaacattcaacaaccatgatcccttttagttttcatggaagaattcactatctcatgtctgaaagtttacatttctgccttaacctcactccatcatataagtagctcacttacactatacctttgttccttcgtcttatctgattctttttctttttcatgtgaagaatgtctagtttcttccttatttaaacttaaaatgacctctcaaccctatgttact

SEQ ID NO: 703686 - DNA, 1418 bp, Homo sapiens
tatgttataaatatcttcctggctctttggcctgctataagaaaatatcgtgggctcggtagcttttaaacaataggaacttacttatcacagttctagaaagtgggaaatccaagttcaagcagattcagtgtctggggagggtcattttgtagttcatagatgggaccttctagctgtgtgctcacatggtaaaagaagctaggcagctctctggggctacttttataaggctctaatcccattcataagggcagagtctccatgatctaatcatatctccaaggccccacctgctaatattatcatttttgtgattagatctcaacatacgaatattaaaggaacccaagcattcagactataataactatactatttcctttcacctgtgggattcatattttcttttcttctcatttcttttttctttctacttggaataatcttgtccaagcaagattttttcatgtctcattctttctatgattcactcctgtttctcaaataggcctgcagcaatgtcacatatacacaaaggctcttgctgactattcttctctaatctctctctctacctcccaaaacatgtatatagatatagatactcatatttagataatagatattaatcctcctgtcaacagtatgaaaactctaggaaccaatacactctagaatctataacaccacacactccctttatctatttatatatgttataaattcacacaatatctgaaattaaatgagttatttgcttgtttgtctgtatatccctttgggttttgtattgttcaccactgatgcctaagataacacccagaaaataactaatattcaataaatatttttaaatagttgattaaattaattttgggaaaagtaagggagataattcctgccacagagacagatctacattgcttctaacttggagagaacataaatggccttgtaactaaaatagatacagaagtctcctagcactgaagaagaatgttttatcaaactagaatgattatattctgtttgaaagtgtgatttgaaagttgttgaacacttttgaataaaacagctatgtgatatagaagaaattaaatgaaagaagcatatttagagagctatgtaagcttataaattttaaaagrtaagtttctatgattgactctatcttaaattcttgtatcacctcatagctttttaaactataatttgtaaatacacgtaagaatcaaaagttaatatatgttattaatgcctatttttgaggtgattatcacttgaggaatgatctactgccaagttggattatgaatacaaaacaatatcattatccccatttctcaaaatgtaacataatgtgtttaagatagaacaatggcctttaagcaaacttgatattctcagttgatctc

SEQ ID NO: 703687 - DNA, 1418 bp, Homo sapiens
tatgttataaatatcttcctggctctttggcctgctataagaaaatatcgtgggctcggtagcttttaaacaataggaacttacttatcacagttctagaaagtgggaaatccaagttcaagcagattcagtgtctggggagggtcattttgtagttcatagatgggaccttctagctgtgtgctcacatggtaaaagaagctaggcagctctctggggctacttttataaggctctaatcccattcataagggcagagtctccatgatctaatcatatctccaaggccccacctgctaatattatcatttttgtgattagatctcaacatacgaatattaaaggaacccaagcattcagactataataactatactatttcctttcacctgtgggattcatattttcttttcttctcatttcttttttctttctacttggaataatcttgtccaagcaagattttttcatgtctcattctttctatgattcactcctgtttctcaaataggcctgcagcaatgtcacatatacacaaaggctcttgctgactattcttctctaatctctctctctacctcccaaaacatgtatatagatatagatactcatatttagataatagatattaatcctcctgtcaacagtatgaaaactctaggaaccaatacactctagaatctataacaccacacactccctttatctatttatatatgttataaattcacacaatatctgaaattaaatgagttatttgcttgtttgtctgtatatccctttgggttttgtattgttcaccactgatgcctaagataacacccagaaaataactaatattcaataaatatttttaaatagttgattaaattaattttgggaaaagtaagggagataattcctgccacagagacagatctacattgcttctaacttggagagaacataaatggccttgtaactaaaatagatacagaagtctcctagcactgaagaagaatgttttatcaaactagaatgattatattctgtttgaaagtgtgatttgaaagttgttgaacacttttgaataaaacagctatgtgatatagaagaaattaaatgaaagaagcatatttagagagctatgtaagcttataaattttaaaagataagtttctatgattgactctatcttaaattcttgtatcacctcatagctttttaaactataatttgtaaatacacgtaagaatcaaaagttaatatatrttattaatgcctatttttgaggtgattatcacttgaggaatgatctactgccaagttggattatgaatacaaaacaatatcattatccccatttctcaaaatgtaacataatgtgtttaagatagaacaatggcctttaagcaaacttgatattctcagttgatctc

SEQ ID NO: 703688 - DNA, 293 bp, Homo sapiens
ttatataatatgcttagctcattaaattttagcttttgtcttttctaaatatatgtttttgaggatacatgtttccctttaagaacttcattagttacagccaacacatattttttccattgtattaaggataaaaacacgtggtaaagtgaataaaatgcactgatcttatgcaaacagttcaaacaatatatatatatttatatatatacacacacatacacactatatatatacacacacacaaaaagaatatatgtatacgcrcacacacacacacacacacacacaca

SEQ ID NO: 703689 - DNA, 669 bp, Homo sapiens
tagaagtctcaacttcttgcctcaataggatggtccagtcccaaatgggagcactggataaacaatgcatgaagagcacatagaaaatagcagaactttgagtttcctgaagcwactgtaactacagtctcataaagaagaatgattatggaaaatgttcagtcagataaagctggaagctcaaggatgacaattctctttcatacaacattgtacataagtctataatgttctctttttaagtggtatttaaaaatggagtaaaagccatatgaacatttcatgtttttaaaggtttacctcaatcagaattttggaatgcatgatgaaatattaatttaaaaccatgataagtttggttaattttaattaatttaaaaccattatgatttgtagctagatgttttatatggtctccacctacattttggagctaaaaagctaagaaattaagaaatatcaaatatcaatcaaatatcagtcatcaaatgtgcatgtaatagtgcaaaataagaaagaaatagatgacaaggttcttatttcaaagctattataatccaggtaggagaatgaaatgaacacacatagtcaacatctaagtgataatgagataggcatacagtttaatgctaggggggcataaaagctaagaagtgatgtgtctgcatg

SEQ ID NO: 703690 - DNA, 2576 bp, Homo sapiens
gtttctttttacttttcttttcttttttttttttttttttaagacagagtctcactccgtcacccaggctggatggagtgcagtggcatgatctcagctcactgcaacctctgcctcatgggtcccagcaatgctcatgcctcagcctcctgagtagctgggattacaggcatgagccaccgtgcccagctaatttttgtatttttagtagagacggggtttcaccatgttggtcaggctggtcttgaactcctgacctcaagtgatccgcccgcctcggcctcccaaagtgctgggattacaggcgtgagccactgcaccmggccagtttctttatctttaatatgggaatactaatactttgttcaagggtattctgtgaagatgtaatagatatggcaaacccccatgcatagtccatagtggattatcataagtgtaaagctataatatgattgttatgtttgcatgcagtgtttatttttttcctgtagacactgggaagtcattgccgggttttaatcctatgagtatgttcttactttaagaaaaaacaatgtggtgacaataggtagaatgacttgaagagacagtgagacttgttaggaaggtgttacatttattgggtgtgtagagggcaatgtaatacaatcttgttttatattgtttctattagtttcccagggctattgtaacaaagtaccacaaactgggtggcttagaacaacagaaaattttgtcccttcaggccagaagtctgaagttaaggtgtttgcagggccatgctccctttgaatgcactaagaaaagatctgttcccgtctctccgctaccttctggtagatccttagtttgtggcagcaaaactctaatcctcacataacactctccctgtgtgcatgactgtctctccacttggctttctttttatatggatgtcagtcatattggattagggaccaccctatttcactaagtcctcatcttaattcaactagttacacccacagcaaccttatttccaaataggttgcattctgaagtactggggatcaagacttcaataggtgaatttgtggggacacaatttaccttacaatattgttttttctaacttcagcattaaatggtcctttttgggtgcttcctagtatttttgttataatacaagttttttaacagaactagctaccactgaccattggtgccaatcaaaaaccaaccccaccattcaaatactgggcaaatgtgggatggtgtatagaacttctgtttacctatgcatacattgttagataaagcagtttaaaactattatgtgatgtaaggttttaaaaaataaaaacacaaaatcttgtttacagcataattaaaactttgtaaggaatatgcatgtctgaaatttaatatactaaaaaaagtgttagttttactgtagtggtaatatttttatttcaaaattatctttaagctgattttttcctataaatagggagaaagcagataaactgaaagtgttgaattctagatcttaattttcatggaatttgaaaattgtcatcattatcctgagaacataggtgcctggtgccttgttgtgattattaatatcacatctcaaatgtggcatgaagaaaggatagagcattggactatgttactgcattctttccatttttattttaactattggcccattgcttgatgccaagagagttaactttaacctcacttagtcaccttttaacttatagtaaggacaaaaacagtgatgtgtcattcatttgtttacaggaggattatgaagtatcatgtcaggttttgttctagaaaaacatttttggactcaaaaatgctatgcttttgagtgtgatgagatgagaaatagaagtgtgccatttgctaattataagttattggtggttttttttcagaagttctataagtagctctgtttaaaaatttcaaaatggacaaagggcatgaagctattttgggaacaaaatgtcagtactgaaggtatactttttcatatattgaactaatgcgtggttcagaaagttctttgctaatttatcaaaatgtcatcttcaggtactgggttggaaaattagtaactgctagagtgtgtgaccattgaaaggtgcaggagcctatcaatttttagcttctagcataaaacgatgtttatcattagtgttgagatttaaaatgtcagaagttcttaaagttcttagcataaaaaataaaggctaaaagttaagcatctattatactataaatccagatatacaaaaggaaaacacagtactcaaaaagcattaaatgtactcaaataaattacctaaaaagtgcataggtaacaacttttaaccgtgtaatggcaaatgtcttaattttatccttataaaaatgattcctgttggcttttaattactctaaattgaggaatggtgtattattagtacactcttcacatatatactattcactcttaaatacttatgtggccaatcatatgttgggcaaataatactttttgcttccctggcaaaactctgagcaattagaagaag

SEQ ID NO: 703691 - DNA, 588 bp, Homo sapiens
  misc_feature 419: n = A,T,C or G
ctttttagtatactttaagaagttaactatattttgttgtattatagtaaaggtaatggaataatgtagattttatcattttgcaattagtctttcttttcagtgacagcccatttttagggtgaaacttactggtatcaattctctctattaaggacctcaagcaatgatagaaggcccttcattgcactctgtctttccaatgttgcttttatgcttccctggcaatttgctcagtttatactttttacacaggtaagatgattttttaaattaatttttatttttattttaagttctgggagacaaaaagcgggatgtacaggtttgttatgtaggtaaatgtatgccatggtggtttttgcatctatcaacccatcacctaggtattaagcccagcrtgcattagctgtttttcnctaatgttttccccaccccatcccttgacaggccccagtgtgtgttgttcctctccctgtgtccatgtattctcattgttcagctcccacttataagtgagaacatgtggtgtttggttttctgttcctgttgctgaggataatggcctccagctccattcatgtccct

SEQ ID NO: 703692 - DNA, 663 bp, Homo sapiens
aagtaaatataaatatgtggagtatctgtatggccctttagagtggaagagtattatcacatatttcagtggcccatttaattttattctaagaactccacagtgccaaataattgcctacaataacagcatttaacatactgtggtgtttttattcagacataatatacttagaggaaatacaacattcataggtgcatagttcaataaattttcacaaactgaacatctccatagaagcagcacagtttaggaactcaacatcaccaagactccaggaacccctctcctgtcctctccaagtcactactcccacaccctagtttagtttagctggttgttgaaatttatcagtacctgagaagagggggaaatcaggagaaagcagattgctaaaawtcccaccctgggatgtggttagtatgggattcccaccaggaacaggcccacaatttctgttcctgcttattgcacctggtaatgaagaactgatctcagaggcttgcaaccaggttatccccaaagcataagacagtctgcttagcatatcacagtgatataattgtttgcctgatccccatcaatggacacggcccagcacagccacctcggtagtactgggtttgcataatgtttgttgattaaggctgtgactcttctgta

SEQ ID NO: 703693 - DNA, 663 bp, Homo sapiens
aagtaaatataaatatgtggagtatctgtatggccctttagagtggaagagtattatcacatatttcagtggcccatttaattttattctaagaactccacagtgccaaataattgcctacaataacagcatttaacatactgtggtgtttttattcagacataatatacttagaggaaatacaacattcataggtgcatagttcaataaattttcacaaactgaacatctccatagaagcagcacagtttaggaactcaacatcaccaagactccaggaacccctctcctgtcctctccaagtcactactcccacaccctagtttagtttagctggttgttgaaatttatcagtacctgagaagagggggaaatcaggagaaagcagattgctaaaaatcccaccctgggatgtggttagtatgggattcccaccaggaacaggcccacaatttctgttcctgcttattrcacctggtaatgaagaactgatctcagaggcttgcaaccaggttatccccaaagcataagacagtctgcttagcatatcacagtgatataattgtttgcctgatccccatcaatggacacggcccagcacagccacctcggtagtactgggtttgcataatgtttgttgattaaggctgtgactcttctgta

SEQ ID NO: 703694 - DNA, 1360 bp, Homo sapiens
caggcgcccgccaccacgcccagctaatttttgtatttttagtagagatggggtttcaccatgttggccaggctgatctcaaactcctgacctcgtgatctgcctgcttcggcctcccagtgtgctgggattacaggcgtgagccaccgcgtccggccttcaatagcttttaattaaatatgtgaagttttggcaaggcacagtggctcacacttgtaatatcaattctttgggaggcagaggcagaaaggtcatttgaggccaggagtttgataccagcctgggcaatgtagcaagaccccgtctctccaaaaaattaaagaaaaaaaaattagctgggtgcagtggcgtgcctgttagtcccagttacttgggaggctgagttgggaggagtgcttgagcctgggaggttgagctgttattccaacactgcactccagcctggatgacagagtgagagctgggatgacagggagagactctatctgaaaaaaaaaaaaaaaaaaaaaaaaaaaaaatatatatatatatatatatatatatatatatatatgaagtttcttgcccctgggatttcttctaatggtatgttagagttcccccaacagctacaaccagattccaatttttttttttttttttttgggacagagtctcactctgttgcccaggctggagtgcagtggtatgatctcagctcatttttgaaacctttgcctcccaggttcaagcattttttatacatcagcctcccaagtagctgggattacaggcatgaaccaccatgctcagctaatatttttgtatttttaatacagacagggtttcgccatgttggccaatctggtctcgaactcctgacctcaaggtgatccgcctgccttggcctcccaaagtgctgggattacaggcatgagccactacgcctggctcagattccaatttgagccctatgtgaaaataccaactcctttgcagctccttccccaaatcccttacactcaccatccatggaatcccctggcatttgtgagggatacttaattttcctccatggcttttctcttctggaggattatatgctcatcctgtgcatggggctgcagggacttagatgctccatttcatctctatttttacaacatccttacccaccctggtgccaagcataggtccttgcttaccttgtgacatgagcaaaggtttagtgaatgaataaatgaacaaaaagccatatttcccaatgatagcttggtccctggtacccagaawaggcctacatgatgccttattgatcacagctgactttgactttctcctgagaggtgtgggagttacaaaaatgtttatttgtctcaca

SEQ ID NO: 703695 - DNA, 610 bp, Homo sapiens
cagccaggcgtggtggcacacaactgtggtaccatctactctggagactgaggcaggagaatcacttgaacccaggaggtagaggttgcagtcagcagagatggggctattgcattccagcctgggtacagagtgagtgagacttccatctccaaaaaaaagagagaatttctaggagagtagatcttaaatattcttactacaaaaaaaaatacatgaggtgatagatatgttcattagcttgatttaatcattcacaatatgtgcgtagatatgtatatcaaaatattacattgtacacaataaatatatacaattttaatttgtcaattataccttaataaagctgaaataaaaaagaacttatgttgccttgtctcacctagcaaagctcaactggargaaacttccttttcccttctccagcaactgaaaaaccacatcactgtctcatgtagctcattttattactgtacagaagaccaattgtgaaaatattataatgtaaaaaatgtaatttccagggacatttcatgaaattttcttaatgtttccttcttattcattagtaattcacttacattgttctaaattctcttacttctgaagt

SEQ ID NO: 703696 - DNA, 3781 bp, Homo sapiens
gtaaagggagaagataagtattagatttaccatggctttgtcattgaaaacctaccaaatgcaagctcttggtggtcaccagtgccaccagccctgacagcttgaataaaatgtattgtgtaatgtaggaagaagtatgggctttggagccaggctttccagattcaaatccttacaccacaatttgcttgatgcataatgctggacaagttacttagttcctctgtccttggtttcctcattgagggtaattatagctactactttttgctttggyaacactatctaagcatcaatggaaaggaaggaagaaaggaagagcaggggcaaaaaagaggagggaggggaattatagaaagtcatggtgaacgtctagtcttattcttgtttttttatattgtttactccaacccacaatacaaacaagttttctatccctgtgcattgtgacgttaagtcagggccagacgagaattctttcttggtagtcaaaacatagtgtcctcagggtcatttcctttgctatagtggagaacaaatgctaatggagacgacacaatatttaaaacagtcaaatatccgacttataggcagtagaaaagaatgtgaagactttctaaagtatataaccttggcttaaataagtgaggattctttcatgttctgatttcactgcactcttccacatcagacatgaacatacatgacttttcattgattagtttcattaatgaactattataaatactttacgaaattttttaacacaacttttaagtctctgtgggtcatactttccatactagtccatgtgtgctacatgtgagcagctgaactctagaggcaccaaaactcaaacctccatagctggtgctataaaccttgcctaggcaaggcttcctctgcctttagcctgattcttgcgcttagcttgcttgggctctggctccaggctacgtctgattttctgggctctggtactcaccctggcccaaccttatgcccccattttcacccataaaacatggtgttttaatgttacattaaaacatataacaaagaaaggagataatgaggagaaaaaggaggagaaaaaaaacaatgaaatcagtaaaaagctggggtggaggaataacctacaattttttacattgtttcattttatacactatcaatcctgggaagctgtctgtgacaacagaatagacatgcatccctagaatgcatatttaagaataagtatatgtatctagaaatataatccatattgctaaaaatcaatgaaaacttcatactgaccttagggggtttaaacggatagtctggtgaaaaggtaatgtcaagaaagaacacccctccttcatagacagatcctgggggtcccaatatagttgacctccattcataaatgttgtctcctttgggtccagcactgaaataagacatacaaatgaaatgtgcttagaaattacataaaggctggaatttaacaaaatctatttatgataaccaattgagcaattccataaaaacacaaaaagttaatcagttaactctcatgttaagattcatattgccaatattgtcattatcctagaagtgaaatatgttggtatcacttcataaaagaacaccaagatcctcttttgccattcacaaccctacgcctatggaacaagagtccaagggactacaggccagaggtagaaacacaaatgtttaatgaaagcatgaaattatttgtgatgtcagagacaaaatttcaaagttagaaggacctctggggaatgactagtctgatccctttgctaacaactgagaacacaaaggaggttcaatgttcatcatccaaagtctctgctcaaatatcatatcccatctgaatcttcctttctttctccccacccaaaggacttcctgacccatacatcatgaccaatgaggtctgtagaggataagatgtatcattttgttttataactgtgttttgcaactaatgcttctttctaccctccctaaaagtgcttgaggacaggttgtaccttgtccttagtgcctcttaagtcagtatgttggatgatgatgaattaataacaaagcaagtgaagaagccacatggctactagcagtacacatgtctctgagtttcagagaattttgctgaaaacaatatggcccacatgagtcgagtgaattgtattagttctctcaggtgaaaagaagggcaaaatgagattaggatttagctaatcctaagaatgggctcaagccattcttgggtctcagcctctcaagtagctgggtttacaggcatgcatcactggaccacacctggcccctagaaaatgtatttttaaatgagttgcaataggtcttgtagggaagctatgaataaagtcataaaagatgtgtaagatctttatggagaaaattatataaaacttattgaaaagtactcataagagttaaataaatggagggagataccaagtttatgggtagggagacctgatatcaaatgtcagtttctccaaattgattcatcataattccaattaaaaagtccaactgctttttaaaaccaaaactcgacaagttgattttaaaattttttcggaagctcaaagaaattcctcaaacttttccacacatatatgaaaacctgatttatgtcaactgatgggactaggaaaagtttttatatttgaaaaacagagaaactggatttttaccctcagtaaataaacaaatgctgttgcagatggattaaatatttaaatgcaaaagtcaaaatattagagtttgactgaagagagtgacaaggcaagctgcaaacagaaaagatatttggatcatataaaagtgaccaaatactagtgttgagaatacacaagttcctaagaatcaactaaaaaaagactctattaaaaaagacatagacatttccaaaaaaagggaaacataaatggccaataatcatatgaaaaatgctcaatatcatcaaaatcggggaaatgaaactgaaaatcaaaattcagtaatattattttacaaaatgcaaatgcaaaaatcaatgcctgacaaaaccacatgttgatgaggatgtggaaaaactagaactcctatgtactgctgatgagtatgagtaattccttcggatgagaatataggctcatctagttaagttgaatatacagttgacccctgaacaacagggtctgcattgcgtgggtcaacttagatgaactaaatttcaagaaaatacattagaaaaatttgagatttgtgacaatttgaaaaaactcgctgacaacgcactagcctagaaatattgaaaaattaagaaaaaggaacgtcatgagtgcacaaaatatacacagatattagtttttcttatttactaccagaaaatatataccgatctcttacaaagttaaaattatacccacaaaccatacatgatgccatgagcattttaaaagaaatgtaagcaaacacaaacatagagtattaaatcataactgcataaaagtaactataatacatactgtactactgtaataattttgtagccacctcctgttgctattgcaatgaactcagctattgccaatagctgcttaaaatgcctaaaatgccacgtgacaaaaatcatctctgcatgagcagttcatctctccagcaaatggcgtattgccataaaaagtgctctctctcagttctcgcatatttttcattgtgtttgtgcaataccgtaaaccttaaataacaccatgggatc

SEQ ID NO: 703697 - DNA, 676 bp, Homo sapiens
gggttgtggtgagctgagatcgcaccattgcactccagcctgggcaacaagagtaaaactccgaatccaaaaaaaaaaaaaaaaaaaaaaaaaaaaatctaaatgttcttgacttcaraaattcctcaagtaagggaaacaaagaaactctgaatcatttcttgggcaaatagttctgagtaaaagacatgtgagtaaagaatgatgtttgtttaagtgaaatatttgtttctctaaacaacaagaacaatgacaacaaaaataggtcactggtaatttttaagggtaactccaaaatgaagtcttctaaacataaactgaagagaattttcataagatacagtgacttttcaatcagatcaagttctttgaaaaatttttaaaaatgtttaattaattttatttcaatagtgttagggatacaagtggtttctggttacatggataaactgtatagtggtaaagtctgagattttagtatacctacacgtgagtagtgcacactttacccaatatatagttttttatccctcaccaactgccccacctcctctcttctgagtctccaattatccatatcactttgtatgcctttgtgtgcccatagcttagctttataagtgagaacttaaggtatttggttttcaattcctgagttacttcacttagaataaag

SEQ ID NO: 703698 - DNA, 676 bp, Homo sapiens
gggttgtggtgagctgagatcgcaccattgcactccagcctgggcaacaagagtaaaactccgaatccaaaaaaaaaaaaaaaaaaaaaaaaaaaaatctaaatgttcttgacttcagaaattcctcaagtaagggaaacaaaraaactctgaatcatttcttgggcaaatagttctgagtaaaagacatgtgagtaaagaatgatgtttgtttaagtgaaatatttgtttctctaaacaacaagaacaatgacaacaaaaataggtcactggtaatttttaagggtaactccaaaatgaagtcttctaaacataaactgaagagaattttcataagatacagtgacttttcaatcagatcaagttctttgaaaaatttttaaaaatgtttaattaattttatttcaatagtgttagggatacaagtggtttctggttacatggataaactgtatagtggtaaagtctgagattttagtatacctacacgtgagtagtgcacactttacccaatatatagttttttatccctcaccaactgccccacctcctctcttctgagtctccaattatccatatcactttgtatgcctttgtgtgcccatagcttagctttataagtgagaacttaaggtatttggttttcaattcctgagttacttcacttagaataaag

SEQ ID NO: 703699 - DNA, 624 bp, Homo sapiens
agaagtgagcaatggcatgccccatcttgcatagaatttacattcaaggtatgrtagaataggattttttcaactttgacccagctgacattttgagcaagataatactttgtagtaaagggctaccctttgtattgtagaatacatagcggcatgcctgatctctacccactaaatgccaatagcaatctcccctgtccctcattgtgacaacaaaaatttctccagatgttgccaagtataccctgaaggaggggatcaccctgttgagaaccactgtgttagcactgacatccatatctactggtgactagtttgaaacatcaggaaggactctctggtttctgatctgaatgaccaggtagggatatgttgcctgtgaggaacttatgggacacctgagtgggaagtgcagaaatgttcagccaacagcttaatagatctggagttcaggtgagtcatatgagctagaggtactgatttgggagttagcagacacagatttgggtgttaaaaccctagatagaataaatgatctcacctagagaaatgggcaattttcaacccaaactgaatttttgaacctatgaatttccagaatgggttttccaaaagaaaagaatg

SEQ ID NO: 703700 - DNA, 962 bp, Homo sapiens
ttttycccgagatggagtttcactcttatcacaaaggctggcgtacagtggcgtgatgttggttcactgcaacctctgtctcccgggttcaagtgattctcctgtctcagcttcccaagtagcagggattacaggcatctgccaccacgcccggctaaattttgtatttttagtagagatggggtttcatgatgttggccagactggtcttgaactcctgactgcagatgatccacctgtctcagcctcccagaatgctgggattacaggtgtgagccaccgcagtggccaagttgaatttcttgtatagatgtcttatgtctcagtttaaaaatgaggcatgtcttactcttgcctatatatttccagtggggcatgtcttatccttttttatatatctccagttctcaaaaccttgtcttacacagcaaacattaatcagaggttaatcacttatggatttagtttcactctactgccatctctccaaaatgcttacagtaaagaggctacacttactaaattcaaacttagaactttgtaacttaggacctgtctgttggaggaggtaagttgcttaagcttctccctctattgggcattatatgtagagtgctctaggttctgcctgctagctccttgatgacatttgcctgctttagcaggacactgactcttcagctcaagcagctgttaccatgctggctatttccttttgcattcataggttttagatatggaagaaagttatacccagagagaatggggggataaatgataatcttctaccatttttgaccttagtctggtccagcattatagtgtgattttgagaggagagattgtgatttccctggctagtattatctagtattgcctgacaatgcaaaatggacccctaggctgtcttatgtaagttggaagggggcggattgggggtggggtgtgtgtgtgtgtatcta

SEQ ID NO: 703701 - DNA, 691 bp, Homo sapiens
taagtgaccatgaaagcaaaaacgttttcatcatggtctaataataacactcccttggtttctctagtactgtcaaaaaaggacaaaacttttaaacttttcatatacctagttacagtttttaaaaggcagtttggaccatgtacttttaatgtaaactttaaattctttaataacattttatctatatgaaatatattgtctcctgaaagaaacaagaatctttcaagattttatattcaaacaattttaagtccaaacaactaagttttctccagtttgaagtgaagaaaatagcatcaacsgtgctttctgctccttctcaatgtcaaaggctcattcagcatattcaacaaaatacagagcagtgtctactagcaaccctagtagataatactattaagagcgaaaagcaaaaaatcttcttgttttcatatccttttgctcctttccttactgaatcacagtcacagtatgtcaatctcaatttgacagataacaagtcctactcctacctgctcattctggagtatgaatgccaccaaacctagctagtttcagaattatcactgtttctaaagtagtttctggatcacaattcattaaatgagtctagaatccagacctgtcagtcaaaatctacaacaaataccctttaaagtatgtatactcctcatccctatcttccttg

SEQ ID NO: 703702 - DNA, 691 bp, Homo sapiens
taagtgaccatgaaagcaaaaacgttttcatcatggtctaataataacactcccttggtttctctagtactgtcaaaaaaggacaaaacttttaaacttttcatatacctagttacagtttttaaaaggcagtttggaccatgtacttttaatgtaaactttaaattctttaataacattttatctatatgaaatatattgtctcctgaaagaaacaagaatctttcaagattttatattcaaacaattttaagtccaaacaactaagttttctccagtttgaagtgaagaaaatagcatcaaccgtgctttctgctccttctcaatgtcaaaggctcattcagcatattcaacaaaatacagagcagtgtctactagcaacccyagtagataatactattaagagcgaaaagcaaaaaatcttcttgttttcatatccttttgctcctttccttactgaatcacagtcacagtatgtcaatctcaatttgacagataacaagtcctactcctacctgctcattctggagtatgaatgccaccaaacctagctagtttcagaattatcactgtttctaaagtagtttctggatcacaattcattaaatgagtctagaatccagacctgtcagtcaaaatctacaacaaataccctttaaagtatgtatactcctcatccctatcttccttg

SEQ ID NO: 703703 - DNA, 615 bp, Homo sapiens
tgagagtcattctgggttcaggaagtaaagcaacctggggaggagtaaaaagagctgactgatggtgctggcctagctaagcaactcttccctcttctaccgctttcctsaagctgcgtgcctggtgaaagcagctagttcttccacagttagttcatctttacccaaagaaacaggcaaaactaacctaggctacaaccttctcataagctgtaggagaagtcaagcttggcttccaaccaccagctgtgctcaaatggaggggatcaaggactacatagatgtataaaaagctaagaaataatcatagcagccgggtgcagtggctcatgtctgtaatcccagcactttgggaagacgaggcaggcggatcagaaggtcaggagtttgagaccagccttgccaacatggtaaaccctgtctctactaaaaatacaaacaaattagccaggcgtggtggcgggtgcctgcaatcccagctacttgggaggctgaggcaaggagaatcgcttgaacctgggaggtagaggttgcagtgagccgagattgggccactgcactccagcctgggtgacagtgagagcctccatctaaaaaaaatacatataataataa

SEQ ID NO: 703704 - DNA, 617 bp, Homo sapiens
acactaacactcaaatcattttagtcagagctgaaatggcctagaattaaagaccacagaatccaaaccttgttttcaaccaaaagtttctaactgaatatccactatatgctaaatcacatcacatgcccaaatcaagagggaggttagatacttagtattcttagatgacagctaagaaaaccaaagaggtttagagacaacttaagatcacaacatggagttattctcatacagtctttgtacattctttttgggaaagaatacggtaatatctattaaaagtttgaaatgttcttaaagaatgacctagtattctactccagaaatttgtcctacagaagcctaagacaagtgtataaaaacatgtgtaagcatattccttgcagcactattcatacccttgaaaaactgtggtaaagaccaaatacctaacaatagggaattaaataaaycatgttaatatccacgtgataaataaagtagatccatatatacagaggtgggaaaagatatccaagacaacaaaaaatgaacaagtctgaaccctttaatattaatctacaaagagggaaatctagaaataaataaatggatggggaactctagaattaaag

SEQ ID NO: 703705 - DNA, 627 bp, Homo sapiens
tggtggcattgtagctatgactcattgtcagcaactattagaaggaaaagtgcctggaaaaataggatagaaattttattaataacataatgctgatataagctgggagggaagtatcttgttttctgttatgagttaagaaattaactacttaaagttgtaatgaaattgatgtaaaatgtttaatatgaaatggttgcctaamatgtcagctgattacttaaaaaaaaaaaactattccgtttaaacaccagtaagctattgagcacctataatgagccagacattgtgggaaatacaaagaaaaaaagaaagaatgaaggtgaagagaaagggaagaagtgagaaaggagggaaaaagtccatatttctttaattcatagagatcagaaattagctgtagcatgcacaggtaaacacctaatatatcctgtcttactatgattagagagaactgcattaacagaaatataaacaaagcatcataggcagatatatgaaaaataaattcattattgagagaagggaggattgggtaactgtcaaaaagtaattaatgccagaatatatccttgaaggaaagcaagatttaaacagaaaaaaaaaaatgtttcagttgctgagtaa

SEQ ID NO: 703706 - DNA, 1554 bp, Homo sapiens
gctgcagagagctatgattatgctactgtactccagccggggagacagagtaagacactgtctctaaaaaaaaaaaaaattcagaaattaaaaatgaataaaaatgcatcacgtttgtaatcttaattccactttatatattgtgattttaatttaagtcaattttcaatactatctattaatttcaacatttttaaatgtgtagagcccaactgttggtaactaattatctgaatatagtaacagcattccatgtattgtggtaatatgcattatcaagctaaaatcttgccaatttctaatattcaataagatgtctctttcttataattaaatgtttaatgtagcaaatcaaatggaaagatgcagcctaatgattaatgagaaattgataatcacatctcaatttaacacctccttataacatttaatatttttgtcattgatgtaaataatggaaaattcattgtagattggtttcagcattaaagaggatttattagcttatgtaattaaaaagttcaaagtggtcaggcttaaggtatagggtgatcaggattctggctccatttctttgtaattctccatgtttcaacttcattcttgggctaatttctcttgtagaagaatcactgtagcaatcaccagccttacaacctcatatgctattgtccagtgagagaaagagaatatctgtgtcccacaattcccaggaaatgttctgagtaggctaagagaaatctaagtgctaaacagcttgactaaggttacctaaactaataactaaagcaaagagaagaattactctggttgacagagacaagtctggaccctctagagttaaaatatgaatttactacaggagaggacaggagtgaatattggaagaaaaacattacccattatattaaaagtcagggcttctagataatgctgtaaatgtacaactgaataaaagttattacatgttgtatatatatcttctagtcacataaatgaatatagtaaaattaactttactggacattaacataaatacaaatatgaaattataggtggcccatcaaagaagtgtagagttcttaattaatttaccatacaacctttcatcctattactctaaccatacttccacagttttcaagtactttttcaagcacttaggtaatcagaagagattatatttttatttctcatataattagctgttctacaaattcagatgaattaccgagttatttcaacaaaatgactttttcttgtccccatttgagcacaagcattaaatgcaatgccttgcacgcagtaagtgctacataaaaatgtgttaattaaatgaattaacttcaagttttgaagatgcattaacttatcaasactataattttcactttaaaagtattttcattatatagcatctagaaaacaatggagtatttgaattgagggattcatggtgtctcatacacttattcattccaaaatttatcaacacaattgaaaatctctctgaaatatattgtgctaggcagtaagtaattattcttcatttta

SEQ ID NO: 703707 - DNA, 629 bp, Homo sapiens
gcccagctaatttataaaatttttttgtagacacagggtctcccatgttgcccaggctggtcttgaactactgggctcaagtgatcatccagcccttggcctcccaaagtgttggaattacaggcacgagccagcaaactcttcttaaagggctagatagtaaatattttcagctttgaggaccatatggtctttgtggcagccactcagttcttccgtgatagcacagagtggccgtaggcaatctataaatcagcatggctatgttgcaataaatcttgatttacaaaaaaagcgggcaatgagctagattttcccagagggccaatattgacacatggcttaatggattcaaaatatttatgaatgtgtttttcttttttttaagaaaagcaaccaatttgggaaaataatcatgtttaatcaaatraaaatattctatcctgggggatcaatggtaaaaaaaattgtgtttgactgaacttaacctcattataagtaggttttgcaagaaacacaggtccagcattgtgttcatacctttatctgtcacactattcacaccatccttcaataagtgtatttctgtctccttcagtgaaccatgagggaagccttaaccctattta

SEQ ID NO: 703708 - DNA, 665 bp, Homo sapiens
atatttagacccctactgagtaccttgtgctgcctataggacaactgattttgttcaaaagcacctctttttaaatatgacaatgagacatgaaaaagctgtctatttatttatggccaaaaactaataatcaaaaattttttgaatgattaaatttgaaaaacaattctatttttagcagctataaaatcagaatacatgacaaattctaggggagagtgcttgctcatataaaataktcaattatctctccactgagatattcaacagttttatcatttacttcaacaatttaattgcaaaggataaatacatgtttattgcttttacaagtacatttataacatagttttactttgccagtcagtgaaagtcacaaagaaatattaattttgcagttttttctgacctagaattcctattattgaaaattagtgcaaaatcagagcatatttaatattgtttcaggaaatgctgacattttaagaaatcaccttcataacttaaagaggaagctatctttgttgctgttcttaaggaatttttatctttgcttctcaggcttagtagattactagtgttttcccttaattcattaaaattctcacttgttgaaaattttaaaaaaattatagagtacctgcttttgttgtcatcgtcatcgt

SEQ ID NO: 703709 - DNA, 640 bp, Homo sapiens
tactaacattttgatagaggatggataagctgcacatacgcatttataccaagacattttgagagagaagcagggatattggggagggggtatttgtgagaaactaaggatttacattcagtagaggctaatattttctaaatgtgctcagttatgtattgatttaaacatttcttactaatcrttaggtgcctttctaggattttagcacatggaagaaatgtccctacccatgcatacagaaacgcataagaacaggaagtgacgtattgtttatcaggaaaaacagtattcatgtattatttacaaaaattgaggctgatctccaagctctactgtggaaagagttcatcaagttcctagactgaagaaagctaattgtaagaaatacatatgtagtatgcacaagtttcattataaataagagtaaaaacgtgcattgtatatgtacatccttgtgagtgtctgtgtgtatgtgtgtgtaaatgtgcttttgtgtgtataaaatctagaacaatcttcaccagtcttgtaaagtatttatgtttgggaaatgaaaatggagaggagaaatttctgctctaaccctgactttgtttctttcattgtttttgttctttgaaaagtaatttacaatgtg

SEQ ID NO: 703710 - DNA, 624 bp, Homo sapiens
cagcaccttgatcttagacttctcagccttcagatctaggaaaaagaaatttctgttgttcaagmaatttctattgtatttagtctatggtattttattacagcaggcggagctaacagagacattcacgtttcttttcctttttctccaacttaccgcattcttatattctcccatgactccatgataaggtactatcatcatttgtctcacattgtgcctttcaacaaaaagatcagaaaaggagaaggggcaattgatatacagaaaaatttttttccttagtgaaattgcctatttcctctcccctatgtccctaattaatccttgaaaccaggcttcctggttgcttgtaacaaacggaacctacaagaatgtggaagtaagttttgctggcaatgtgcactctgttttgctaggccggactttaatgcagactggtaagcaggcatctccgagctggtagaagtgtacactcctgctgtattccatcatgtggatcaaaggccagggctaatagcacttaaataataaatgtgctgttttaaggtatgcatcatttaaatttgagggaaacgagcaaatctgggaagactacaagggatgtactttcctgacaatgat

SEQ ID NO: 703711 - DNA, 624 bp, Homo sapiens
cagcaccttgatcttagacttctcagccttcagatctaggaaaaagaaatttctgttgttcaagcaatttctattgtatttagtctatggtattttattacagcaggcggarctaacagagacattcacgtttcttttcctttttctccaacttaccgcattcttatattctcccatgactccatgataaggtactatcatcatttgtctcacattgtgcctttcaacaaaaagatcagaaaaggagaaggggcaattgatatacagaaaaatttttttccttagtgaaattgcctatttcctctcccctatgtccctaattaatccttgaaaccaggcttcctggttgcttgtaacaaacggaacctacaagaatgtggaagtaagttttgctggcaatgtgcactctgttttgctaggccggactttaatgcagactggtaagcaggcatctccgagctggtagaagtgtacactcctgctgtattccatcatgtggatcaaaggccagggctaatagcacttaaataataaatgtgctgttttaaggtatgcatcatttaaatttgagggaaacgagcaaatctgggaagactacaagggatgtactttcctgacaatgat

SEQ ID NO: 703712 - DNA, 624 bp, Homo sapiens
cagcaccttgatcttagacttctcagccttcagatctaggaaaaagaaatttctgttgttcaagcaatttctattgtatttagtctatggtattttattacagcaggcggagctaacagagacattcacgtttcttttcctttttctccaacttaccgcattcttatattctcccatgactccatgataaggtactatcatcatttgtctcacattgtgcctttcaacaaaaagatcagaaaaggagaaggggcaattgatatacagaaaaatttttttccttagtgaaattgcctatttcctctcccctatgtccctaattaatccttgaaaccaggcttcctggttgcttgtaacaaacggaacctacaagaatgtggaagtaagttttgctggcaatgtgcactctgttttgctaggccggactttaatgcagactggtaagcaggcatctccgagctggtagaagtgtacactcctgctgtattccatcatgtggatcaaaggccagggctaatagcacttaaataataaatgtgctgttttaaggtatgcatcatttaaatttgagggaaaygagcaaatctgggaagactacaagggatgtactttcctgacaatgat

SEQ ID NO: 703713 - DNA, 958 bp, Homo sapiens
gttttctgttgaactattttatagacaagctatataaaaaagaaacacaaggaacaaaaaatgatatcttattctagtgaaggaaatccaaagttggggtctagaatacaaatacacctgtgtgcaagctycagtgatgccagttcctagtactggagagcattgtgactctgagcaaaagagggaagacaaacatatgaacagaaaacctcgtcttttctcaaacatcctcaatgactgttacatgaaaatgaggactatcaggctcatatcattttcaaagacaataggtgatatgcatgtggagaacaaatacaaaaggcatgcatagaaatcaaaagtgattaaaaatagtctgaattctggagacaatagcatgtgtggacggacagatgctacagatttaatgctgacatatcagagatgaaatgtcagctttctttattaccagtagctctcagcttttcaggcaaatcgttctttgtactctacgttctttctccttatggagttccttcttgatgcctcttcctacttcttcacatctttctactccttgagatacctgcactcattgcttgcacttctgttagtgattttgttacagtattgtgctgtgtgtttccaggagtggagccaaagtgaaggaagcccagaaatgcctgtcaagggagactatgagatgataacagcactcgtctttttccttgtgcttcttgcagttaacacccacatctatctatccatctatttgtgtatctctgtgtctgtctgtctgactatcgatctatccatcacccattcatctactcatttattttggcatacagcttttcgatagaggcaaacactgcataatggaattgatctacaacaagaccatagctggagtgaaagaaccaggactcagaagttaaaaccaaagttaatgttattggaatgtatagtcttaaaaaca

SEQ ID NO: 703714 - DNA, 958 bp, Homo sapiens
gttttctgttgaactattttatagacaagctatataaaaaagaaacacaaggaacaaaaaatgatatcttattctagtgaaggaaatccaaagttggggtctagaatacaaatacacctgtgtgcaagctccagtgatgccagttcctagtactggagagcattgtgactctgagcaaaagagggaagacaaacatatgaacagaaaacctcgtcttttctcaaacatcctcaatgactgttacatgaaaatgaggactatcaggctcatatcattttcaaagacaataggtgatatgcatgtggagaacaaatacaaaaggcatgcatagaaatcaaaagtgattaaaaatagtctgaattctggagacaatagcatgtgtggacggacagatgctacagatttaatgctgacatatcagagatgaaatgtcmgctttctttattaccagtagctctcagcttttcaggcaaatcgttctttgtactctacgttctttctccttatggagttccttcttgatgcctcttcctacttcttcacatctttctactccttgagatacctgcactcattgcttgcacttctgttagtgattttgttacagtattgtgctgtgtgtttccaggagtggagccaaagtgaaggaagcccagaaatgcctgtcaagggagactatgagatgataacagcactcgtctttttccttgtgcttcttgcagttaacacccacatctatctatccatctatttgtgtatctctgtgtctgtctgtctgactatcgatctatccatcacccattcatctactcatttattttggcatacagcttttcgatagaggcaaacactgcataatggaattgatctacaacaagaccatagctggagtgaaagaaccaggactcagaagttaaaaccaaagttaatgttattggaatgtatagtcttaaaaaca

SEQ ID NO: 703715 - DNA, 654 bp, Homo sapiens
tgagcacaagcatgaaatacttgcaaaatgacaaattacctaatatgctgtgaaaagggttggcacaccatggcctgtaagccaaatctggtttgcctttttttttaattttgtaaataaagttttattggaaggccatgctcatttatttacatattgtctttagatgcttttgtgctgcagtaacaagagttcagtggtttccacagagaccatgtggcatcaaaagctcaaaatatttattttctactcctttacagaaaaagtttctcaaagcctgttctggaccttagggattgctaagcatctttatattgttgagaagaaatttctaaatccagatggtcttctgaattaccttcatagaaatataccctatatcgaattagctactcttttccctttccccattatgtrtaattctgcacactaaaagtctggtagcccaaaaggcaaagtttacatgtgtaaattaatattctattatcttcttattcccggggacacagctaaactagacttcccaggatgccttgcatctgggtagaattatgtgactgagttccagccaatagaatatgggaggaagaaatatgtgtcacttccaagcatagccttaaaaccattcttcaagttacctctctttccatccat

SEQ ID NO: 703716 - DNA, 1631 bp, Homo sapiens
cattttctccttgatcacccttcgcattgtcatttgacctgttttccaaaggaagaaatgttgattaaaagtatctgaaagaaagaaatcgggaaataaaaacaaaaaagaagctcacaaaaccaaaggcatgatggaaaaaaatgataaagtcttcatctaataacactaaatagataaaagttgtaaatattatcgaaaatatttttcagttgcacaattaagcttgtctcaaactatatttaatgataagctgtcttcactatataaagatggtgttactggtcccactgatttaaaaacccttcacagacaattccctgtggacacagcctgacacatagagaatgcaaagatggagcgcatcccgcccatgccattcgtcagaaaaatgctgagatccttgaccagtagaggtagggggttggcaggggagcaatcacatcctccttcatggcccccctcctgtgacaaacaacgtgtgtgaaacagcagcccagggatcatgataggatctgtggcaatgcaacagagccaaaagacagactcagaggaacagtagatctgtaaacttgacctcattagtagcaaactgtaaccagttgctaattaccttctggatatattgtacattagtagcaaactgtaaccagttgctaattaccttctggatatattgtacattgtatatgcatatatgtaaattatgmctgtatatatgtaaattcgacatgtgtttgtcacctaaaatttgcaaaagtttaatatgatgactgcagttagagagaggagataatagattaaccaataccttctaatgaaaatgaaggtaaaatcttaaagtagtgaccaactttctggtgaaaaatgcactaattgtacttaatgtataaacttggtcaccttaaattagctttgtttcatcctgtattctgaggagaacatatttcaatcagaatccaagtaaaataaggctagctaaagaattccagtgaaggcgggtcatagtggctcatgcctgtaatcccagcactttgggaggctaaggtgggcagattgcccgaggtcaggagtttgagaccagcctggccaacagggtaaaaccccatctctactaaaaatacaaaaaacttagcctggcgtgatggcgcacgcctgtagtcccagctactcgggaggctgaggcaggagaatcgcttcaacccgggaggcggaggttgcagtgaactgagatcgtgccactgcactccaccctggatgatagagtgagactccatctcaaaaaaaaaaacaaaaaaagacaccagtggagcaatgtatctatctgctaccataacaaaaatgatcatttttttggtatatttgatgcttgaaggcacacactaataagtagcatgctatcagtaaattaaagcatcttactaaatccagttagttctatgtattgtaaatattacctaaagagttaaatatatcaaatcaaagactggcatttattatctgagtagaagacattttaggatggattctaagattataaggaggtatctcaatcatctttcccaaagcacctctactgtaaaaaataactacaacatcaaatggcttgcgtgtctcagcacaaatttata

SEQ ID NO: 703717 - DNA, 1631 bp, Homo sapiens
cattttctccttgatcacccttcgcattgtcatttgacctgttttccaaaggaagaaatgttgattaaaagtatctgaaagaaagaaatcgggaaataaaaacaaaaaagaagctcacaaaaccaaaggcatgatggaaaaaaatgataaagtcttcatctaataacactaaatagataaaagttgtaaatattatcgaaaatatttttcagttgcacaattaagcttgtctcaaactatatttaatgataagctgtcttcactatataaagatggtgttactggtcccactgatttaaaaacccttcacagacaattccctgtggacacagcctgacacatagagaatgcaaagatggagcgcatcccgcccatgccattcgtcagaaaaatgctgagatccttgaccagtagaggtagggggttggcaggggagcaatcacatcctccttcatggcccccctcctgtgacaaacaacgtgtgtgaaacagcagcccagggatcatgataggatctgtggcaatgcaacagagccaaaagacagactcagaggaacagtagatctgtaaacttgacctcattagtagcaaactgtaaccagttgctaattaccttctggatatattgtacattagtagcaaactgtaaccagttgctaattaccttctggatatattgtacattgtatatgcatatatgtaaattatgcctgtatatatgtaaattcgacatgtgtttgtcacctaaaatttgcaaaagtttaatatgatgactgcagttagagagaggagataatagattaaccaataccttctaatgaaaatgaaggtaaaatcttaaagtagtgaccaactttctggtgaaaaatgcactaattgtacttaatgtataaacttggtcaccttaaattagctttgtttcatcctgtattctgaggagaacatatttcaatcagaatccaagtaaaataaggctagctaaagaattccagtgaaggcgggtcatagtggctcatgcctgtaatcccagcactttgggaggctaaggtgggcagattgcccgaggtcaggagtttgagaccagcctggccaacagggtaaaaccccatctctactaaaaatacaaaaaacttagcctggcgtgatggcgcacgcctgtagtcccagctactcgggaggctgaggcaggagaatcgcttcaacccgggaggcggaggttgcagtgaactgagatcgtgccactgcactccaccctggatgatagagtgagactccatctcaaaaaaaaaaacaaaaaaagayaccagtggagcaatgtatctatctgctaccataacaaaaatgatcatttttttggtatatttgatgcttgaaggcacacactaataagtagcatgctatcagtaaattaaagcatcttactaaatccagttagttctatgtattgtaaatattacctaaagagttaaatatatcaaatcaaagactggcatttattatctgagtagaagacattttaggatggattctaagattataaggaggtatctcaatcatctttcccaaagcacctctactgtaaaaaataactacaacatcaaatggcttgcgtgtctcagcacaaatttata

SEQ ID NO: 703718 - DNA, 1631 bp, Homo sapiens
cattttctccttgatcacccttcgcattgtcatttgacctgttttccaaaggaagaaatgttgattaaaagtatctgaaagaaagaaatcgggaaataaaaacaaaaaagaagctcacaaaaccaaaggcatgatggaaaaaaatgataaagtcttcatctaataacactaaatagataaaagttgtaaatattatcgaaaatatttttcagttgcacaattaagcttgtctcaaactatatttaatgataagctgtcttcactatataaagatggtgttactggtcccactgatttaaaaacccttcacagacaattccctgtggacacagcctgacacatagagaatgcaaagatggagcgcatcccgcccatgccattcgtcagaaaaatgctgagatccttgaccagtagaggtagggggttggcaggggagcaatcacatcctccttcatggcccccctcctgtgacaaacaacgtgtgtgaaacagcagcccagggatcatgataggatctgtggcaatgcaacagagccaaaagacagactcagaggaacagtagatctgtaaacttgacctcattagtagcaaactgtaaccagttgctaattaccttctggatatattgtacattagtagcaaactgtaaccagttgctaattaccttctggatatattgtacattgtatatgcatatatgtaaattatgcctgtatatatgtaaattcgacatgtgtttgtcacctaaaatttgcaaaagtttaatatgatgactgcagttagagagaggagataatagattaaccaataccttctaatgaaaatgaaggtaaaatcttaaagtagtgaccaactttctggtgaaaaatgcactaattgtacttaatgtataaacttggtcaccttaaattagctttgtttcatcctgtattctgaggagaacatatttcaatcagaatccaagtaaaataaggctagctaaagaattccagtgaaggcgggtcatagtggctcatgcctgtaatcccagcactttgggaggctaaggtgggcagattgcccgaggtcaggagtttgagaccagcctggccaacagggtaaaaccccatctctactaaaaatacaaaaaacttagcctggcgtgatggcgcacgcctgtagtcccagctactcgggaggctgaggcaggagaatcgcttcaacccgggaggcggaggttgcagtgaactgagatcgtgccactgcactccaccctggatgatagagtgagactccatctcaaaaaaaaaaacaaaaaaagacaccagtggagcaatgtatctatstgctaccataacaaaaatgatcatttttttggtatatttgatgcttgaaggcacacactaataagtagcatgctatcagtaaattaaagcatcttactaaatccagttagttctatgtattgtaaatattacctaaagagttaaatatatcaaatcaaagactggcatttattatctgagtagaagacattttaggatggattctaagattataaggaggtatctcaatcatctttcccaaagcacctctactgtaaaaaataactacaacatcaaatggcttgcgtgtctcagcacaaatttata

SEQ ID NO: 703719 - DNA, 1480 bp, Homo sapiens
tggataatacaaatttaatagatccaaaatgaaattcttgaattcctctaaacaataccaataatttgttccaattagaccatagtaaggttgttaaaaaataagcaaaactaaaaaaactacaatgtgtaatctttagaagactttaaaagataaagacagatgtaagtaaagatgggtaatctctactttcacatctcccatccattcctctaagataaccaatgtgtatttttttaaaaattcattctgtaactttatgccaatctaacaggatgcttatattagttttttactgttgttttcttccacagtaggataatggtgtatcaatatttagtgactttttaaagaacatgacactaagaatgttccgagtcaaaccatttagatttgacgtattctttctaattttcaatgacatgactttctatgcatgttccaggtatgattcaacgatgtgcgctgctgtattattagattatttccaatccattttatttgtattttaaatttaaaccaaatgtattgtacgtacatagctcacgatatgctgcttgctactgtgcttgctctgaaaccttgcccattatgcactaacaacactggcttctattcagtacaacaaaacgtccctacattttttatatccagaaatttagtacggttttttcattctggaagcagttctttccctctgccttaccatcattgcatggctgtctctttctcatctgtcagatcagtgctctcttcttatcttttacagggtatcttagggtaaaaagttaaactgatgcgacagagaccccaaaacaaatgcctcaaacaagatagaaatttacttatatgtaatataatgatctaaagttgacgttccagattagctatgtttctgctccagctagtcactcaaatacccgggtgaatggtggctcttttgcattcagcaagtggctttcaagacctcccatatcattggcaatttggcartttaggtgggtgtggtggtaggtggatcaggaacatcaaaatttgtggagatttcctctcaaacatagtaagtgaaagtttcattcatcatttttgcttgccatatttagctgcaaagaaatctgggaaatgtgatctctggttagacaagcatgtttgataacaagtctattattatgggagaaggaagaatagatcttggtagacaatttcagtctacactcaaggacacttaccacaatttgtaaatgatgtattcattttaaaaacaatcttctggtcttcccattagatagtaagcacaataaaggtaaaatacctgcctgttttattgttttattcacaaataaaccttctcccctgaatactacttctgtcttttagtaggttttctttttttttttttttttttttttttttttttgagaccgattctggctctgtctctcaggctggagtacagtggcgcaatctcggctcattgcaa

SEQ ID NO: 703720 - DNA, 1480 bp, Homo sapiens
tggataatacaaatttaatagatccaaaatgaaattcttgaattcctctaaacaataccaataatttgttccaattagaccatagtaaggttgttaaaaaataagcaaaactaaaaaaactacaatgtgtaatctttagaagactttaaaagataaagacagatgtaagtaaagatgggtaatctctactttcacatctcccatccattcctctaagataaccaatgtgtatttttttaaaaattcattctgtaactttatgccaatctaacaggatgcttatattagttttttactgttgttttcttccacagtaggataatggtgtatcaatatttagtgactttttaaagaacatgacactaagaatgttccgagtcaaaccatttagatttgacgtattctttctaattttcaatgacatgactttctatgcatgttccaggtatgattcaacgatgtgcgctgctgtattattagattatttccaatccattttatttgtattttaaatttaaaccaaatgtattgtacgtacatagctcacgatatgctgcttgctactgtgcttgctctgaaaccttgcccattatgcactaacaacactggcttctattcagtacaacaaaacgtccctacattttttatatccagaaatttagtacggttttttcattctggaagcagttctttccctctgccttaccatcattgcatggctgtctctttctcatctgtcagatcagtgctctcttcttatcttttacagggtatcttagggtaaaaagttaaactgatgcgacagagaccccaaaacaaatgcctcaaacaagatagaaatttacttatatgtaatataatgatctaaagttgacgttccagattagctatgtttctgctccagctagtcactcaaatacccgggtgaatggtggctcttttgcattcagcaagtggctttcaagacctcccatatcattggcaatttggcaatttaggtgggtgtggtggtaggtggatcaggaacatcaaaatttgtggagatttcctctcaaacatagtaagtgaaagtttcattcatcatttttgcttgccatatttagctgcaaagaaatctgggaaatgtgatctctggttagacaagcatgtttgataacaagtctattattatgggagaaggaagaatagatcttggtagacaatttcagtctacactcaaggacacttaccacaatttgtaaatgatgtattcattttaaaaacaatcttctggtcttcccattagatagtaagcacaataaaggtaaaatacctgcctgttttattgttttattcacaaataaaccttctcccctgaatactacttctgtcttttagtaggttttcttttttttttttttttkttttttttttttttgagaccgattctggctctgtctctcaggctggagtacagtggcgcaatctcggctcattgcaa

SEQ ID NO: 703721 - DNA, 1480 bp, Homo sapiens
tggataatacaaatttaatagatccaaaatgaaattcttgaattcctctaaacaataccaataatttgttccaattagaccatagtaaggttgttaaaaaataagcaaaactaaaaaaactacaatgtgtaatctttagaagactttaaaagataaagacagatgtaagtaaagatgggtaatctctactttcacatctcccatccattcctctaagataaccaatgtgtatttttttaaaaattcattctgtaactttatgccaatctaacaggatgcttatattagttttttactgttgttttcttccacagtaggataatggtgtatcaatatttagtgactttttaaagaacatgacactaagaatgttccgagtcaaaccatttagatttgacgtattctttctaattttcaatgacatgactttctatgcatgttccaggtatgattcaacgatgtgcgctgctgtattattagattatttccaatccattttatttgtattttaaatttaaaccaaatgtattgtacgtacatagctcacgatatgctgcttgctactgtgcttgctctgaaaccttgcccattatgcactaacaacactggcttctattcagtacaacaaaacgtccctacattttttatatccagaaatttagtacggttttttcattctggaagcagttctttccctctgccttaccatcattgcatggctgtctctttctcatctgtcagatcagtgctctcttcttatcttttacagggtatcttagggtaaaaagttaaactgatgcgacagagaccccaaaacaaatgcctcaaacaagatagaaatttacttatatgtaatataatgatctaaagttgacgttccagattagctatgtttctgctccagctagtcactcaaatacccgggtgaatggtggctcttttgcattcagcaagtggctttcaagacctcccatatcattggcaatttggcaatttaggtgggtgtggtggtaggtggatcaggaacatcaaaatttgtggagatttcctctcaaacatagtaagtgaaagtttcattcatcatttttgcttgccatatttagctgcaaagaaatctgggaaatgtgatctctggttagacaagcatgtttgataacaagtctattattatgggagaaggaagaatagatcttggtagacaatttcagtctacactcaaggacacttaccacaatttgtaaatgatgtattcattttaaaaacaatcttctggtcttcccattagatagtaagcacaataaaggtaaaatacctgcctgttttattgttttattcacaaataaaccttctcccctgaatactacttctgtcttttagtaggttttctttttttttttttttttttttttttttttttgagaccgattctggctctgtctctcaggctggagtacagyggcgcaatctcggctcattgcaa

SEQ ID NO: 703722 - DNA, 630 bp, Homo sapiens
tatggggaagtaagacaaagaattttcagatatgaatgaatgcagtaaggacagtatggttttgttttgttttgttttgtttcttgtttttcagatttatcttatgcatggaccttcaatgataaccccttatacgtccaagaggacaataggcgatttgtatctcaagagacgggaaacttgtacattgccaaagtggaaccatcagatgtgggcaactacacttgctttataactaacaaagaggcccagagaagtgttcaaggtccacccactccattagtgcagcgcactgatggtaagataatgagttatcttgggaatgtactttatctttggcccttaaagcctgggaagattcgtaaagctttctgcttccttcttgtttggtggagccaaattacgagtttaggttcaattcacaaatatgtaaaccagaaatataacagaaaattatctaattcacccacatggtgcagtagacatggttctgggtataccaagccatctcctttctggcattgaaacagcttgtcttttttttgcttaaagactgttttgtaaaaacaaaaaygatgttccggggagttggcgtgtgtgtatgtgtgcacgtgtgggtgctgccaaaca

SEQ ID NO: 703723 - DNA, 2526 bp, Homo sapiens
cactgatgaaatctgtgacagatgaatttttgtttattataattactttacgctacataactaaccacctcaaaacttagtgggttaaacgatcattttgacaatgaaaacaattacatctcatgattttgtggattgactgggctctgctgggcaaattttctgttccacaagatggagtggatgtcactcatatggctgtattcagctgggagcttgcctggggctagaacatccaagctggacccctccagggtctttttcctcacatcctcttaccattcaggagtgtaacctgtttcttcacatcacagtaactggcttccaagagaacaaaagtaaaatctgccaggctatgtcctcaaaccaacataacatcacttctgccacaatcttttggtcaaaacaaggtgcagtgtcagccagattcaaggggaaggaaaacagactccttgtcttcatacatctaggtagaagaggaaatggtagcagctgtatttgcgggcaaactgccagataacctgtttcaatcttagcttggtcaggcctgaggcactgactttgtgacacctgagtgtcagtcacttccctagcctaggtggcgtgccctgcagccctatgcccaagtctctttccttctctcatggcaaactcaggccagcctcattatctacgttctgcagccccagaactggcaggaactcctgggcactttgggtgttcaggctgctgaaggaagcttaggaatgccaacttagtcttctccagttggagactgtgctgtgccaccatttttattctgctcatgaggcttcttggtccagtggagccaccaagcgtggtggtctcctccagcagttacagtgggagatacagcttgcctgctaatgagctacaggaatcatggatttcctggttagaagagtggagtataaactctctccgcttttggatttctcctcaacccatctcattgctctttcctccaggattttgtcccagaaggtcagatcagaacatccatgctaactgcttaattttcatagttttccgagacaaaaggacctttttcccctgcccctttctacctgatagaggcttttctcaggttataactcctttttaaaaggtagcatttgtctggtccattaagctgctggggatgataatgggagacgagggggattacaaataaaatagtttaatgttttcaaaatataccatcctcataaagaaacaaatctctaattaggacatttaaatatcagtcgttcaggctggtggactgaaggctctgtctcgggtctcactgcactagggctgcagcagccacttctctttgaagatggctattgccagttaagaccttccaggaagccaaggcatgaaaggaagcacagagccctgccatgtgccccaccttcatgttctgctcaccaccaagcacacccatgcccacccgcacactctggaagtccctatcacctgggccttccagaaaccagtcacctctcctgctcatggttcctgggtcttccctccctttcagacaacagaggtcccagctctattcatgctgtccaataagctgggatcaagcatatgttgtcaggacctgaaagtagagatacaacttacctgtgagttacataagggatactttcccaatgattctacccctttacctttgttagagtggttgaaaaacacgtgattttagatttgcagtgtattcaactatggttatacccattgtacagtgatatgtatttctcmtgacaatcctgcttcatttggaaataataagtcaaaatgactgatgtgaaatatcatttgccacagcacatttgtcattctagggagttctagactttatgacattaaacactaagaaaaatctgggtgcagtggctcacgcctgtaatcccagcactttggaaggctgaggtggatgaatcacctgaggtaaggagtttgagaccagcctggccaacacagtgaaaccctgtctctactaaaaatacaaaaattaaccaggcgtggtcgtgggcacctgtaatcacagctactcgagaggctgaggcaggagaatctcttgaactcggaaggcggaggttgcagtgagccgagatcgtgccattgcactccagcctgggtgacaagagtgaaactccacttcaaaaaaaaaaaaaaaaaaaaaagagctggaaagaaaagaaaagaaaacactaaaaaaaaaaaaaaaaaagaagaagaagaataagacaagtccacagagcttagacctagaaaatacactgatgttataaaatttctggactgttagaactgaccctacatgctttatacaaaacttatacagccttacttccaacaagatggttttgagttagaaggctcaagaatcatattttatgacacttcagttctcctggggcctgcagacaagttggggatacctagatgtgtagtgcatgcagttttcacacccaggtgggataagaggaccagaagctagtaataact

SEQ ID NO: 703724 - DNA, 989 bp, Homo sapiens
tttctcactatggagcaagatcattgttatgttctccattttacagataaacaaagtgagacaataaataatttttttcaaggtgacatcactagtaaatggtgggtcagggagtcaaaccccggtctgtctgactccaaagctgtatctacaaagtgtacatgagacactctggaaaaggcccacccaaaccaggagcctgaaatttcacctgtagagattaactttgaggggtcttgaaggctttacagaagcagcagggataagagggtagaagtcattaatgaaacacacccaaatgaaatagagtattctaatacaccagaaatagttgatgaaccctcatactttaagttctttccaactaatttcttaacacagagctgayaattagaaaaaatctttcctttaggaatcattcatatgggaaagagacacagagcagagagccaacaaggtgccacaagaaagagtgtcataaaggaaagttaaaaaatttaaaaaataaaacaaacaaaaacaaaatccaaaaaggaaagtagaagacactaaagaccaacggtggaggttaatggtgggtgtgggcagtgggagcagatcatgctggaacaggcaataagaggtgcactgcctatgagaatttaaaaacaacaaaacccactaaaaatctgctgtggtgacccttaacaatgtcagtgataaaacactccttcccaaaagggtggaccactcctgccaagccccaccttggtacacgctggtccaactctaggttatgggtctcgggattacacctgctctccataccagagagaactgcagaagcatctgaattctgttgtttttgcttttataaagactctaaccagcactgaggtaatggactactttgagtagatcaaaatgaggtggggaaatgtgatccccagctagaacactgtagtgatttcctcttggtactgtaataaatcatcacaaacttagtggct

SEQ ID NO: 703725 - DNA, 392 bp, Homo sapiens
aaaggacatgaacaccaacaacactattgatcatgtagaatgctcctggccgggcgcggtgrctcatgcctgtaatcccagcactttggtaggttgcagtgagccaagaccatgccactgcactccagcctggcgacagagcgagactctgtctcaaaagacaaaaaaaaaaaaaaaaaaaaagagaatgctcccatattgagacattcttagcatgaaaaggaatgcggattgaaaaaactggttttaatgggccctatgtacattgaagtctcacaacagcttatagagacaacatggaagtatgaaaacttttttaaacccagactgtgttactagttctgaaacagaagctatgttttacaaagatagatgatatataatgtctaaaa

SEQ ID NO: 703726 - DNA, 670 bp, Homo sapiens
ccattttcagcctgttctcactttgaggattattccctccaaccttttcaaatagttcttttcctggcttggggtagttttgtcatgtgcatgtgcaatcagtactaagttggagactagtctgggaccttctgtctatatmcagagttctcactctctctcctctctagtattctatcttgcaagttctagacactgtggcccctgaagattcccatctcggtgtcttcacctcatggagactgctagacactgcctggattcccgtttcccatactgcatcctgtaaactgtagccaggcagtaagttagggcagtcgtggagctcagctctttcattttccatcactttggggtcactgaccttcattgcatgatatctaaagtatcaaaacttgtttactatatcttgttgatttttcagtggttttaggcaggatatatctttttgctattattctatcttggtcagaaaaagatccatctttctttatttctcctggaggatattttatattctatctaaaatattatcaattttatctaacttttcatttttacacccatcaagttgtagttaatatttagtaaaaatttttgttaaacttactccgtaaccataaattcattgccttttttctcaatgatactaaatatgaataatgtttta

SEQ ID NO: 703727 - DNA, 588 bp, Homo sapiens
tatttatttctgaaatatgtcagccaacacatttttaatgagatgtaaaaactgaacttaaaaaaaattaaaatattccacgactcagygtgactttggcagaagagcaaatgtggatggcaaacctcaggccccacaattagagacaaacatctactttctgcagggaagaaaatgtttttgttgacagatgcaaaatctggaagaggaagaattttgaagaactctgttttcatcatgactaccagaagagaagtaggaaaatacaaagatgaataagacacacagcttggcttagaggcttgtcagagaagtaaaaaatgtacacagatagctcactcaaggtaaatgtctgttaaatttctcttttatttcagatctgctcacatctttccatccctttcacgccctccttctcacctagtctatcaaaacagcctcctaattggcctgcctatttctacccttgtccctcaaatccattcttcagtcagtggccagatgatcttttaaaatttaaatccgattatatcactctcctggcttaaagctatatccttggctctgccattgcattctgaaaaaatt

SEQ ID NO: 703728 - DNA, 1888 bp, Homo sapiens
tatttacccaatgatttcaagtttggcaatttaatcagcagtccccatcgccaatatgatcatctgagtggacacaaatactaaacatgggtagaactattactttagaaaagttattttttcaccaacaaaatacctaacttagttatctttactttttaagttacgtatagaagattcagtttccccatgattacargactctatttactctaattgtaatacaccttcatgagtgggggagaggagtggaatgatggttatcacccagggagttgtacagcacctcagggatgtccacagggatatatcccacaagtgaatctcatccatgactcaggctaagacagcagaaaagatctaggaggagttgccttgggaaaaaaataaactgccaattgtcatagttcagtcacagacaaggacacttccatttgatgtactcataaccaggcctaccaatatactgacctcaagataaaagtctctctatggcgtttgcccatccagtgagtaaatcacccagcacacagattaattatttagcagtttaaatccattaaatagacatgttacatacacattaaataccaagacagaacacataaaataaaaccaagggaaaaacctattaaatatatgcttcctaaccatctcttattcatgaccgtagggctatcacccaacattaaaaggaatctcctctatagcattggaggttcctgatatttaatcaataggtggaaccaacatatatattttttctttcttatacagattatcaagagataatttttttttttttttgagacagtctcactctgtcacccaggctggagtgcagtggtgcaatcttagctgactgcaacctttgcctcccgggttcaagtgattctcctgcctcagcctcccagatagctgggacgacaagcatgcaccaccatgtccagctgatttttgtatttttagtagagatggggttttgccatggtggccaggctgttctggaactcctgacctcaggtgatccacccaccttgacttcccaaagtgctgggattacaggcgtgagccactacacccggccaagagataatcttaacaagagattatcttgtttccattttgtttctttgttcaattcagcatcctcatgattctagcataggtaatgacaatttagttatttgatccaaaagagccaaactattcctgctatataaggaacaaagtgacttgtggaaaacaatcatattatgtcttacccaagttaaccaatattaatttctatgtatctttaaataggcagatgtcttctcccttattcacttaagagagactctacgggtttacacactcaatctttaactgcccttcaatttacctgaaatatattactgggaatttttggaagggaaaatgggatattaaatagggaacttgcaagcttgtcattcaagaatctccaaaattggtccttaatgacttctccatctttctttttcttttctctttttctttttttttttttttgagaaggagtttcactcttgttgcccaggccggagtgcaatgacacgatcttggctcactgcaacctctgtctcccgggtctaagtgattctcctgcctcagcctcccgagtagctgggattacaggcatgcgccaccatgctcggctaatttatatatatatatttttagtagatatggggtttcaccattttggctaggctgggctcgatctcccaacctcaggtgatccgcctgcctcggcctcccaaagtgctgggattacagctgtgagccaccgtgcccggccaccatctttctttttcaagtttaaattttccgatatatgctttatgtatttgaatcaaaattttta

SEQ ID NO: 703729 - DNA, 638 bp, Homo sapiens
aacagtatgctattgatagttaaggttttggggagtcaaaagttatatgtgaatttctttctgtgcagagggttggtactcctaaccccttagttgttcaagggtcaactgtctgtgtgtgtgggtgtatatatctacgtactcaatgcctacacaggggaagagtctgactgcaatctgcttttgagttctgacacacatccagccgctctctgaccatcatgctcccatgtggcctctcagataagccccagtttattagctttaataattgaaatcataytcctaattttttagccttccccaacaataaaataagaaagtaaaagtctgtcattgttggtctgttctatgttttagcctgtccatgaccaatccacagatattttttgagtacttgctatataaaaggctgtgtgataaccactacaggggattcaaaagggaagaagcaacgtcactctgatcacaattttcctgtggattggacatctactgtattgcctgcacagcatccatttctctttgtctaggaataataataataataataataatcccaattttcctttgggaaatcatgtctccccactttcagaccatgtactttgggtggctgtaacaccattctctggctg

SEQ ID NO: 703730 - DNA, 665 bp, Homo sapiens
aatggcgcaatctcggctcactgcaacctccgcctcccgggttcaagtgattctcctgcctcagcgtcctgagtagctgggattacaagcatgcgccgccacgcctggctaattttgtatttttagtagagacgggtttctccatgttggtcaggctggtctcraacccctgatctcaggtgatccacccaccttggcttctcaaagtgctgagatgacaggcgtgaggcaccgcacccagcccagaaaagagttttaagacaagggaatctttccccagcaaaggcccacattatgtggcaagaaggtgttaaagcaggtggaagggattccagaaatattctgaaagcttaaaaaaatgggtttgttgccaggaacataggccacagcacagctcgttggaaaactatgtagtggacgcatcgtttatcaactgcagtgttgggaccaaatatccgagaccaaataactggcagttagaattggcccagttgttcctcttgaatttagtggttaacaaataagatattgagtgcatactatgtgtcaagcacttgctgggcactggagaaactgagataaatagggttaaggcttccctcatggttcactgaaggagacagaaatacacttattgaaggatggtgtgaatagtgtgacagata

SEQ ID NO: 703731 - DNA, 665 bp, Homo sapiens
aatggcgcaatctcggctcactgcaacctccgcctcccgggttcaagtgattctcctgcctcagcgtcctgagtagctgggattacaagcatgcgccgccacgcctggctaattttgtatttttagtagagacgggtttctccatgttggtcaggctggtctcgaacccctgatctcaggtgatccacccaccttggcttctcaaagtgctgagatgacaggcgtgaggcaccgcacccagcccagaaaagagttttaagacaagggaatctttccccagcaaaggcccacattatgtggcaagaaggtgttaaagcaggtggaagggattccagaaatattctgaaagcttaaaaaaatgggtttgttgccargaacataggccacagcacagctcgttggaaaactatgtagtggacgcatcgtttatcaactgcagtgttgggaccaaatatccgagaccaaataactggcagttagaattggcccagttgttcctcttgaatttagtggttaacaaataagatattgagtgcatactatgtgtcaagcacttgctgggcactggagaaactgagataaatagggttaaggcttccctcatggttcactgaaggagacagaaatacacttattgaaggatggtgtgaatagtgtgacagata

SEQ ID NO: 703732 - DNA, 665 bp, Homo sapiens
aatggcgcaatctcggctcactgcaacctccgcctcccgggttcaagtgattctcctgcctcagcgtcctgagtagctgggattacaagcatgcgccgccacgcctggctaattttgtatttttagtagagacgggtttctccatgttggtcaggctggtctcgaacccctgatctcaggtgatccacccaccttggcttctcaaagtgctgagatgacaggcgtgaggcaccgcacccagcccagaaaagagttttaagacaagggaatctttccccagcaaaggcccacattatgtggcaagaaggtgttaaagcaggtggaagggattccagaaatattctgaaagcttaaaaaaatgggtttgttgccaggaacataggccacagcacagctmgttggaaaactatgtagtggacgcatcgtttatcaactgcagtgttgggaccaaatatccgagaccaaataactggcagttagaattggcccagttgttcctcttgaatttagtggttaacaaataagatattgagtgcatactatgtgtcaagcacttgctgggcactggagaaactgagataaatagggttaaggcttccctcatggttcactgaaggagacagaaatacacttattgaaggatggtgtgaatagtgtgacagata

SEQ ID NO: 703733 - DNA, 609 bp, Homo sapiens
gtctttatccagatttcattctatctattcctgacttgactaataagrtccaaatatgcttcaacatttattttgcactaaaatatatatttaaactgaggaaactccccatcattacctaattcctgctatttatcgcctccaccttctctgtcagcaggctagtcccaaactatcaatattagcacttattctccacatgagtgctgtgttctcacagttctgatcctcgttcccacctcactcagaatgtattaaccagatatgatgattttgttaatgtaaatgcattaaaaaactggccaggtgtagtatataggggaatgctggggacttcagtgtttgccccatccaagggagacacctgccactcagccatatggagacacaggtcaggtgcctgctcatcttcttgttcttcaagagaaactagaaatctagacttttgtttgagcttccattttttaaatgtcagcaactaatttttattttgatgatgtacaatataaactgtgtgcttatagaccaagtttacttcatgagccacgggtttttaacttctgagaacatgaagtggaacatttcatagtttctgaaatgggtgaacaa

SEQ ID NO: 703734 - DNA, 609 bp, Homo sapiens
gtctttatccagatttcattctatctattcctgacttgactaataaggtccaaatatgcttcaacatttattttgcactaaaatatatatttaaactgaggaaactccccatcattacctaattcctgctatttatygcctccaccttctctgtcagcaggctagtcccaaactatcaatattagcacttattctccacatgagtgctgtgttctcacagttctgatcctcgttcccacctcactcagaatgtattaaccagatatgatgattttgttaatgtaaatgcattaaaaaactggccaggtgtagtatataggggaatgctggggacttcagtgtttgccccatccaagggagacacctgccactcagccatatggagacacaggtcaggtgcctgctcatcttcttgttcttcaagagaaactagaaatctagacttttgtttgagcttccattttttaaatgtcagcaactaatttttattttgatgatgtacaatataaactgtgtgcttatagaccaagtttacttcatgagccacgggtttttaacttctgagaacatgaagtggaacatttcatagtttctgaaatgggtgaacaa

SEQ ID NO: 703735 - DNA, 563 bp, Homo sapiens
gatgcacacctgtagtcctagttactcaaggggctgaggtaggatgaccacttgagtccaaatggtccaggctgcaataagctatgatagtgacactgcactccagctgggtaacagagtgagaacctgtctcagtaaacaaacacacaaataaactgggggaaacttagcaaggcctatttgttcagattcttctttgtctgtgtctctgcatctttggaggtaaggacgttccttttctatgggaaggcacctcttacttaataagagtcttatggtcctccagggaaaggtcagaaaaatcttcctggtttctatgacctcttcaggggagaaggatgggggaaggtcagaaaggccttcctgcttctgcctttttcttaaatattttcagtttaaaatattaaatatgtcaatgagggctattytggggtagtgtttccggagccccatcataggtatatgaggtttcattgaatactattttctgcttttaaatatgtttgaaattgtaaagaacagtttttaaaatgcgaagattttacataattgaaaaaagattt

SEQ ID NO: 703736 - DNA, 1118 bp, Homo sapiens
caaaatatagatggaaagtcctactcctttgaaattcagattaacaaacatcgtgcatttggaggagagccaggaggggggaaggttgttaagtaaccatttcccttttgattacagcatcccatttttcttttgaggcattatacctctcctctatcttagccatatggtttgaatgagtttggctatatccccttcgttacctgagtagggatatgacacagttctggccagtctgagcattcctcagaaacagggcaatgagactcaacactgagccttttgttgaagctattgaaaaagaggcaacctctccatgctaaacatagtgtaaaaataggtagtcagccttgactccctataaaaagaggcagcagaaatatagagagagtgccagccaataacttgatgtcattttcggtgcatctggatttttctgtatctgaagtaagcctggatttttgaatttaaattaaaattttgattcttgctattgcaagaggcttactaacaatggctaactatcaatatctaaaatcatacaattctgcccagaggagtttcatgatgagccaagttagaaacccactgcatgaaatgttcttatgaagtatgttttaaaatacatctgcaaatacctaaattaacatatggtactattgaacataagtttattcatagaattcagtattactgaaaactttgagaggctttcagaactttaaaggtgccaggattataggttaaaattgatttatcagactcttaaaataaaatgttattcatgtgatatgaatgagttatagatttgacaaaaaatatgaatcccaggtagctggggatagaggtagagcaaaccaatgcctaattggccagagtccccggatggccacatccagytatgagcagagactctgggctttcacagaaggtagcctagccctgagaggaactactgagtaggcccatggtccttaatggctgtgaaaatgatgaccagcatccagtatctgctgctccaccttgacgcgtgacttgttcgaagacaagaactgccatctggccatatgtctcaagagccagcagccacatacagaccttccctttgtgcataaggt

SEQ ID NO: 703737 - DNA, 1118 bp, Homo sapiens
caaaatatagatggaaagtcctactcctttgaaattcagattaacaaacatcgtgcatttggaggagagccaggaggggggaaggttgttaagtaaccatttcccttttgattacagcatcccatttttcttttgaggcattatacctctcctctatcttagccatatggtttgaatgagtttggctatatccccttcgttacctgagtagggatatgacacagttctggccagtctgagcattcctcagaaacagggcaatgagactcaacactgagccttttgttgaagctattgaaaaagaggcaacctctccatgctaaacatagtgtaaaaataggtagtcagccttgactccctataaaaagaggcagcagaaatatagagagagtgccagccaataacttgatgtcattttcggtgcatctggatttttctgtatctgaagtaagcctggatttttgaatttaaattaaaattttgattcttgctattgcaagaggcttactaacaatggctaactatcaatatctaaaatcatacaattctgcccagaggagtttcatgatgagccaagttagaaacccactgcatgaaatgttcttatgaagtatgttttaaaatacatctgcaaatacctaaattaacatatggtactattgaacataagtttattcatagaattcagtattactgaaaactttgagaggctttcagaactttaaaggtgccaggattataggttaaaattgatttatcagactcttaaaataaaatgttattcatgtgatatgaatgagttatagatttgacaaaaaatatgaatcccaggtagctggggatagaggtagagcaaaccaatgcctaattggccagagtccccggatggccacatccagctatgagcagagactctgggctttcacagaaggtagcctagccctgagaggaactactgagtaggcccatggtccttaatggctgtgaaaatgatgaccagyatccagtatctgctgctccaccttgacgcgtgacttgttcgaagacaagaactgccatctggccatatgtctcaagagccagcagccacatacagaccttccctttgtgcataaggt

SEQ ID NO: 703738 - DNA, 587 bp, Homo sapiens
tgcattcattcaacaaatgcttattgagggactttgctaagtgcctggaatccagaaaacaaaatgccagcagacatcaatctccttaatggaacttaaaatatgtggaagacaaactattaaatgcctatatagagtaaagcatgaaatggaaggaagaaatacacatgattatacgatgagggattgcccaaaagtaagtcttctctagatggattacttttgcttttctctttctttactccrttctccccactcatatctctttttctttcttcagtaaaaaatatttgtcctttccacttctaccatataagaagcctcaggtatagacttcgtatgtaactgtgggtccctatattatgaaacaagagtcaagggtcatgagccctaatatcatgactcccaaaagaatcacaggcttttctgaaaatttcagtgatttggagatatttcctgtctctctctcaatgatccaggtatggaggcatccatatcacagccccagaatcccttccatcccttctactgacattgtgttggagatatgcttttaatgctaacatactctgagtttctttaattaa

SEQ ID NO: 703739 - DNA, 1925 bp, Homo sapiens
cagtcctcatcagcaactctgtagtagatttattaaccccattttacagttgaggagactgaggctcaggctaagtaactgtccaagcaaagagcaggattttaaactacgatctctatggctcagttcctgagtctgtgctctctttccaacaaaccctattgctcacaagaaccttctatagagaacacagcattgtggtcaatgaactccttgtcgaggatcataaactcagaattcaatataaagtcactattattccagaaaaaaaaaaaagaaaagaaaaaccctgatgcccgcctcctttgaaaaaatagcatgccttagtgagatgggctattaatatactttgtcgctgacatcagtattgcaggctggttctttgggagagccaggatgatgctaatttgcatgctgctttgcatttatttgcattctctctccatatgcaaaatccaacacagctaattagtgcaaccttgttacaatgagaagcaggcccggcgttcagtgccagggcagatggagaccagaacagggacagaaccaacccaaagccaggcacgtcctgggttggacacaccgggagacttgaaggggaggcacatgccctgaatgaaaagtagtgtaactgagcaccattattcttcaaatattgttcctttgaagtagctattgcagagaaggagggtgagagagagaaaatgacggtgggcggtgggtggggaggggatggagagatcgaagaaggtggccagaactttgcctcaggcaggattttgtttgagaaagagcacaggatttggatcccaaaggcttcaggtaaagtcctgcttggagtttggcttcgccacttacaaactgtgggaccttgcacttcatgggtttgcagggattacatgggaaaaagagggtggacatgcactttttgcaaatggtaatgcacaatatagatgtgaggaatccaagccatgccatatgaccatggagggcagcaccagagccaggtggggtctgcagactcagcctcctctyggggtccagaccctggatgtgatccacaatatagagatatattataacatatggatgatatagcatgtgtgtatgtacatatatatatatatatgtgtgtgtgtgtgtgtatacacaccaccacatgtagcatttaatgatcatctaatatggaccacatactgtgctgtgcttgtgcacctatcaatcatttcttttagtgattcccatgaccgctctaagacctgcttattattatgaccccatcttacagatatcactaaggcaaaaaatgcttgccaagtgcactagggcactcttgccaaatgattgggaattcatattttatgtcacccacttccttttccagctcctatggagactatggcatttctgttaatctgctttttttcacattgcctagttgtgataattttgatttggccttgggttttgtttgtgtcatctgaggacttcttcctctcaactggtcattttggttggtctcgaatatttcagctctgtgtttcattacttaaagtggcccgttctacaagggtagctccaatcaagcaaggtagattgaagtattgttcacagatattcactgggcttcatagaaggagaattatattatcctgccccatgggtatacagcatggttatgtagcttgctctggccaatgaaaggtgagtggaagtgagacctgtcattaccaggcagaaggcagcatgtggtttatcatagttgtctttctcttctaccctgatgataggcgaagttgcagacagagtctgcttcccagagggtccagcagtttcaaaggcaactggtgaagaacaagtcatgcgaataagaaataaacatttgttgtaattgtaagccttcatgatttgttacaggagcacga

SEQ ID NO: 703740 - DNA, 643 bp, Homo sapiens
gcccgggctgcagccttccccgcccaggcagactctccagtggaaggaggctcctcccctgggctccagggcttgtatcttggggaaaggaagtcaagctggattttcacccacttctctgcctccctcccatcgctcccagatcatctgaccattcacaggaagtccatggtggggtgtggctgtttttaaggactttggcattgtttcaggaaaggaaaaaaaaaaaaaagctaaacaaacaactgctcaaaacactaaaacaattctctgatttgtttcaaatttgtataggggatggggttttcataaatagccaggctggtggtggtgtggagatgtgatcttttgggcatattaataacaactgcctccctcaccaagactaggccctatgttaagtgcttctggggcttgatcttatttaatccatacatccctgggccatactgtgattatgaggaggagtttcagaraggttaaggggcttacccaagggcacacagctgcaaagtggttagagcaaagatcttaagccatgtattttttttctttttttttcttcttttgtgacagggtcttactctgttgcccaggcttgagtgcagtgatgcaaacatggctcactgcaacctggacctcc

SEQ ID NO: 703741 - DNA, 629 bp, Homo sapiens
tctcatgtacaaaagaaaaaggcattataaaaatgaatataataaaatatgaagatgacagggtcaacaacttaggagagaaagaaataaaatgatgatactttggttattatacgttgtcacttgattttgttttgttttttaattttaatttgattttgagctttccgatagccaaaaaagataatatgtcctgaccatgtacatgactatgtagctctctggttttggctgtttttactttttaaaaaaaagttggtctaaggccaggtgtggtggctcayggctgttgtcccagctacttgggaggctgaggcaggaggattgtttaagcccaagagttcgaggctgtagtacactgtgatgacacctgtgcatagccactgcactgcagccttggcaacagaccaagacctcatctcttaagaagaagggaaaaaaagatctaaaaaatcaggtattgggccaggcgtgttggctcacacctgtaatcccagtttgggaggccaaggtgggtggattgcttgagcccaggagttcaaggttgtaatgagctgtgatcacaccactacactccagcctgggcaacagagaaagaccttgtctctaaaaaaaaaaaaaaatttacc

SEQ ID NO: 703742 - DNA, 2437 bp, Homo sapiens
tgcatagttagagactgagctgagattctaacctctatctgtaagactccaaagcctgtgatttggaggaaccaggctgttggccaggtctcaggtttcctgatgcttaatcaagcccccttttcctgaatgaccttgtttctagatgattagataattccaagtggtctcttctttttctactttcaagcacagtccttcttcctttcctgtttgacttgctaattaattcaatgacttttccttgattcctattagtaggtaactccatgattgataccatctggaaaacatttatccaagtcttcagtggaaagtttcacagaacaggagatgtaaaaggagacccacaagaggtgctgtgtttgcataagtgataaattaccagcccttggattatctgccaggagctctccctccaggtttaggggcagcacctttcctgctgtggtgccagctgtattatttaccacatgtttagtaaagcttgtgccttctgaatgaagtgaggagggtggaagcactaagcttacataaactagctttcaatagagtctattttcctccaattgtctcacgtgccttttccctgggtagtcatgcttcatacttttagaagctcagatcccaacagctggagataaaactcccagtgtaatggaagaaaacatgttgatagttttaattggtcccyaaagtgaaacccaaggaatgatttattggttgatggttttgaggcttccaacttagcagagctgggaaacatatgggaaagataaacacgctagaaatttgtggctatttgttagaaagttaattttagttcattcagtttatgataatcgaaaaatctctttaaattttatttattattattgaagttaatgatgcatctacttacctgcaggcatgaacacctgcatcttagaccatgctgtggttttctaccagtcttgaatcctccaaaggtcctaaacctattgacccaaatagccaaaatgtctattcccaaccatacaacttcattattcaagtgggaaatatctggtgaggctgaggagctctgtaagcactgagaggctggccatcaaagacacatgagaacttccaatactgtatacccacattcatcaacaattgttgccataacaccacataaaaatcaactcccaaagcttcctgggttataacagcaaatgtttatggtttactcatgagtatgcacatcgatttcttgctcacaggactgcaggccagctggtcccaactctgtctgcttcaggttaaaaatcaggttcatgtcagctccttgtacctttccttccagaacctaagatcaagatgcagaatcatggtcatgttcatcccatggcaaaatgcagaaacacaatagggctagagaaaactagctgtgattttttttttttttttttttgaggcggagtctcactctgtcgcccaggctggagtgcaatggcacgatctcagctcactgcaagctccgcctcccaggttcacgccattctcctgcctcagcctccctagtagctgggactacaggtgcccgcgaccacgcccggctaatttttttgtatttttttagtagagacggggtttcactgtgttagccaggatggtctggatctcctgacttcgtgatccacccgcctcagcctcccaaagtgctgggattacagacgtgagccaccgcgcccggcctagctgtgatttttaaaacctcttcttggaattggcgcattaccacttttgttcatattcctttggtcaaaacaaatcacatgttctcaagtcagtggaccaggaaaatatactctaccccatgggagagacagagagaaaatatttgctaaaaaataatctaataaaacacatctttatttttatttttacagactatgacctttgtttatctcttccatacaatttagggcaattgagagtgcaaataggaatatgcacatgaagtaactcatggagagataaatagaataaggaaatataaactttttttgtaaattgtaaaatttcatgtgatattacaaataggaaaccatttatgaagcacccattatgaactgtggaaggtgaaatgttgagaataaattattcatacaagtctttctgactacaaagcctgctagtctacactgtataatgaattaaaaatatagtttttaataataaaaatcctagtgatgagggccttataattatctcttttgtgcaagacattttttggcagtgttcagggtaggttgaagagttggctgaaggagagaaataaagaggaataaaatctgagttctactctctagaagcataagcctagtagtagaaataaaatatgttcatgaggaactataacccttcccttcctctcttctttccttcctttcattcttctttccttcctttc

SEQ ID NO: 703743 - DNA, 1199 bp, Homo sapiens
tgaaaccaaaacaaaacaaaaaataagcaaatgaaaaaattacaactgtccttaatgacacctagatagggatagtatttgattattactttctccacagcgtagggataataaggttgagtttatgggtaaagcaatgagaaaatgcctagcacacagttggtggctcaacaaacattactttttactagtctgtgaagaatatctgtggcttgagataaaatgtccagcgaaaaggatggactctagaaaacatgactttagcagaaacaccttcctcacctagactgttccatgagagaagcccactgtcaccttrtattctggggtctttctaagttagcctgttccttaattaacacaagagtagttatcttattcaattcaattatttagtctttacaatgtcaaccaaaaagaaaaaaaaaagtgaccctagtggtgatgatgatgcttatatataaaaaaatgcccatagaatttgaataaatatcatgaaatatgagggtagctacaaaagcagtatttgtaaattaacattatataatattaacattattttaagtatatgtgtccaattaaataatttgacaattatactacatcaacacaaaaagtttatgcatttaaattatccaaagaaaaccctttttcacaaaaataattattattttacagtatttatatttttaaggccacatcttaaggaaaaaatagctatagttggcaagaatttaattgttcttgtcagctgtcaatgattgaaatataaggatggtaaatcattttttgacaagacatgaagaaaaatgaacaaaattaagtaaatttgttctgttaaaaagtaatccatggaaaaggcaggcacttaacaaattcttgttgatccctaaaggaactttttctatttagtaacaggagacggctaagtgtagaatggacttttaaactcagagtgtcctgagttcaaattcacttctactattcactcgaatcaatattttccatctcgaaactaagtttcctggctgggcgtggtggctcatgcctgtaattccagcactttgcaaggctgagtcaggaggatagcctgagctcaggagttcaagaccagcttgggcaacatagtgagatcttgtctctaaaaacataaacaaaagattagctgggtatgggggtgcacgcctgtagtccttgct

SEQ ID NO: 703744 - DNA, 1199 bp, Homo sapiens
tgaaaccaaaacaaaacaaaaaataagcaaatgaaaaaattacaactgtccttaatgacacctagatagggatagtatttgattattactttctccacagcgtagggataataaggttgagtttatgggtaaagcaatgagaaaatgcctagcacacagttggtggctcaacaaacattactttttactagtctgtgaagaatatctgtggcttgagataaaatgtccagcgaaaaggatggactctagaaaacatgactttagcagaaacaccttcctcacctagactgttccatgagagaagcccactgtcaccttatattctggggtctttctaagttagcctgttccttaattaacacaagagtagttatcttattcaattcaattatttagtctttacaatgtcaaccaaaaagaaaaaaaaaagtgaccctagtggtgatgatgatgcttatatataaaaaaatgccyatagaatttgaataaatatcatgaaatatgagggtagctacaaaagcagtatttgtaaattaacattatataatattaacattattttaagtatatgtgtccaattaaataatttgacaattatactacatcaacacaaaaagtttatgcatttaaattatccaaagaaaaccctttttcacaaaaataattattattttacagtatttatatttttaaggccacatcttaaggaaaaaatagctatagttggcaagaatttaattgttcttgtcagctgtcaatgattgaaatataaggatggtaaatcattttttgacaagacatgaagaaaaatgaacaaaattaagtaaatttgttctgttaaaaagtaatccatggaaaaggcaggcacttaacaaattcttgttgatccctaaaggaactttttctatttagtaacaggagacggctaagtgtagaatggacttttaaactcagagtgtcctgagttcaaattcacttctactattcactcgaatcaatattttccatctcgaaactaagtttcctggctgggcgtggtggctcatgcctgtaattccagcactttgcaaggctgagtcaggaggatagcctgagctcaggagttcaagaccagcttgggcaacatagtgagatcttgtctctaaaaacataaacaaaagattagctgggtatgggggtgcacgcctgtagtccttgct

SEQ ID NO: 703745 - DNA, 680 bp, Homo sapiens
ccagtattctttatgatattttatttcctggtttttttttgtacatattctttcctacacacattagaatgtaagctccacaaggataggaagctttgtctgttttgtagcatgatacagccaagtgcctgctgaatagtcagtgattggtaattatttgttggatgatgtttaaaatcactgtaaaaatagagttggaaaataatagcaaattgaataaataataattatgaaagaacatatttttctatataaatttttatttcaatttaaacattacaattcttaataatctagcaagactgatagataattaaaaattaaatatttattcacatggtagcaataattataaaacaatttaaaaaattgcaatctcataaaaatggtacataggaataaaagacaagtaaaaccctcacagagaaaattatctgtgaataaaaatttagggctgggttggtggmtcacacctgtaatcccagcactgtgggaggctgaggcaggcagatcacctgaggtcaggagttcaaaaccagcctggccaatatggtgaaccccgtgtctactaaaactacagaaaaattagctgagcatggtggtgggcacctgtaacctcagctactcaggaggctaaggcagtagaatcgcttgaacctgggaggtggacgttgcagtga

SEQ ID NO: 703746 - DNA, 3437 bp, Homo sapiens
caatttatgcatgtatgtgcacccctcatgtattacagaagtgtcatcatagagcatcaggggaaagaatggtctttacaataaatggagctggaacaacaaattatcccataccccaagttatgtttgtgtggcaaaactatcagagaaacaactatgtgaggtgatggatatgttaattagcttgattgggtgatcatttcccaatgtatacatgcattaaaacatcagttggtacatcttaaacatatacaattcctatctatcaggcataccttaataaagctgaaaaaagagaaaatctactgggttatatacygcatatatttgtaatggcaaaggactggtttcataattatatacattattttattaatcaatacaaagaaaggcagaaaaaccaatagaaaaataggcaaacatctttagcagatattttatccaaataatcaataaacatgaaaagctgttcagcttcattattaatcagggaactgcaaattagaaccacaataagataaaattatcttctcagcatacttgcaaaaattaaaacagtcttatactaccatgtattgctcagaatgtgtagtaatagaaactctcatataatgcctctgggaatgtagtttcatatagtcacttaataaaatggcattatctactgagtgggaaggtttgcatagtctgtgataagttgattccacttctaaataaatattcagcgaatgggtgcccacatggaattattagtatgtaataacaccaaactagaaataacccaatgtccatcaccagtagaaaagacaaactcttacgtatttatgcaatgagctatcatccagtgatataaaagaatgaactgcactacataaaaaaatctagacagattttataaacatgaggctgtctaaaagaggcaagaatcaagagaacacatactttatttcatttatgtaaggttaaaaaataaaaataaaatcacatacatacatataaatataaaatcagtgccttgaagtaatgcatacttcaatatatgaatatgtttatttacttatacataatatttaattgtaaatatttacctatatcaatattaatatagatatgcatgtacatattataggataaggaggggaatgtgatcagaagggacacatggaggaatactgggcactactaatatactcctactccctctcagtggtggctacatagcacccactttatttctatgcatttaattcagcattttttctcttttctatgtgtatgttatatttttaaattaaaaataaatggaaaaagcagccaggagcagtggctcacgcttgtaatcccagcactttgggaggccgaggcgggtggatcacctgagatcaggagttggagaccagcctggccaacctggtgaaacccccgtctctgctaaaaacacaaaaattagctgggtgtggtggcatgtgcctgtaatgccagctactgtggaggctgaggcaggagaattccttagaacctgggaggcagaggttgcagtgagatcgctccgctgcactccagcctgggtgacagagtgagattctgtctcaaaaaaaaaaaaaaaaaaaaaaaatggaaaaaccaaaagaggtttaacattactacttaggaaaacacaatttggtatcatagggaaatacatttataccaagaaataaataaaatatatatttaagctcatgctggacaaacgatactggaaagaacatggagtgacaggaacacgtggagactattggcagttgcacagatattgtgtttgccttctataaagtctattctggcataagtgtgagggatgaaactattcagtagagaacctgaaatgttctacttatacctctttgtgtctaagcttgacaccttaataccttgttcttccaatatgtaatactattccccttaatgttttcatattaataaatattgagatttgactagaaaaataaaatcacacatatgcatagtattatgtagagagagatacagaagtgtgacattgtgtttatactcccaattattcatcaaatattaatcagcctgtgcttttgttccatcaaactggtaagtgcttgagggtataaactaaattggataccatttctcagttagaagagtttctggcaagatttttttaaaaaaagcaaaacaaggatactctaaacatttgaaaccacacatgaaggtagacacaatttggatctgaatgtggacatgtctaatagagcatttctctatgtggtgagttaaataacaatatccagttaactacatagaacgaggttcaaagtacagatcttgtcatgtaatgtgagtgactcacaatgcctcgagtatggaataagaaagagagaattgcaaaaaaaattatagatttagatgagattttgctaatgtttttgaactttttcttcctttatgtgaattgtgaattataaaaaaaaagaatgttcttacttagtcattgatcacttcatccttcatacatatatatatatatatatgcatgtacacatacaaaagaattagaacaaggattaatttctaatagcaatgtgtctcctttagctattctcattggttctagtagcctggaatagcatagctccgtgcatgcaatatatgatcaatagatgtctgcccagttgttgaattattttatattaaaaaagcaggtgagtaggaaactccatatttctctttaaaaactaagtataacaagttgttttgtcatttcacacttcaatggatgtttttccctcatgaattagtgaccgacataaataaaactttctagtccctgttttagaacatataaattcaagaagagaagagaagagatctatatatgatgcccctaagagtttgtattgattgcaacttcacaggtcaactattattatcacaaatagagctatgatagagcagcctcagccacaatattcattcgtatttgttcattcacctaacatttatggagcacctactttgagccacgccaacttaagtgaccacagccttaattaactgaagggcaggggcaaatttacagacggttgcactatagccatgatgcaagaatctgctttaccagacacaaagataaaaaagaacagtaattccacaaatgcaatgaaatatttgtcagttatttctcagactttgctaacaccgggacaaaagaaagatgataataatcacagggtcggtgctccttggatcgcccacaggagctggtcaagttctttcttgtatctcaaaagcacaggaatatggctttgactttgcaatatccatctattctctgtcccttggacttttcattgcaatgttgaataattataccaatgaatctaggagtcagtgtcaaaccttgcccatatatactctgaaac

SEQ ID NO: 703747 - DNA, 3437 bp, Homo sapiens
caatttatgcatgtatgtgcacccctcatgtattacagaagtgtcatcatagagcatcaggggaaagaatggtctttacaataaatggagctggaacaacaaattatcccataccccaagttatgtttgtgtggcaaaactatcagagaaacaactatgtgaggtgatggatatgttaattagcttgattgggtgatcatttcccaatgtatacatgcattaaaacatcagttggtacatcttaaacatatacaattcctatctatcaggcataccttaataaagctgaaaaaagagaaaatctactgggttatatactgcatatatttgtaatggcaaaggactggtttcataattatatacattattttattaatcaatacaaagaaaggcagaaaaaccaatagaaaaataggcaaacatctttagcagatattttatccaaataatcaataaacatgaaaagctgttcagcttcattattaatcagggaactgcaaattagaaccacaataagataaaattatcttctcagcatacttgcaaaaattaaaacagtcttatactaccatgtattgctcagaatgtgtagtaatagaaactctcatataatgcctctgggaatgtagtttcatatagtcacttaataaaatggcattatctactgartgggaaggtttgcatagtctgtgataagttgattccacttctaaataaatattcagcgaatgggtgcccacatggaattattagtatgtaataacaccaaactagaaataacccaatgtccatcaccagtagaaaagacaaactcttacgtatttatgcaatgagctatcatccagtgatataaaagaatgaactgcactacataaaaaaatctagacagattttataaacatgaggctgtctaaaagaggcaagaatcaagagaacacatactttatttcatttatgtaaggttaaaaaataaaaataaaatcacatacatacatataaatataaaatcagtgccttgaagtaatgcatacttcaatatatgaatatgtttatttacttatacataatatttaattgtaaatatttacctatatcaatattaatatagatatgcatgtacatattataggataaggaggggaatgtgatcagaagggacacatggaggaatactgggcactactaatatactcctactccctctcagtggtggctacatagcacccactttatttctatgcatttaattcagcattttttctcttttctatgtgtatgttatatttttaaattaaaaataaatggaaaaagcagccaggagcagtggctcacgcttgtaatcccagcactttgggaggccgaggcgggtggatcacctgagatcaggagttggagaccagcctggccaacctggtgaaacccccgtctctgctaaaaacacaaaaattagctgggtgtggtggcatgtgcctgtaatgccagctactgtggaggctgaggcaggagaattccttagaacctgggaggcagaggttgcagtgagatcgctccgctgcactccagcctgggtgacagagtgagattctgtctcaaaaaaaaaaaaaaaaaaaaaaaatggaaaaaccaaaagaggtttaacattactacttaggaaaacacaatttggtatcatagggaaatacatttataccaagaaataaataaaatatatatttaagctcatgctggacaaacgatactggaaagaacatggagtgacaggaacacgtggagactattggcagttgcacagatattgtgtttgccttctataaagtctattctggcataagtgtgagggatgaaactattcagtagagaacctgaaatgttctacttatacctctttgtgtctaagcttgacaccttaataccttgttcttccaatatgtaatactattccccttaatgttttcatattaataaatattgagatttgactagaaaaataaaatcacacatatgcatagtattatgtagagagagatacagaagtgtgacattgtgtttatactcccaattattcatcaaatattaatcagcctgtgcttttgttccatcaaactggtaagtgcttgagggtataaactaaattggataccatttctcagttagaagagtttctggcaagatttttttaaaaaaagcaaaacaaggatactctaaacatttgaaaccacacatgaaggtagacacaatttggatctgaatgtggacatgtctaatagagcatttctctatgtggtgagttaaataacaatatccagttaactacatagaacgaggttcaaagtacagatcttgtcatgtaatgtgagtgactcacaatgcctcgagtatggaataagaaagagagaattgcaaaaaaaattatagatttagatgagattttgctaatgtttttgaactttttcttcctttatgtgaattgtgaattataaaaaaaaagaatgttcttacttagtcattgatcacttcatccttcatacatatatatatatatatatgcatgtacacatacaaaagaattagaacaaggattaatttctaatagcaatgtgtctcctttagctattctcattggttctagtagcctggaatagcatagctccgtgcatgcaatatatgatcaatagatgtctgcccagttgttgaattattttatattaaaaaagcaggtgagtaggaaactccatatttctctttaaaaactaagtataacaagttgttttgtcatttcacacttcaatggatgtttttccctcatgaattagtgaccgacataaataaaactttctagtccctgttttagaacatataaattcaagaagagaagagaagagatctatatatgatgcccctaagagtttgtattgattgcaacttcacaggtcaactattattatcacaaatagagctatgatagagcagcctcagccacaatattcattcgtatttgttcattcacctaacatttatggagcacctactttgagccacgccaacttaagtgaccacagccttaattaactgaagggcaggggcaaatttacagacggttgcactatagccatgatgcaagaatctgctttaccagacacaaagataaaaaagaacagtaattccacaaatgcaatgaaatatttgtcagttatttctcagactttgctaacaccgggacaaaagaaagatgataataatcacagggtcggtgctccttggatcgcccacaggagctggtcaagttctttcttgtatctcaaaagcacaggaatatggctttgactttgcaatatccatctattctctgtcccttggacttttcattgcaatgttgaataattataccaatgaatctaggagtcagtgtcaaaccttgcccatatatactctgaaac

SEQ ID NO: 703748 - DNA, 3437 bp, Homo sapiens
caatttatgcatgtatgtgcacccctcatgtattacagaagtgtcatcatagagcatcaggggaaagaatggtctttacaataaatggagctggaacaacaaattatcccataccccaagttatgtttgtgtggcaaaactatcagagaaacaactatgtgaggtgatggatatgttaattagcttgattgggtgatcatttcccaatgtatacatgcattaaaacatcagttggtacatcttaaacatatacaattcctatctatcaggcataccttaataaagctgaaaaaagagaaaatctactgggttatatactgcatatatttgtaatggcaaaggactggtttcataattatatacattattttattaatcaatacaaagaaaggcagaaaaaccaatagaaaaataggcaaacatctttagcagatattttatccaaataatcaataaacatgaaaagctgttcagcttcattattaatcagggaactgcaaattagaaccacaataagataaaattatcttctcagcatacttgcaaaaattaaaacagtcttatactaccatgtattgctcagaatgtgtagtaatagaaactctcatataatgcctctgggaatgtagtttcatatagtcacttaataaaatggcattatctactgagtgggaaggtttgcatagtctgtgataagttgattccacttctaaataaatattcagcgaatggktgcccacatggaattattagtatgtaataacaccaaactagaaataacccaatgtccatcaccagtagaaaagacaaactcttacgtatttatgcaatgagctatcatccagtgatataaaagaatgaactgcactacataaaaaaatctagacagattttataaacatgaggctgtctaaaagaggcaagaatcaagagaacacatactttatttcatttatgtaaggttaaaaaataaaaataaaatcacatacatacatataaatataaaatcagtgccttgaagtaatgcatacttcaatatatgaatatgtttatttacttatacataatatttaattgtaaatatttacctatatcaatattaatatagatatgcatgtacatattataggataaggaggggaatgtgatcagaagggacacatggaggaatactgggcactactaatatactcctactccctctcagtggtggctacatagcacccactttatttctatgcatttaattcagcattttttctcttttctatgtgtatgttatatttttaaattaaaaataaatggaaaaagcagccaggagcagtggctcacgcttgtaatcccagcactttgggaggccgaggcgggtggatcacctgagatcaggagttggagaccagcctggccaacctggtgaaacccccgtctctgctaaaaacacaaaaattagctgggtgtggtggcatgtgcctgtaatgccagctactgtggaggctgaggcaggagaattccttagaacctgggaggcagaggttgcagtgagatcgctccgctgcactccagcctgggtgacagagtgagattctgtctcaaaaaaaaaaaaaaaaaaaaaaaatggaaaaaccaaaagaggtttaacattactacttaggaaaacacaatttggtatcatagggaaatacatttataccaagaaataaataaaatatatatttaagctcatgctggacaaacgatactggaaagaacatggagtgacaggaacacgtggagactattggcagttgcacagatattgtgtttgccttctataaagtctattctggcataagtgtgagggatgaaactattcagtagagaacctgaaatgttctacttatacctctttgtgtctaagcttgacaccttaataccttgttcttccaatatgtaatactattccccttaatgttttcatattaataaatattgagatttgactagaaaaataaaatcacacatatgcatagtattatgtagagagagatacagaagtgtgacattgtgtttatactcccaattattcatcaaatattaatcagcctgtgcttttgttccatcaaactggtaagtgcttgagggtataaactaaattggataccatttctcagttagaagagtttctggcaagatttttttaaaaaaagcaaaacaaggatactctaaacatttgaaaccacacatgaaggtagacacaatttggatctgaatgtggacatgtctaatagagcatttctctatgtggtgagttaaataacaatatccagttaactacatagaacgaggttcaaagtacagatcttgtcatgtaatgtgagtgactcacaatgcctcgagtatggaataagaaagagagaattgcaaaaaaaattatagatttagatgagattttgctaatgtttttgaactttttcttcctttatgtgaattgtgaattataaaaaaaaagaatgttcttacttagtcattgatcacttcatccttcatacatatatatatatatatatgcatgtacacatacaaaagaattagaacaaggattaatttctaatagcaatgtgtctcctttagctattctcattggttctagtagcctggaatagcatagctccgtgcatgcaatatatgatcaatagatgtctgcccagttgttgaattattttatattaaaaaagcaggtgagtaggaaactccatatttctctttaaaaactaagtataacaagttgttttgtcatttcacacttcaatggatgtttttccctcatgaattagtgaccgacataaataaaactttctagtccctgttttagaacatataaattcaagaagagaagagaagagatctatatatgatgcccctaagagtttgtattgattgcaacttcacaggtcaactattattatcacaaatagagctatgatagagcagcctcagccacaatattcattcgtatttgttcattcacctaacatttatggagcacctactttgagccacgccaacttaagtgaccacagccttaattaactgaagggcaggggcaaatttacagacggttgcactatagccatgatgcaagaatctgctttaccagacacaaagataaaaaagaacagtaattccacaaatgcaatgaaatatttgtcagttatttctcagactttgctaacaccgggacaaaagaaagatgataataatcacagggtcggtgctccttggatcgcccacaggagctggtcaagttctttcttgtatctcaaaagcacaggaatatggctttgactttgcaatatccatctattctctgtcccttggacttttcattgcaatgttgaataattataccaatgaatctaggagtcagtgtcaaaccttgcccatatatactctgaaac

SEQ ID NO: 703749 - DNA, 3437 bp, Homo sapiens
caatttatgcatgtatgtgcacccctcatgtattacagaagtgtcatcatagagcatcaggggaaagaatggtctttacaataaatggagctggaacaacaaattatcccataccccaagttatgtttgtgtggcaaaactatcagagaaacaactatgtgaggtgatggatatgttaattagcttgattgggtgatcatttcccaatgtatacatgcattaaaacatcagttggtacatcttaaacatatacaattcctatctatcaggcataccttaataaagctgaaaaaagagaaaatctactgggttatatactgcatatatttgtaatggcaaaggactggtttcataattatatacattattttattaatcaatacaaagaaaggcagaaaaaccaatagaaaaataggcaaacatctttagcagatattttatccaaataatcaataaacatgaaaagctgttcagcttcattattaatcagggaactgcaaattagaaccacaataagataaaattatcttctcagcatacttgcaaaaattaaaacagtcttatactaccatgtattgctcagaatgtgtagtaatagaaactctcatataatgcctctgggaatgtagtttcatatagtcacttaataaaatggcattatctactgagtgggaaggtttgcatagtctgtgataagttgattccacttctaaataaatattcagcgaatgggtgcccacatggaattattagtatgtaataacaccaaactagaaataacccaatgtccatcaccagtagaaaagacaaactcttacgtatttatgcaatgagctatcatccagtgatataaaagaatgaactgcactacataaaaaaatctagacagattttataaacatgaggctgtctaaaagaggcaagaatcaagagaacacatactttatttcatttatgtaaggttaaaaaataaaaataaaatcacatacatacatataaatataaaatcagtgccttgaagtaatgcatacttcaatatatgaatatgtttatttacttatacataatatttaattgtaaatatttacctatatcaatattaatatagatatgcatgtacatattataggataaggaggggaatgtgatcagaagggacacatggaggaatactgggcactactaatatactcctactccctctcagtggtggctacatagcacccactttatttctatgcatttaattcagcattttttctcttttctatgtgtatgttatatttttaaattaaaaataaatggaaaaagcagccaggagcagtggctcacgcttgtaatcccagcactttgggaggccgaggcgggtggatcacctgagatcaggagttggagaccagcctggccaacctggtgaaacccccgtctctgctaaaaacacaaaaattagctgggtgtggtggcatgtgcctgtaatgccagctactgtggaggctgaggcaggagaattccttagaacctgggaggcagaggttgcagtgagatcgctccgctgcactccagcctgggtgacagagtgagattctgtctcaaaaaaaaaaaaaaaaaaaaaaaatggaaaaaccaaaagaggtttaacattactacttaggaaaayacaatttggtatcatagggaaatacatttataccaagaaataaataaaatatatatttaagctcatgctggacaaacgatactggaaagaacatggagtgacaggaacacgtggagactattggcagttgcacagatattgtgtttgccttctataaagtctattctggcataagtgtgagggatgaaactattcagtagagaacctgaaatgttctacttatacctctttgtgtctaagcttgacaccttaataccttgttcttccaatatgtaatactattccccttaatgttttcatattaataaatattgagatttgactagaaaaataaaatcacacatatgcatagtattatgtagagagagatacagaagtgtgacattgtgtttatactcccaattattcatcaaatattaatcagcctgtgcttttgttccatcaaactggtaagtgcttgagggtataaactaaattggataccatttctcagttagaagagtttctggcaagatttttttaaaaaaagcaaaacaaggatactctaaacatttgaaaccacacatgaaggtagacacaatttggatctgaatgtggacatgtctaatagagcatttctctatgtggtgagttaaataacaatatccagttaactacatagaacgaggttcaaagtacagatcttgtcatgtaatgtgagtgactcacaatgcctcgagtatggaataagaaagagagaattgcaaaaaaaattatagatttagatgagattttgctaatgtttttgaactttttcttcctttatgtgaattgtgaattataaaaaaaaagaatgttcttacttagtcattgatcacttcatccttcatacatatatatatatatatatgcatgtacacatacaaaagaattagaacaaggattaatttctaatagcaatgtgtctcctttagctattctcattggttctagtagcctggaatagcatagctccgtgcatgcaatatatgatcaatagatgtctgcccagttgttgaattattttatattaaaaaagcaggtgagtaggaaactccatatttctctttaaaaactaagtataacaagttgttttgtcatttcacacttcaatggatgtttttccctcatgaattagtgaccgacataaataaaactttctagtccctgttttagaacatataaattcaagaagagaagagaagagatctatatatgatgcccctaagagtttgtattgattgcaacttcacaggtcaactattattatcacaaatagagctatgatagagcagcctcagccacaatattcattcgtatttgttcattcacctaacatttatggagcacctactttgagccacgccaacttaagtgaccacagccttaattaactgaagggcaggggcaaatttacagacggttgcactatagccatgatgcaagaatctgctttaccagacacaaagataaaaaagaacagtaattccacaaatgcaatgaaatatttgtcagttatttctcagactttgctaacaccgggacaaaagaaagatgataataatcacagggtcggtgctccttggatcgcccacaggagctggtcaagttctttcttgtatctcaaaagcacaggaatatggctttgactttgcaatatccatctattctctgtcccttggacttttcattgcaatgttgaataattataccaatgaatctaggagtcagtgtcaaaccttgcccatatatactctgaaac

SEQ ID NO: 703750 - DNA, 3437 bp, Homo sapiens
caatttatgcatgtatgtgcacccctcatgtattacagaagtgtcatcatagagcatcaggggaaagaatggtctttacaataaatggagctggaacaacaaattatcccataccccaagttatgtttgtgtggcaaaactatcagagaaacaactatgtgaggtgatggatatgttaattagcttgattgggtgatcatttcccaatgtatacatgcattaaaacatcagttggtacatcttaaacatatacaattcctatctatcaggcataccttaataaagctgaaaaaagagaaaatctactgggttatatactgcatatatttgtaatggcaaaggactggtttcataattatatacattattttattaatcaatacaaagaaaggcagaaaaaccaatagaaaaataggcaaacatctttagcagatattttatccaaataatcaataaacatgaaaagctgttcagcttcattattaatcagggaactgcaaattagaaccacaataagataaaattatcttctcagcatacttgcaaaaattaaaacagtcttatactaccatgtattgctcagaatgtgtagtaatagaaactctcatataatgcctctgggaatgtagtttcatatagtcacttaataaaatggcattatctactgagtgggaaggtttgcatagtctgtgataagttgattccacttctaaataaatattcagcgaatgggtgcccacatggaattattagtatgtaataacaccaaactagaaataacccaatgtccatcaccagtagaaaagacaaactcttacgtatttatgcaatgagctatcatccagtgatataaaagaatgaactgcactacataaaaaaatctagacagattttataaacatgaggctgtctaaaagaggcaagaatcaagagaacacatactttatttcatttatgtaaggttaaaaaataaaaataaaatcacatacatacatataaatataaaatcagtgccttgaagtaatgcatacttcaatatatgaatatgtttatttacttatacataatatttaattgtaaatatttacctatatcaatattaatatagatatgcatgtacatattataggataaggaggggaatgtgatcagaagggacacatggaggaatactgggcactactaatatactcctactccctctcagtggtggctacatagcacccactttatttctatgcatttaattcagcattttttctcttttctatgtgtatgttatatttttaaattaaaaataaatggaaaaagcagccaggagcagtggctcacgcttgtaatcccagcactttgggaggccgaggcgggtggatcacctgagatcaggagttggagaccagcctggccaacctggtgaaacccccgtctctgctaaaaacacaaaaattagctgggtgtggtggcatgtgcctgtaatgccagctactgtggaggctgaggcaggagaattccttagaacctgggaggcagaggttgcagtgagatcgctccgctgcactccagcctgggtgacagagtgagattctgtctcaaaaaaaaaaaaaaaaaaaaaaaatggaaaaaccaaaagaggtttaacattactacttaggaaaacacaatttggtatcatagggaaatacatttataccaagaaataaataaaatatatatttaagctcatgctggacaaacgatactggaaagaacatggagtgacaggaacacgtggagactattggcagttgcacagatattgtgtttgccttctataaagtctattctggcakaagtgtgagggatgaaactattcagtagagaacctgaaatgttctacttatacctctttgtgtctaagcttgacaccttaataccttgttcttccaatatgtaatactattccccttaatgttttcatattaataaatattgagatttgactagaaaaataaaatcacacatatgcatagtattatgtagagagagatacagaagtgtgacattgtgtttatactcccaattattcatcaaatattaatcagcctgtgcttttgttccatcaaactggtaagtgcttgagggtataaactaaattggataccatttctcagttagaagagtttctggcaagatttttttaaaaaaagcaaaacaaggatactctaaacatttgaaaccacacatgaaggtagacacaatttggatctgaatgtggacatgtctaatagagcatttctctatgtggtgagttaaataacaatatccagttaactacatagaacgaggttcaaagtacagatcttgtcatgtaatgtgagtgactcacaatgcctcgagtatggaataagaaagagagaattgcaaaaaaaattatagatttagatgagattttgctaatgtttttgaactttttcttcctttatgtgaattgtgaattataaaaaaaaagaatgttcttacttagtcattgatcacttcatccttcatacatatatatatatatatatgcatgtacacatacaaaagaattagaacaaggattaatttctaatagcaatgtgtctcctttagctattctcattggttctagtagcctggaatagcatagctccgtgcatgcaatatatgatcaatagatgtctgcccagttgttgaattattttatattaaaaaagcaggtgagtaggaaactccatatttctctttaaaaactaagtataacaagttgttttgtcatttcacacttcaatggatgtttttccctcatgaattagtgaccgacataaataaaactttctagtccctgttttagaacatataaattcaagaagagaagagaagagatctatatatgatgcccctaagagtttgtattgattgcaacttcacaggtcaactattattatcacaaatagagctatgatagagcagcctcagccacaatattcattcgtatttgttcattcacctaacatttatggagcacctactttgagccacgccaacttaagtgaccacagccttaattaactgaagggcaggggcaaatttacagacggttgcactatagccatgatgcaagaatctgctttaccagacacaaagataaaaaagaacagtaattccacaaatgcaatgaaatatttgtcagttatttctcagactttgctaacaccgggacaaaagaaagatgataataatcacagggtcggtgctccttggatcgcccacaggagctggtcaagttctttcttgtatctcaaaagcacaggaatatggctttgactttgcaatatccatctattctctgtcccttggacttttcattgcaatgttgaataattataccaatgaatctaggagtcagtgtcaaaccttgcccatatatactctgaaac

SEQ ID NO: 703751 - DNA, 1684 bp, Homo sapiens
  misc_feature 279, 280, 281, 282, 283, 284, 285, 286, 287, 288, 289, 290,291, 292, 293, 294, 295, 296, 297, 298, 299, 300, 301, 302,303, 304, 305, 306, 307, 308, 309, 310, 311, 312, 313, 314,315, 316, 317, 318, 319, 320, 321, 322, 323, 324, 325: n = A,T,C or G
  misc_feature 326, 327, 328, 329, 330, 331, 332, 333, 334, 335, 336, 337,338, 339, 340, 341, 342, 343, 344, 345, 346, 347, 348, 349,350, 351, 352, 353, 354, 355, 356, 357, 358, 359, 360, 361,362, 363, 364, 365, 366, 367, 368, 369, 370, 371, 372: n = A,T,C or G
  misc_feature 373, 374, 375, 376, 377, 378: n = A,T,C or G
atatctacatatgtatagatgtagatatctacatatgtatagatgtagatatctacatatgtatagatatacatattataaaaattatatatgtgtatatacatatataatgccttaaactataccaaaattgattaaaaacttttaaatcaattaaaaaatagattgaaagtataccaaaaatgattaaaactaactaatttgcaaggatacaaaattggcatacaaatatgcaaggatacaaaatttgcaaggatacaaaattgacatacaaaaagnnnnnnnnnnnnnnnnnnnnnnnnnnnnnnnnnnnnnnnnnnnnnnnnnnnnnnnnnnnnnnnnnnnnnnnnnnnnnnnnnnnnnnnnnnnnnnnnnnnntgtactatgggtattctcttactattgatatctattctatggttgaattgaatatgtggtgatggatacatgaaattatattatttttgcaacttttataggcctaaaattatcttgctattaaaagtttaataaatctgagagagaaaaacagtcttccttggtaacttggttttcttcagtcatttttgttctagagctatttgtctatgttgagctcagacagatgctggattggttcatgctggatgattctattgaggtaaaaagaagccagcagggttttggtagttgtgcagggtattaaaatgaattggatacaagatgactccttaatgcaggtctaaatccaaataaaacatttgctgagttatttagtgatgctggaaactagaggactgaagtggaaaagcagagtggagtttctggcactctcatagtactcacaagctggagggggcctgaaataaatgaggctggtttctttctcaagattgtcgtgagaatttgaaaccagtgagaagtaagctaaagaggtaggccaaaaatttctatgaagcaaaacttcgaaagcgaggttgcagaaatctgctaggccattaataaaagttcaggagcatatcacttgaagaatagaatgaatgagaagtaacctcactttgatcatctatgtcctctgtggttctattatatacttgtctggcatgtaataaaacttattagactgttgataataatgaagagaaaaggaaaaacaaacaatacaaacaaatactgataatccaaatattggagttatcagataagaactttaaaataactgtgacaatgtggaagaaagaggaaaagaagaaaaaatagatgaaagggtggatttttaaaaacaagtaagtattctacacataaaaattatacaatattcaaaaaaaagaatttattaaaagagttatcagyggactggccacagcagaaatcaggatttgtgaacttgaagatgtatgagaataaaatattaaattaaaccataaaaagaaaacatttctgaaataatagaattagtgatagaaacatgtgagacacaagtgatctataaagactatccagaatgagaaaaagaagatatagtagtggggaccatatttgaagtgataatggttggaattttccaaaactgatgaaagccattgacccatagattaaagagatttcatgcacatgtattgtattagttacctttcacactgctgtaaagaactgcctgagactgggtaatttagaaaggaaagaggtttaattgactcacagt

SEQ ID NO: 703752 - DNA, 1684 bp, Homo sapiens
  misc_feature 279, 280, 281, 282, 283, 284, 285, 286, 287, 288, 289, 290,291, 292, 293, 294, 295, 296, 297, 298, 299, 300, 301, 302,303, 304, 305, 306, 307, 308, 309, 310, 311, 312, 313, 314,315, 316, 317, 318, 319, 320, 321, 322, 323, 324, 325: n = A,T,C or G
  misc_feature 326, 327, 328, 329, 330, 331, 332, 333, 334, 335, 336, 337,338, 339, 340, 341, 342, 343, 344, 345, 346, 347, 348, 349,350, 351, 352, 353, 354, 355, 356, 357, 358, 359, 360, 361,362, 363, 364, 365, 366, 367, 368, 369, 370, 371, 372: n = A,T,C or G
  misc_feature 373, 374, 375, 376, 377, 378: n = A,T,C or G
atatctacatatgtatagatgtagatatctacatatgtatagatgtagatatctacatatgtatagatatacatattataaaaattatatatgtgtatatacatatataatgccttaaactataccaaaattgattaaaaacttttaaatcaattaaaaaatagattgaaagtataccaaaaatgattaaaactaactaatttgcaaggatacaaaattggcatacaaatatgcaaggatacaaaatttgcaaggatacaaaattgacatacaaaaagnnnnnnnnnnnnnnnnnnnnnnnnnnnnnnnnnnnnnnnnnnnnnnnnnnnnnnnnnnnnnnnnnnnnnnnnnnnnnnnnnnnnnnnnnnnnnnnnnnnntgtactatgggtattctcttactattgatatctattctatggttgaattgaatatgtggtgatggatacatgaaattatattatttttgcaacttttataggcctaaaattatcttgctattaaaagtttaataaatctgagagagaaaaacagtcttccttggtaacttggttttcttcagtcatttttgttctagagctatttgtctatgttgagctcagacagatgctggattggttcatgctggatgattctattgaggtaaaaagaagccagcagggttttggtagttgtgcagggtattaaaatgaattggatacaagatgactccttaatgcaggtctaaatccaaataaaacatttgctgagttatttagtgatgctggaaactagaggactgaagtggaaaagcagagtggagtttctggcactctcatagtactcacaagctggagggggcctgaaataaatgaggctggtttctttctcaagattgtcgtgagaatttgaaaccagtgagaagtaagctaaagaggtaggccaaaaatttctatgaagcaaaacttcgaaagcgaggttgcagaaatctgctaggccattaataaaagttcaggagcatatcacttgaagaatagaatgaatgagaagtaacctcactttgatcatctatgtcctctgtggttctattatatacttgtctggcatgtaataaaacttattagactgttgataataatgaagagaaaaggaaaaacaaacaatacaaacaaatactgataatccaaatattggagttatcagataagaactttaaaataactgtgacaatgtggaagaaagaggaaaagaagaaaaaatagatgaaagggtggatttttaaaaacaagtaagtattctacacataaaaattatacaatattcaaaaaaaagaatttattaaaagagttatcagtggactggccacagcagaaatcaggatttgtgaacttgaagatgtatgagaataaaatattaaattaaaccataaaaagaaaacatttctgaaataatagaattagtgatagaaacatgtgagacacaagtgatctataaagactatccagaatgagaaaaagaagatatagtagtggggaccatatttkaagtgataatggttggaattttccaaaactgatgaaagccattgacccatagattaaagagatttcatgcacatgtattgtattagttacctttcacactgctgtaaagaactgcctgagactgggtaatttagaaaggaaagaggtttaattgactcacagt

SEQ ID NO: 703753 - DNA, 1378 bp, Homo sapiens
  misc_feature 588, 589, 590, 591, 592, 593, 594, 595, 596, 597, 598, 599,600, 601, 602, 603, 604, 605, 606, 607, 608, 609, 610, 611,612, 613, 614, 615, 616, 617, 618, 619, 620, 621, 622, 623,624, 625, 626, 627, 628, 629, 630, 631, 632, 633, 634: n = A,T,C or G
  misc_feature 635, 636, 637, 638, 639, 640, 641, 642, 643, 644, 645, 646,647, 648, 649, 650, 651, 652, 653, 654, 655, 656, 657, 658,659, 660, 661, 662, 663, 664, 665, 666, 667, 668, 669, 670,671, 672, 673, 674, 675, 676, 677, 678, 679, 680, 681: n = A,T,C or G
  misc_feature 682, 683, 684, 685, 686, 687: n = A,T,C or G
aagaaagttaaggaaacaaagaatgctttagcaaaatgtaaatggcataaacagcagaatttgtggaaaattctaaaaaaaatgtagatataaattcctgtgggtctagccatgtaaggattttgcacagttgtgggaaagagaaaaataatatcataaatatttttctttagcaacctgtgcataaaattgctttaacatatcctacagggtaagagctttcaaactttcattaccactacctacaataaaaacattggtttacatcataatctagtatacatacatatcacgtacaaagaaaaatcttcggaaacaacactgtgtattatataatgctctctagaattttctattctcttctaatttatttaaaataatgttcatttagttgcattaatctgattgtctgaccacctaatggatttgactaacagtctgaaatatactgataaagatgtccatgaattttcagtgaaaaagaaagaatgctgattccatgctttaagtttctttttgttcaagttttctggcgatcctatcccatgcacttaaattattaaagggcccattcttttctttaagctnnnnnnnnnnnnnnnnnnnnnnnnnnnnnnnnnnnnnnnnnnnnnnnnnnnnnnnnnnnnnnnnnnnnnnnnnnnnnnnnnnnnnnnnnnnnnnnnnnnnagacatcaaaatattattagaacacactaaaataatcaactgacatctttaacatttggctttaaatcatccttagtgagatctacatgttcattagaagaaaaaatgtgcatttttcaatttactacgaatagttttgccagtttttttcatgcctccataacgtaagtccccagttttccagcttctattagaagttttctcactagttttcaagtgcccactgacaatttgttttccctgtctacaaccttgccatttttccagcctattgccattatttcccttgaagccatgccccttgtttggaaattttgttatggcaatatcctatatctaaatattaatttctgtatccattatctactgatacttaacttagtgatgcaaacttagtaagttaaaacaaactatttaatttgctcactatgctgtcrgtaattttagccacacttagctggacagctcttctgctagtctcgcttgtgttcccacatgcagtggctgtcatcacacactggactggggctggatgggtgtacaaggctgttctcatgctgctgataaagacctacctaagactgtgtaatttacaaagaaaaagaggtttaacggactcacagttccacgtggttgtggaggcctcacaatcatggcagaaagcgaaaggcacatttcacatggtggcagg

SEQ ID NO: 703754 - DNA, 1108 bp, Homo sapiens
tcatttttaaacctgtttccttacttagaaaatgaacataattgcctctgagatgtttttcttgggaagttactctgcccagtatttaattacttatcaacagtttatttttccttcataacatccttcttgatgttcattgatcattcaacaaacttcagtagattaatgtgtgagtccaattctgtatttcttgctgacatatttttctttttatgtgctttaactctatagattttattgatcatgtaactcttaagtaaagatcaaagttctcttcctgagtcaactaaatggtcttgtgagagatgggacctatatttataacccgacgtacactagcaaagcaactattcttaatgttaccttaatcagaaattctactgtttttctttaaatttattcaaataactaattttatttggtatgctttattgatctgatccaaaatattttgcctgttaacataaaaactatatgtaattttttaactatgaagtcttccttaaaaaatttaatgatttgttgcttatatataattaaaatattaattgttatatgaattttaattatttctattagttttcaagacctggaaacaaaaagaataacattaaaggtagaaaacatatattctaggacttttctctctttgtataagttaggagctcagagttcctggctcaaatatcttctttcagacacccaaggggataaaaatcatacatcctcttatatctttttaatatctataattctttctttgatattccctgccaaggaaacactgggcacactatgtcatgattgtattgcttctggtgctaaggtgagctctatcagcatcttccaaaaagcccacgttatctgaagtagtgtagtaaatgccttcctatactagttttactccttatttgccttttcaaaattgcccccaaattaattattaycacaaataaaattagtaaaaccacaacattcacaatatcaacaaaacaatagaatacttagaataaaatcaaaagaagttcaattttaaaatgggcaaaatatttgcatagacattctatgcaaatcataaagttcatatatgaataggaaatagaca

SEQ ID NO: 703755 - DNA, 1210 bp, Homo sapiens
tcaatagataattgatctagttaattgccaatcaatttgaatatttagtattcttacattatcacttttatacttttgggtgatattacattgtcttcccccaaaccagatataattgaaaacttacacaaaatcagatttttatgacattttacctatttttttttttkgggggatggagtttcgctcttgttgtccaggctggagtgcaatggcactatcttggctcactgcaacctctgcctcccgggttcaagtgattctcctgactcagcctccgagtagctgggattacagccatgcatcaccatgcctggctaattttgtatttttagtagagatggggtttctccatgttggtcaggctggtctcgagctcctgacctcaggtgatctgcctccctcagcctcccaaagtgctgggattacaggcttaagccaccgcacctggcccattttgcctaattttaactgtgctttttatacgaagttattccctccctttcaccccaattagccctactgagtagtgcctatacctggcctggggactcagtactacttgttagaaactatcttcctctactccttaaccttcttgcagatacttgggttgctgacggtatctcccatcccatctctccagaagttgtgaagccagatgaccagctagaaatgggattggtatcctgaatgatatggagatattttttggttggtccttcattacatcttaaaatatgctttaaaaaaggaagaatttaaaagaaatttacaaaagtttctgacaaaacatatacaaacatctttattgacaagtgagccaataagggcacatttagtttacagataaccaaaaacatttgaaatgcataacattaaaatttccaagattcatgttgcagtacaaacatgtggcaggttaaacatcaggcataaaaaggacaaatactgaaacgcaaagggccagagatcccaagtcgcttaacactatttaaaatgttattcaactgcaaacttcagcctctggaaccatcccagatagctactggttaagtgatacgaagtaggaaaaaagaaggttctggaaggtctcaaggaggctgtgcagaaaacagcaccagatggaagcaagagcagaaagaagtcacgtcccatctttatgacaagccacagaacaagatggtcacagttcttcatgggtaaacaa

SEQ ID NO: 703756 - DNA, 1210 bp, Homo sapiens
tcaatagataattgatctagttaattgccaatcaatttgaatatttagtattcttacattatcacttttatacttttgggtgatattacattgtcttcccccaaaccagatataattgaaaacttacacaaaatcagatttttatgacattttacctattttttttttttgggggatggagtttcgctcttgttgtccaggctggagtgcaatggcactatcttggctcactgcaacctctgcctcccgggttcaagtgattctcctgactcagcctccgagtagctgggattacagccrtgcatcaccatgcctggctaattttgtatttttagtagagatggggtttctccatgttggtcaggctggtctcgagctcctgacctcaggtgatctgcctccctcagcctcccaaagtgctgggattacaggcttaagccaccgcacctggcccattttgcctaattttaactgtgctttttatacgaagttattccctccctttcaccccaattagccctactgagtagtgcctatacctggcctggggactcagtactacttgttagaaactatcttcctctactccttaaccttcttgcagatacttgggttgctgacggtatctcccatcccatctctccagaagttgtgaagccagatgaccagctagaaatgggattggtatcctgaatgatatggagatattttttggttggtccttcattacatcttaaaatatgctttaaaaaaggaagaatttaaaagaaatttacaaaagtttctgacaaaacatatacaaacatctttattgacaagtgagccaataagggcacatttagtttacagataaccaaaaacatttgaaatgcataacattaaaatttccaagattcatgttgcagtacaaacatgtggcaggttaaacatcaggcataaaaaggacaaatactgaaacgcaaagggccagagatcccaagtcgcttaacactatttaaaatgttattcaactgcaaacttcagcctctggaaccatcccagatagctactggttaagtgatacgaagtaggaaaaaagaaggttctggaaggtctcaaggaggctgtgcagaaaacagcaccagatggaagcaagagcagaaagaagtcacgtcccatctttatgacaagccacagaacaagatggtcacagttcttcatgggtaaacaa

SEQ ID NO: 703757 - DNA, 2124 bp, Homo sapiens
ggacactgggtcacccttgtcactctctcccccctcgggacccatggccatcatcagagcatccacaggtgctccctaaactcagacctccccatccagggcattcctgggattgcagatggaagatagggggcagaaggttgagggttgggggcaaaaggcaaagggcaggtcccctccctagcaggggactcatctaggctgtaaagtgctagatctgtttggcagggctggattccacacacctgctcacctcctcttcccagcagccctccggagtgccatgactcgttcccactacagatggcggcaaggaggctccaaggacaaaccctgcctgaagtcacctagctgccacctggccaggcttctgccagccagacccccactgaccaggcccccactgaccaggccttcactgaccacgttcccactgaccccactgagcagaaccctgagccgcggtgmtcaatgtcccctgccaatgacccccctcagtccacagacctcccctccccacatcagcacccacaggccatcccctgggggtcttctcgggtcaaggcccccactccaggacacagggagggacagtcggcctcaggctctgggtgcccagcttcatgctcgcccccaaaagccctctgcgctcaaccttaaagggggcagtgaggtggcctggcactgcctggacatgatgtctcggcctattcctgagccgcagagccagaggaacggggggacgtttgtcagaccaggcaccccgttttgctgggtctcccagggttcttcctgcggaggctggatccagaggcgcagcaccgaggctgcagggtgaccggcccagaagcctcgagactgggctggggaccacatgagaactgtccccagatggccagaagaccctttgctaatttcctggtagctcatttcccaccagctacccttgccccaccaggaatccccttctggcagagtcaatgaggagaggaagatggtcacagaatccatggaaagaaagaaaacaaaatgacaatggaacatcatctatttcctgtccatctgaaaggaaagcctaaggaagcctattgggttccatcaccctgagggccccgaggatggcatcacacagtgcaatacccaatggcaggggcggtgctccatccctgcagacgtcatcgagggcacacctggggtcgtctagggtcatggacctggccacagagcagaaactgggtcaacaggagtgcacacacgcacacaggtgcacactcacacactggaataaaacgaatttcgtagcaagtggtcacgtgcgcgtgggagcgcgcgcgcacacacacacacacacacacacacacacacaccacttgttgctgatctgctgacttatctcactgccatgaaacagcagctaagcctgtaattgctctgcctttccttggatttttcctttagtttctctgactgctgggttactggcctgtgtttagcttcatgaacatgggtttcactttatttttatggggttccagctcttgctcatggaatccctccctgcctgttctgcagtcttcccttgtttactgcctgtggacttcaagtatcagacacagagaaagatttgtagatactgtttactcagcccccacaatttccatagcaggtctcttaattcccatcacctccagggagggtcattgctgggatcctaggaatcaagtgccttgtcttgatggccacagtggtaaccataatagtcaggttttccctctgtgcaattctggaacataaaaatcttctctggtaacaagactacagaaagcaatgaaagcaacactaaactgggagtttgctggcctgtgtttctaagaaatttaatgtttttacataaacaatgaagaagaaatgacttttctaaagttcctgtcatttatgccatggattggactcttctgtgaaagcagtttcattgatggatgtggataattagcttaacttcaagtaaaagattagagagcaaattgtaaacataactgtgcttttttacactcaaatgacattaatcagacagttttggatctctagaaatatatattagaacatgtaagttctatattgaaa

SEQ ID NO: 703758 - DNA, 1443 bp, Homo sapiens
aaatacaaaattagctgggcgtggtggcgcatgcctttaatcccagctactcaggaggctgaggcaggagaatcgcttgaaccyaggaggcagaggttgtggtgagccaagatcacgccattgcactccagcctgggcgggaagaataaaactccatctcaaaaaacaaacaaacaaacaaacaaaattagccaggtgtggtggcacatgtctgtagtcccagctactcgggaggctgaggcaggagaatcgcttgagactgggaggcggaggttgcagtgagctgagatcgtgccattgcactccagcctgggcgacagagcaagactccgtatcaaagaaaaacaaaaacaaacaaacaaacaaacaaaacacaaggaagtcttattctctgtctcaaggccaacaccctctcctgtacaatgctcaccttctcagtggtggccatatcaaagcacagccacagatggctacctattctggcttctcagagaggtccacaggccctgccccagtctgccctgcagcatttttggggttggaggttatagcctggtaaaagccacactgggaatctgattgtgccaaagcttgctgtggggcctggggcaagtcactcatgccaccaatggccctcggtttcctcatctgtggaatgaggaagttaatccagtgctgaggtctccccaaacactctgttctgtacttggctcctggttcttggatgtctagaaggtaaagtctcttgagagatgcctgggtgaatcacagacgtgagtggtggacaggggtggcaggaaatagtgggaaattgtgctaagcaaggtcgccggccatttctattacatgcttccagttcaactatttgtgactttctgaaaagtttatggtttggggattttttttatttggtcattttttccatatttggtcatggcctagagcagtgatttttggaaagatagagtaaaaaaccccttcagctgtttgtaagcattgcaaacacccacaaaaaatatcctttttccatttagaagaaataacaacatagttatgttttccttttcagctcaaataactcccaaacaactccaaagacttcaaacttggctggtaattaatccttaacaaaggggactggacagtatgtgctctgcaaagtttggaaaagagagatttcaaatcaaaaagtattgatgcttgaaaaagctcgccattttttcctgtttgctggccctagctccccacagcagcccattcccaggaaacccagagtctcaagctatagctcatgtgagaatgaactgagagcaaggtgaacacatcttctgcttgaagatactggttgttttctttcctacgctagtggtctttgcctatttcacaggctgtaagactgaggctgagcaaagttgtagtcaggccttgcattgctttgtaaga

SEQ ID NO: 703759 - DNA, 2031 bp, Homo sapiens
ttttgtttttttttttatgttgagatgaagttttgctcttgttgccccgactggagtgcagtggtgtgatctctgctcactgcaagctctgcctcctgggttcaagaaattctcctacctcagcctcccgagtagctggaattacaggcacctgccaccatacctggctaattttttgtatttttagtagagatggagttttgccatgttggccatgttggtctcgaactcctgacctcaagtgagccacccgcttctgcctcccaaagtactgggattacwggcgtgagtcactgtgcccggccaagattctgttttgatagaacacttgtgtctctctcaccttgtatttagaaaagttagaaagtaaaggataatgtatatagaaagctttttgaagactcttaagaagttcataaatatggggcactgtgactatgcatatgaaaatatttcctatcagttggcagttaccacctcttatagtggcatggaacctcttgagttaaaccaaggctcagtgagatttggtgatttaggtagtgtcattttatgaacaagggggaccctactcaggtcttttattttattatacttctctttgacattcactccagttaaagaactctttcaaaagacctcatgcctggtctcacggagattcaaaggtgtttgagtccttccttattatgcccttggaagatgctttgaggaccccagtgatgaatcccaagaactctgtctccattatccctggtatagggcacctcatcactctggtgttatccctgaagggccttcataataatgtgcttaaagagtcccctattatgtccttcaggatggagcttgacttgcccaaattgctatgtacatattaaagagaggctggaactgaagttggtcatttctcactggatcagtcaacaagatttgagtactttctgtgtgctctgcatcattctgagtactctgggggacagaataaggcatggctcctgccttcaaggagtatggaatttaatagaagatgacaacatacatgattgtaaatctatctacatgagagtgcctaattgtgagattcctaataaacggcaagatatgttctgaaaatctgaaacataaatgaggttgaagaaattgtgaaaagtttagcagaggaggaataattcgtcaggttctttaaacacaagtaaaggggaaaggaaggaccatttttaagtttagatattccaagcgttagtggtgaggttgattatggtatgtcttctcgttgatgagggaggagactggtgaatagtggaaaataaagttaaatagctagggtggggccaaattctgggttttaataaaagccaggcatagaaatttagattggggtggtagaaaaaggaaggctttaatagtttttgatccaatgaatgacatcatacaagttctatataaagagcagtgatttcaggatgggagagaatggcatcaggaagacccacttgaatgctggtaagtaatgttactaacagtgccattagtaacattaatgttactagggcctggactgatatgctgatggaagtgagaatgaagaataaggtgggatgaaagagattttgacaagagttttttaatgaacctgaaacgggaaagggcgagattaactaagcctgtttgccatggacagcaatggggttgctagaagattagctgtgcggaaaaattatgcatttacctttgggcataataaaatgcaattgactctccatattcatgggttctgcatccactgattcaaacaactgtggaacaaaattgtcagaaaaaacaatacagtgataaaaaatgatacaaataaaaaacaacatggtataccaactatttacatagcatttacatcgtattaattgttattaagtaatctagagatgatttaaagtatataggaggatgtgtgtaggttatatgcaaatactacactattttataccagtaacttgagcatccatggattttggcatacaagggggatcc

SEQ ID NO: 703760 - DNA, 2031 bp, Homo sapiens
ttttgtttttttttttatgttgagatgaagttttgctcttgttgccccgactggagtgcagtggtgtgatctctgctcactgcaagctctgcctcctgggttcaagaaattctcctacctcagcctcccgagtagctggaattacaggcacctgccaccatacctggctaattttttgtatttttagtagagatggagttttgccatgttggccatgttggtctcgaactcctgacctcaagtgagccacccgcttctgcctcccaaagtactgggattactggcgtgagtcactgtgcccggccaagattctgttttgatagaacacttgtgtctctctcaccttgtatttagaaaagttagaaagtaaaggataaygtatatagaaagctttttgaagactcttaagaagttcataaatatggggcactgtgactatgcatatgaaaatatttcctatcagttggcagttaccacctcttatagtggcatggaacctcttgagttaaaccaaggctcagtgagatttggtgatttaggtagtgtcattttatgaacaagggggaccctactcaggtcttttattttattatacttctctttgacattcactccagttaaagaactctttcaaaagacctcatgcctggtctcacggagattcaaaggtgtttgagtccttccttattatgcccttggaagatgctttgaggaccccagtgatgaatcccaagaactctgtctccattatccctggtatagggcacctcatcactctggtgttatccctgaagggccttcataataatgtgcttaaagagtcccctattatgtccttcaggatggagcttgacttgcccaaattgctatgtacatattaaagagaggctggaactgaagttggtcatttctcactggatcagtcaacaagatttgagtactttctgtgtgctctgcatcattctgagtactctgggggacagaataaggcatggctcctgccttcaaggagtatggaatttaatagaagatgacaacatacatgattgtaaatctatctacatgagagtgcctaattgtgagattcctaataaacggcaagatatgttctgaaaatctgaaacataaatgaggttgaagaaattgtgaaaagtttagcagaggaggaataattcgtcaggttctttaaacacaagtaaaggggaaaggaaggaccatttttaagtttagatattccaagcgttagtggtgaggttgattatggtatgtcttctcgttgatgagggaggagactggtgaatagtggaaaataaagttaaatagctagggtggggccaaattctgggttttaataaaagccaggcatagaaatttagattggggtggtagaaaaaggaaggctttaatagtttttgatccaatgaatgacatcatacaagttctatataaagagcagtgatttcaggatgggagagaatggcatcaggaagacccacttgaatgctggtaagtaatgttactaacagtgccattagtaacattaatgttactagggcctggactgatatgctgatggaagtgagaatgaagaataaggtgggatgaaagagattttgacaagagttttttaatgaacctgaaacgggaaagggcgagattaactaagcctgtttgccatggacagcaatggggttgctagaagattagctgtgcggaaaaattatgcatttacctttgggcataataaaatgcaattgactctccatattcatgggttctgcatccactgattcaaacaactgtggaacaaaattgtcagaaaaaacaatacagtgataaaaaatgatacaaataaaaaacaacatggtataccaactatttacatagcatttacatcgtattaattgttattaagtaatctagagatgatttaaagtatataggaggatgtgtgtaggttatatgcaaatactacactattttataccagtaacttgagcatccatggattttggcatacaagggggatcc

SEQ ID NO: 703761 - DNA, 2031 bp, Homo sapiens
ttttgtttttttttttatgttgagatgaagttttgctcttgttgccccgactggagtgcagtggtgtgatctctgctcactgcaagctctgcctcctgggttcaagaaattctcctacctcagcctcccgagtagctggaattacaggcacctgccaccatacctggctaattttttgtatttttagtagagatggagttttgccatgttggccatgttggtctcgaactcctgacctcaagtgagccacccgcttctgcctcccaaagtactgggattactggcgtgagtcactgtgcccggccaagattctgttttgatagaacacttgtgtctctctcaccttgtatttagaaaagttagaaagtaaaggataatgtatatagaaagctttttgaagactcttaagaagttcataaatatggggcactrtgactatgcatatgaaaatatttcctatcagttggcagttaccacctcttatagtggcatggaacctcttgagttaaaccaaggctcagtgagatttggtgatttaggtagtgtcattttatgaacaagggggaccctactcaggtcttttattttattatacttctctttgacattcactccagttaaagaactctttcaaaagacctcatgcctggtctcacggagattcaaaggtgtttgagtccttccttattatgcccttggaagatgctttgaggaccccagtgatgaatcccaagaactctgtctccattatccctggtatagggcacctcatcactctggtgttatccctgaagggccttcataataatgtgcttaaagagtcccctattatgtccttcaggatggagcttgacttgcccaaattgctatgtacatattaaagagaggctggaactgaagttggtcatttctcactggatcagtcaacaagatttgagtactttctgtgtgctctgcatcattctgagtactctgggggacagaataaggcatggctcctgccttcaaggagtatggaatttaatagaagatgacaacatacatgattgtaaatctatctacatgagagtgcctaattgtgagattcctaataaacggcaagatatgttctgaaaatctgaaacataaatgaggttgaagaaattgtgaaaagtttagcagaggaggaataattcgtcaggttctttaaacacaagtaaaggggaaaggaaggaccatttttaagtttagatattccaagcgttagtggtgaggttgattatggtatgtcttctcgttgatgagggaggagactggtgaatagtggaaaataaagttaaatagctagggtggggccaaattctgggttttaataaaagccaggcatagaaatttagattggggtggtagaaaaaggaaggctttaatagtttttgatccaatgaatgacatcatacaagttctatataaagagcagtgatttcaggatgggagagaatggcatcaggaagacccacttgaatgctggtaagtaatgttactaacagtgccattagtaacattaatgttactagggcctggactgatatgctgatggaagtgagaatgaagaataaggtgggatgaaagagattttgacaagagttttttaatgaacctgaaacgggaaagggcgagattaactaagcctgtttgccatggacagcaatggggttgctagaagattagctgtgcggaaaaattatgcatttacctttgggcataataaaatgcaattgactctccatattcatgggttctgcatccactgattcaaacaactgtggaacaaaattgtcagaaaaaacaatacagtgataaaaaatgatacaaataaaaaacaacatggtataccaactatttacatagcatttacatcgtattaattgttattaagtaatctagagatgatttaaagtatataggaggatgtgtgtaggttatatgcaaatactacactattttataccagtaacttgagcatccatggattttggcatacaagggggatcc

SEQ ID NO: 703762 - DNA, 657 bp, Homo sapiens
tttgtcaaagatgagatggttctagatgtgtggcattatttctgaggcctccattctgttccattggtctgtatatctgttttggtaccagyaccatgttgtattggttactgtagccttgtagaaaacttttaaaacaaaaacaatttattctccctcccccgagaaattaagcaaaagtgatcattgctgttcacatacacacacacacacacacacacacacacacacacacacacacacctggtctttatattcacacacacatataattttccatattatggcttcacattccttatagttatcgtttaatatgagttaattccaagggctgaaatctattctattccttctgttttctctcatgaagccaggaaatacctatcactatgtttaagttacaattgacagataattatcaaagtctcagtttgtataaagcactctactagaaattcagattccaaaatgtgtaaatgaaatgacccttcttcttggacctcacatggaatgagttgtctgacacatgatttgatagaacaaaatactggaaaatgtgattgacctgaaaaccatataaattaccacaatcaactcatcacaaggcatctgttctataagctcccatagtccaattggcaagatgaaatacat

SEQ ID NO: 703763 - DNA, 1017 bp, Homo sapiens
tcgcacttcatgcagcccttgaccctggtggcactaaccccccactcctgatttctgaaccctctgtttctggggacactgctttgttgaattgtcctcccrtttccctgccctttctcagatctctgtggccacttgcccctcaatgtcagctgtcacggtggttttgttgttggccccttctccttcttacagacacactcccctggggtgaagctgtcccctcccatggcttcaacaccagctctgcccctgcccagttttcctctgagctccagaccacctgcctgctggctaccccctttggataatccatgggatcctaaaaccagatgtggctggaaggggactcaggctagcaaatcatttttaaaaataaccaaactcaccatcttttcctcccccttcctccctccaaagctccccccaaccctctatgtcagctggtaataccagccaccacaccaaatgcctggcgatcacaactgactcgttcctctcctctccttcaaccctcacttccagccatcacctagaatcaccagttgttaacattttgcacacttgctttctctcacaccctctactgtgtatatgtaccttaaccctaaccatatatatgtacacacacacacacatacacacacacaaatatatatacacatgcaacctcactcccgtcatgagaaaccctcagacaaataaaaatcgagggacattctctaagatctatatgctatatgctacaaggtccgttctacatgcttcagaaatgtcaagggcataaaaggtctaaagagataccacagataaatgctatctggattgaatcctggatcagaaaaaaaatgctatcaaggatagtatgaagtttgttttaaacttgaccgccactctcccaactggcacagcccttgttcagaccacttgccccacagctgtacccctcattggccgtgtttctccaggctcaccctccagctctccactctccacaacagtgcacaccagatccag

SEQ ID NO: 703764 - DNA, 1376 bp, Homo sapiens
gtgctttttgatattaataccagaataatagactaagcatttccaagcatatgttttcttaagtggtgagaaattggctttttaaaaatttggaagaccttttttcctatgtaagaacatgtggttttgtttttagtttagataattgatgtcttcttaaaagttggggatatttatacaaagaacatttaaggagcaactttcatatactgggcactatacttcctcagtgatacaaagattaatactgtaggatttttgcctctaagcgattcacatcctagggagaatttcacattatatgcttttattgatttaaatttttagaaatggaaataactccataattatgataaaaattatcttattaggttggttgcaaacagacaagaagagaaattagaataaagctagtccttgctaatacttaccattattgtatctacttagaagtttatgtttattgtaaataaataaataacttgttctcacctgtagacatgtttctagctataactgattcaaccatttatatttctttgttttccttttttgttttgctttgaaattttaagccataagtaggtggtcaggcaggagggtgttcacagcagtgcattttatacctcacagtgctgctttaattgtttcattacatgtgtttgaggctgtcaaggaaagtggtacgttaggtcaaggactccataattttgtataatatgacatatagatgatataaatataatctactttgctcagaaaagtttgccaatgacaatcatcatgatttgtagttgctgctaatatatctgtgattcttttacattaatgctgagtgttctaaagcagtgtttagttaagctccatcacatttttttctttttttgttttttttagacagatagtcttgctctgtcacccaggctggagtgcagtggcacagtcttggctcacggcaacatctgcctcctgaattcaaatgattcttgtctcagcctctggagtagctgggactacaggcgcatgccaccatgaccagctaatttttgtatttttagtagacgtggggtttcgccctgttggccaggttggtctcaaacttctgacctcaagtgatctgcctggtcggccacccaaagtgctgggattacaggtgtgagccaccgcgcccggccaagctccattacatttgttcaacatttgttgaatgcttcctctggcagatcttcttggcaaaatacctgttctaaaggagagattgcaaaagaaaacagtgaacaaatagtcaattaggtaatgggagatwaaaaaaattgctatggaattgaaaagaaggtgagcttttcaattttatttgattagaatccagaagggct

SEQ ID NO: 703765 - DNA, 1785 bp, Homo sapiens
  misc_feature 550, 551, 552, 553, 554, 555, 556, 557, 558, 559, 560, 561,562, 563, 564, 565, 566, 567, 568, 569, 570, 571, 572, 573,574, 575, 576, 577, 578, 579, 580, 581, 582, 583, 584, 585,586, 587, 588, 589, 590, 591, 592, 593, 594, 595, 596: n = A,T,C or G
  misc_feature 597, 598, 599, 600, 601, 602, 603, 604, 605, 606, 607, 608,609, 610, 611, 612, 613, 614, 615, 616, 617, 618, 619, 620,621, 622, 623, 624, 625, 626, 627, 628, 629, 630, 631, 632,633, 634, 635, 636, 637, 638, 639, 640, 641, 642, 643: n = A,T,C or G
  misc_feature 644, 645, 646, 647, 648, 649: n = A,T,C or G
tcagcagtaccaccttccaatgtgacacccatgcgtgtaggacatggccatgctcttccctctcacaataccaaagtgataagctgagccagtgcctactatgaaggctgggctctgccacagtgactccctattcctttcttcttactggagatttgggactctgttttccacacactaggggtcaactggttataagatgcagagtgagagagttggagagaccctgcttccttcttgagtctgggcctgtgcttcaacccagcttggcctgagatctctgcattgagggtcatgggaatgtggcccgtgaattatattcagggtccttgtgtgcgtgtctccttcagagaaaaccctgggaagagacagagcagcagtgtagggtaaaagtggggcatgtgtgtgtcctctggaaagatactagccccacactgtcagattctcaccagtatatacatgtggatgtctctcactcgattatagatgggatagatggtgacgcgaatggcacgactcacactggagcatcacatggaacgattgcctnnnnnnnnnnnnnnnnnnnnnnnnnnnnnnnnnnnnnnnnnnnnnnnnnnnnnnnnnnnnnnnnnnnnnnnnnnnnnnnnnnnnnnnnnnnnnnnnnnnnagaggagtcactggcaggtgggtaccaaggagagcatatgagacaaacccccagaccaaaaggagactgggcrtcgctactgtccatggaggtcaggaagatgggcagaccttcatgtggttccttctggtgagagggcatggctatgggtgtgggttgctccactgcagtgaagatgagggatatggtttggacctgtgtctctgccaaaatctcatgtccagttgtaatccccaatgttggaggttgggcctgataggaggtgattggatgatgggggtggtttctaatggtttagcatcatttccctagtgctgttatcaggatagagctctcatgagagctggttgtttaacagtgtgtagcatctcctcctgactctcttctttctgccccacccatgtgaagttctccctccccctgtgaagtgctccttcttcctttgccttccgctagatatgcaagtttcctgaggccttgcagaagccgagcagatgccaaaatcaggcttcctgtacagcttgcagaactgtgagccaattaaaccttttttctttataaattacccagtctcaggtatttctttacagcaatgcaagaaaggaatagtacaatgaagttacttgggtattttgggccgagagtttccaggacatgggaaatggcagctgggtcccaggaaaggagagtgcagctggacaaagggacttcagagactcgctggaataaatggaaggaagggagttgaagttggggcctatgcccagcttttgtgtgttttttcttcacaaatttatggtgtggaatgtgtcatgtcctgcctggaaccctatttgtccagcctctgatacagggagccaatacaaaggagatagctactcaggaaaaagggacagggaagaggcccctcattagtttggctgcttccccaaacaggagactgtcagaaacttccctcctttgggtctccccccaggccctggtggaatgggagtgtggcaggaagtgggagcccatgatctgggccgaggtctcccaggccacagaggagaaaagggagggagtcagttctgttctgtgcgatctggcaggaagggtcagggaacttttctggggcagcatttctgaaatcgggc

SEQ ID NO: 703766 - DNA, 1785 bp, Homo sapiens
  misc_feature 550, 551, 552, 553, 554, 555, 556, 557, 558, 559, 560, 561,562, 563, 564, 565, 566, 567, 568, 569, 570, 571, 572, 573,574, 575, 576, 577, 578, 579, 580, 581, 582, 583, 584, 585,586, 587, 588, 589, 590, 591, 592, 593, 594, 595, 596: n = A,T,C or G
  misc_feature 597, 598, 599, 600, 601, 602, 603, 604, 605, 606, 607, 608,609, 610, 611, 612, 613, 614, 615, 616, 617, 618, 619, 620,621, 622, 623, 624, 625, 626, 627, 628, 629, 630, 631, 632,633, 634, 635, 636, 637, 638, 639, 640, 641, 642, 643: n = A,T,C or G
  misc_feature 644, 645, 646, 647, 648, 649: n = A,T,C or G
tcagcagtaccaccttccaatgtgacacccatgcgtgtaggacatggccatgctcttccctctcacaataccaaagtgataagctgagccagtgcctactatgaaggctgggctctgccacagtgactccctattcctttcttcttactggagatttgggactctgttttccacacactaggggtcaactggttataagatgcagagtgagagagttggagagaccctgcttccttcttgagtctgggcctgtgcttcaacccagcttggcctgagatctctgcattgagggtcatgggaatgtggcccgtgaattatattcagggtccttgtgtgcgtgtctccttcagagaaaaccctgggaagagacagagcagcagtgtagggtaaaagtggggcatgtgtgtgtcctctggaaagatactagccccacactgtcagattctcaccagtatatacatgtggatgtctctcactcgattatagatgggatagatggtgacgcgaatggcacgactcacactggagcatcacatggaacgattgcctnnnnnnnnnnnnnnnnnnnnnnnnnnnnnnnnnnnnnnnnnnnnnnnnnnnnnnnnnnnnnnnnnnnnnnnnnnnnnnnnnnnnnnnnnnnnnnnnnnnnagaggagtcactggcaggtgggtaccaaggagagcatatgagacaaacccccagaccaaaaggagactgggcatcgctactgtccatggaggtcaggaagatgggcagaccttcatgtggttccttctggtgagagggcatggctatgggtgtgggttgctccactgcagtgaagatgagggatatggtttggacctgtgtctctgccaaaatctcatgtccagttgtaatccccaatgttggaggttgggcctgataggaggtgattggatgatgggggtggtttctaatggtttagcatcatttccctagtgctgttatcaggatagagctctcatgagagctggttgtttaacagtgtgtagcatctcctcctgactctcttctttctgccccacccatgtgaagttctccctccccctgtgaagtgctccttcttcctttgccttccgctagatatgcaagtttcctgaggccttgcagaagccgagcagatgccaaaatcaggcttcctgtacagcttgcagaactgtgagccaattaaaccttttttctttataaattacccagtctcaggtatttctttacagcaatgcaagaaaggaatagtacaatgaagttacttgggtattttgggccgagagtttccaggacatgggaaatggcagctgggtcccaggaaaggagagtgcagctggacaaagggacttcagagactcgctggaataaatggaaggaagggagttgaagttggggcctatgyccagcttttgtgtgttttttcttcacaaatttatggtgtggaatgtgtcatgtcctgcctggaaccctatttgtccagcctctgatacagggagccaatacaaaggagatagctactcaggaaaaagggacagggaagaggcccctcattagtttggctgcttccccaaacaggagactgtcagaaacttccctcctttgggtctccccccaggccctggtggaatgggagtgtggcaggaagtgggagcccatgatctgggccgaggtctcccaggccacagaggagaaaagggagggagtcagttctgttctgtgcgatctggcaggaagggtcagggaacttttctggggcagcatttctgaaatcgggc

SEQ ID NO: 703767 - DNA, 1112 bp, Homo sapiens
tttyttttttttttttttgtcttcaaggtacgtgttactatgtgtaggaagagacttttccccctacatatcagtgttttacattactatgcattattatttactaaaaagcaggtaagtatctgagaattgaaatattcctttgtccattcattggccagttattatgcacttgttctgttgtgggaactaaatcatgatgttcccctttcccaaggagcatacaattttaataggaaaaatgagacttatgtcagcaaactacaataaagggaaatatgtaataagtgaagaagtctttcgaaacataaagagaagtgaaaaataccacaattactgtgtatacataaagtgttttcacatttcctaactctggcttatggataggaagggtgaattctattaacctcaactggaaattttctggcacagaaaaggtgaattattcgccataatattcctatggataggagcatagcctagattagaatcaaagcttcctaattcttattcctgattcttctaaatcaaagcatatactcactcctaaatttcaaaggattctcttgaactgtaaacttttccatttgctcaataaaaagttactaagagcccactatgtgcctagcacagtgctaggtggttaaccaataaatgtgaagtaatgcttacattattcttttattcaggtattttattgcaaactgttggaagaagcaaaccgaggctcgtttccagcagagatggtgaataaaatcttttctaatatttcatcaataaatgccttccatagtaaattcctcttgccagagctggagaaacgaatgcaagaatggtaagaggagtagatagaaaatgatatgtttaaggcagtcatgctgtatttttcagcttttaaattgaaatagaaatgccacacacaactgtaactagacatttatgctaaatttttacattaaagactactgatagaagttgtggtacaaaggacttcatgtctgctctccaaactatcatttagctagtgaagacaagatatcgggtaatgtggagcttcaagaattccggagcatctctctttgctatggcattctgatagcccctttaaaaag

SEQ ID NO: 703768 - DNA, 585 bp, Homo sapiens
cacatacacgaaaacagcacacgctcacggccaacacgcatggcacatgcaactggcacctgcacattgcacagatggcacacatgcacatggtacatgcaaacagcacatgcaaacggcacacgtgcggcacacgcaaatagcacactcgcacttgggacacgcaaacggcacaagcatggcacttgtacagaaggcaacacccggagggagccctgccctggggcccacgcagacccaggcagttctcccggcccatactgcagtcggcagcctttgccggcaccatatgcagctcccacagaccctsaggtgggggtgacatccaggaagactctgctgaattgcatcccctttctgtccaggccactgttgtggctgggagtggcccccacctccacgcacacatcccacgcaggcctctcctcttttgcatggagaggcggatgtctgccctcccaaccgtcctcccaacccagcctcttggttctgggtgactctgtgtctctcttgtctcacctgtacaacaggcatagtgatgggacctctctgggagaatgggcacacagcagccctgcccccaag

SEQ ID NO: 703769 - DNA, 665 bp, Homo sapiens
tcattcagcataatatttgcaaggttcctccacgttgtagcatgtggcaggatgtccttctgtttctaaggctgaataatattccattgtacgtatatgccacattctctttaacttttcatgtgttcacagacatttgggctccttctacctcttgccagttgggagtaatactacagtgaacatgagtgtacaaatatctcgtcaagatcctgctttcagttcttttggatatatactcaaaagtggaattgctggatcatatggtaattctatttttagttttttgaagaatcatgttaacttttaaacaaatagccccattctcacggactgtagtgcaatatgtgaagargtggcatattgccttccctctaattaaattgaaaatagcaatcatgctcatatataaccattaaaatatgtttaaacttcttacttaagatgcatcaattacactgctggcaactgtagacgctttcatttcctcccagtctcagtcaacaagctgttctttacttttatcaacgccctcccccagtatcagggtcactagagcagaagattcctgatggaaggacctgtgttgttcaaactgtgccccaagtaactagcacagtagttggcatagaataagcactcaaaaagaatggatacatgaacca

SEQ ID NO: 703770 - DNA, 2059 bp, Homo sapiens
  misc_feature 1801: n = A,T,C or G
cacagaaaaataaccgaacacagagaatcacagctagtctctttgaataaacagataattttaggcgatacatcgacaaatacttttgagtacttatatgcaaacattcttcccagcatggagtctatcatctaattggagaaatgacagatagactggaatagtttaaatactagtcagtatacgaagtcagaggatcacatgacacacattttacataaagcagcagtttaaaacctcttcatggcagactggcattcactacttcaaactcaatattttgtgggtttccattttgtgggaaatatggaattctagttacatctcgattttaagagaaatttggaaaatgaaatagcctaaaactatatagctcaccctaaatacggttttaaaaattcttatttctggcaatgacttctcattttsttaatttttatggcacaatataaaagaataaaaacatgaagggactccttctgtaatccaccttccctgagaggtggttgaaggaacttgggtcatatttatagaatgtcaggcttaaaagaaagttaagtaactttctttgcaaatgtctgttgagttctttccaagtacatctattgagactgttctcgaatttgatttgtggaggaactgcatggagagctatggccttccctggattccctctggcctttgcagctattagccattggtaaccaggggatttcattaattcaggacgttctgtgggtggcaggcacaggttacagttttaaaatgcccgtccctctatgagaatgaatagtcaatattattagggacatctgtgagcaagtagggtagcctctgcctaaccagatgtgtggattaacaaatcaggatactggttctttcttagggctggattaatccatttttgctgaatctacttcttgctcccagacactgcctggcatggctgagacgtcatttctccctgttgttttctgctgatcctgagtcaaagggtatcattctctttttattaaaagactgctgaagagccattaaaaagcagacactatgcacagacgtgtgtatttgtgtgtgtatctttatatatctttaatgttatcacagagttaatcactaaacatgtagtgccttgggggaaagcataaacaattgatgttggtaataaagatataaagatattgacttaaatacattttcggttttaaaaaaatcagaaaacatgattagaaatcaaaccaaatagaaataagattcttaaaactctggaatcacatgatcccaattatttttctgtatattatctttcacataatggcactgcctttgagcctgaatgccagtgacagtatagacagactcaactgtttgaaccctgttcttgacttgaagtctatccattgttagcttttctttcccggcctcttatctggaagcgttcttgcttgattctttaaataattatttattgaatgccaaatattatgctaggactcagcgaggaggcagagagagaataagccattgtcctagccttgaggaggaattagcctactgatatacatttcatataattagcagtatgaatctacattattaatagtaagagtgctaatactgctataaattttgtattacattttatactgcaagaagcatactatcttccagatacatttatctatcggttttagccttgaatgtaaaaggtcaaaagacatgttattggccaggcatgctggtatacgcctataatcccggaactttgggaagccgaggagggagaaatacttgaggccanaagtttgagaccaacctgggcaacaggatgaaactccgtctctacaaaaaacaacgacaaaaattagccgggtgtggtggtgcatgcctgcagtcccagctactcaggaggctaaggtgaaagggtcgattgtgcccaggagatcaaggctgcagtgagctatgatgaccccactgcactccagcctgagcaacagagcaagacactatttcaaaaagaaaaataataataataataataataatactatgagtttct

SEQ ID NO: 703771 - DNA, 2059 bp, Homo sapiens
  misc_feature 1801: n = A,T,C or G
cacagaaaaataaccgaacacagagaatcacagctagtctctttgaataaacagataattttaggcgatacatcgacaaatacttttgagtacttatatgcaaacattcttcccagcatggagtctatcatctaattggagaaatgacagatagactggaatagtttaaatactagtcagtatacgaagtcagaggatcacatgacacacattttacataaagcagcagtttaaaacctcttcatggcagactggcattcactacttcaaactcaatattttgtgggtttccattttgtgggaaatatggaattctagttacatctcgattttaagagaaatttggaaaatgaaatagcctaaaactatatagctcaccctaaatacggttttaaaaattcttatttctggcaatgacttctcattttgttaatttttatggcacaatataaaagaataaaaacatgaagggactccttctgtaatccaccttccctgagaggtggttgaaggaacttgggtcatatttatagaatgtcaggcttaaaagaaagttaagtaactttctttgcaaatgtctgttgagttctttccaagtacatctattgagactgttctcgaatttgatttgtggaggaactgcatggagagctatggccttccctggattccctctggcctttgcagctattagccattggtaaccaggggatttcattaattcaggacgttctgtgggtggcaggcacaggttacagttttaaaatgcccgtccctctatgagaatgaatagtcaatattattagggacatctgtgagcaagtagggtagcctctgcctaaccagatgtgtggattaacaaatcaggatactggttctttcttagggctggattaatccatttttgctgaatctacttcttgctcccagacactgcctggcatggctgagacgtcatttctccctgttgttttcygctgatcctgagtcaaagggtatcattctctttttattaaaagactgctgaagagccattaaaaagcagacactatgcacagacgtgtgtatttgtgtgtgtatctttatatatctttaatgttatcacagagttaatcactaaacatgtagtgccttgggggaaagcataaacaattgatgttggtaataaagatataaagatattgacttaaatacattttcggttttaaaaaaatcagaaaacatgattagaaatcaaaccaaatagaaataagattcttaaaactctggaatcacatgatcccaattatttttctgtatattatctttcacataatggcactgcctttgagcctgaatgccagtgacagtatagacagactcaactgtttgaaccctgttcttgacttgaagtctatccattgttagcttttctttcccggcctcttatctggaagcgttcttgcttgattctttaaataattatttattgaatgccaaatattatgctaggactcagcgaggaggcagagagagaataagccattgtcctagccttgaggaggaattagcctactgatatacatttcatataattagcagtatgaatctacattattaatagtaagagtgctaatactgctataaattttgtattacattttatactgcaagaagcatactatcttccagatacatttatctatcggttttagccttgaatgtaaaaggtcaaaagacatgttattggccaggcatgctggtatacgcctataatcccggaactttgggaagccgaggagggagaaatacttgaggccanaagtttgagaccaacctgggcaacaggatgaaactccgtctctacaaaaaacaacgacaaaaattagccgggtgtggtggtgcatgcctgcagtcccagctactcaggaggctaaggtgaaagggtcgattgtgcccaggagatcaaggctgcagtgagctatgatgaccccactgcactccagcctgagcaacagagcaagacactatttcaaaaagaaaaataataataataataataataatactatgagtttct

SEQ ID NO: 703772 - DNA, 2059 bp, Homo sapiens
  misc_feature 1801: n = A,T,C or G
cacagaaaaataaccgaacacagagaatcacagctagtctctttgaataaacagataattttaggcgatacatcgacaaatacttttgagtacttatatgcaaacattcttcccagcatggagtctatcatctaattggagaaatgacagatagactggaatagtttaaatactagtcagtatacgaagtcagaggatcacatgacacacattttacataaagcagcagtttaaaacctcttcatggcagactggcattcactacttcaaactcaatattttgtgggtttccattttgtgggaaatatggaattctagttacatctcgattttaagagaaatttggaaaatgaaatagcctaaaactatatagctcaccctaaatacggttttaaaaattcttatttctggcaatgacttctcattttgttaatttttatggcacaatataaaagaataaaaacatgaagggactccttctgtaatccaccttccctgagaggtggttgaaggaacttgggtcatatttatagaatgtcaggcttaaaagaaagttaagtaactttctttgcaaatgtctgttgagttctttccaagtacatctattgagactgttctcgaatttgatttgtggaggaactgcatggagagctatggccttccctggattccctctggcctttgcagctattagccattggtaaccaggggatttcattaattcaggacgttctgtgggtggcaggcacaggttacagttttaaaatgcccgtccctctatgagaatgaatagtcaatattattagggacatctgtgagcaagtagggtagcctctgcctaaccagatgtgtggattaacaaatcaggatactggttctttcttagggctggattaatccatttttgctgaatctacttcttgctcccagacactgcctggcatggctgagacgtcatttctccctgttgttttctgctgatcctgagtcaaagggtatcattctctttttattaaaagactgctgragagccattaaaaagcagacactatgcacagacgtgtgtatttgtgtgtgtatctttatatatctttaatgttatcacagagttaatcactaaacatgtagtgccttgggggaaagcataaacaattgatgttggtaataaagatataaagatattgacttaaatacattttcggttttaaaaaaatcagaaaacatgattagaaatcaaaccaaatagaaataagattcttaaaactctggaatcacatgatcccaattatttttctgtatattatctttcacataatggcactgcctttgagcctgaatgccagtgacagtatagacagactcaactgtttgaaccctgttcttgacttgaagtctatccattgttagcttttctttcccggcctcttatctggaagcgttcttgcttgattctttaaataattatttattgaatgccaaatattatgctaggactcagcgaggaggcagagagagaataagccattgtcctagccttgaggaggaattagcctactgatatacatttcatataattagcagtatgaatctacattattaatagtaagagtgctaatactgctataaattttgtattacattttatactgcaagaagcatactatcttccagatacatttatctatcggttttagccttgaatgtaaaaggtcaaaagacatgttattggccaggcatgctggtatacgcctataatcccggaactttgggaagccgaggagggagaaatacttgaggccanaagtttgagaccaacctgggcaacaggatgaaactccgtctctacaaaaaacaacgacaaaaattagccgggtgtggtggtgcatgcctgcagtcccagctactcaggaggctaaggtgaaagggtcgattgtgcccaggagatcaaggctgcagtgagctatgatgaccccactgcactccagcctgagcaacagagcaagacactatttcaaaaagaaaaataataataataataataataatactatgagtttct

SEQ ID NO: 703773 - DNA, 2059 bp, Homo sapiens
  misc_feature 1801: n = A,T,C or G
cacagaaaaataaccgaacacagagaatcacagctagtctctttgaataaacagataattttaggcgatacatcgacaaatacttttgagtacttatatgcaaacattcttcccagcatggagtctatcatctaattggagaaatgacagatagactggaatagtttaaatactagtcagtatacgaagtcagaggatcacatgacacacattttacataaagcagcagtttaaaacctcttcatggcagactggcattcactacttcaaactcaatattttgtgggtttccattttgtgggaaatatggaattctagttacatctcgattttaagagaaatttggaaaatgaaatagcctaaaactatatagctcaccctaaatacggttttaaaaattcttatttctggcaatgacttctcattttgttaatttttatggcacaatataaaagaataaaaacatgaagggactccttctgtaatccaccttccctgagaggtggttgaaggaacttgggtcatatttatagaatgtcaggcttaaaagaaagttaagtaactttctttgcaaatgtctgttgagttctttccaagtacatctattgagactgttctcgaatttgatttgtggaggaactgcatggagagctatggccttccctggattccctctggcctttgcagctattagccattggtaaccaggggatttcattaattcaggacgttctgtgggtggcaggcacaggttacagttttaaaatgcccgtccctctatgagaatgaatagtcaatattattagggacatctgtgagcaagtagggtagcctctgcctaaccagatgtgtggattaacaaatcaggatactggttctttcttagggctggattaatccatttttgctgaatctacttcttgctcccagacactgcctggcatggctgagacgtcatttctccctgttgttttctgctgatcctgagtcaaagggtatcattctctttttattaaaagactgctgaagagccattaaaaagcagacactatgcacagacgtgtgtatttgtgtgtgtatctttatatatctttaatgttatcacagagttaatcactaaacatgtagtgccttgggggaaagcataaacaattgatgttggtaataaagatataaagatattgacttaaatacattytcggttttaaaaaaatcagaaaacatgattagaaatcaaaccaaatagaaataagattcttaaaactctggaatcacatgatcccaattatttttctgtatattatctttcacataatggcactgcctttgagcctgaatgccagtgacagtatagacagactcaactgtttgaaccctgttcttgacttgaagtctatccattgttagcttttctttcccggcctcttatctggaagcgttcttgcttgattctttaaataattatttattgaatgccaaatattatgctaggactcagcgaggaggcagagagagaataagccattgtcctagccttgaggaggaattagcctactgatatacatttcatataattagcagtatgaatctacattattaatagtaagagtgctaatactgctataaattttgtattacattttatactgcaagaagcatactatcttccagatacatttatctatcggttttagccttgaatgtaaaaggtcaaaagacatgttattggccaggcatgctggtatacgcctataatcccggaactttgggaagccgaggagggagaaatacttgaggccanaagtttgagaccaacctgggcaacaggatgaaactccgtctctacaaaaaacaacgacaaaaattagccgggtgtggtggtgcatgcctgcagtcccagctactcaggaggctaaggtgaaagggtcgattgtgcccaggagatcaaggctgcagtgagctatgatgaccccactgcactccagcctgagcaacagagcaagacactatttcaaaaagaaaaataataataataataataataatactatgagtttct

SEQ ID NO: 703774 - DNA, 2059 bp, Homo sapiens
  misc_feature 1801: n = A,T,C or G
cacagaaaaataaccgaacacagagaatcacagctagtctctttgaataaacagataattttaggcgatacatcgacaaatacttttgagtacttatatgcaaacattcttcccagcatggagtctatcatctaattggagaaatgacagatagactggaatagtttaaatactagtcagtatacgaagtcagaggatcacatgacacacattttacataaagcagcagtttaaaacctcttcatggcagactggcattcactacttcaaactcaatattttgtgggtttccattttgtgggaaatatggaattctagttacatctcgattttaagagaaatttggaaaatgaaatagcctaaaactatatagctcaccctaaatacggttttaaaaattcttatttctggcaatgacttctcattttgttaatttttatggcacaatataaaagaataaaaacatgaagggactccttctgtaatccaccttccctgagaggtggttgaaggaacttgggtcatatttatagaatgtcaggcttaaaagaaagttaagtaactttctttgcaaatgtctgttgagttctttccaagtacatctattgagactgttctcgaatttgatttgtggaggaactgcatggagagctatggccttccctggattccctctggcctttgcagctattagccattggtaaccaggggatttcattaattcaggacgttctgtgggtggcaggcacaggttacagttttaaaatgcccgtccctctatgagaatgaatagtcaatattattagggacatctgtgagcaagtagggtagcctctgcctaaccagatgtgtggattaacaaatcaggatactggttctttcttagggctggattaatccatttttgctgaatctacttcttgctcccagacactgcctggcatggctgagacgtcatttctccctgttgttttctgctgatcctgagtcaaagggtatcattctctttttattaaaagactgctgaagagccattaaaaagcagacactatgcacagacgtgtgtatttgtgtgtgtatctttatatatctttaatgttatcacagagttaatcactaaacatgtagtgccttgggggaaagcataaacaattgatgttggtaataaagatataaagatattgacttaaatacattttcggttttaaaaaaatcagaaaacatgattagaaatcaaaccaaatagaaataagattcttaaaactctggaatcacatgatcccaattatttttctgtatattatctttcacataatggcacwgcctttgagcctgaatgccagtgacagtatagacagactcaactgtttgaaccctgttcttgacttgaagtctatccattgttagcttttctttcccggcctcttatctggaagcgttcttgcttgattctttaaataattatttattgaatgccaaatattatgctaggactcagcgaggaggcagagagagaataagccattgtcctagccttgaggaggaattagcctactgatatacatttcatataattagcagtatgaatctacattattaatagtaagagtgctaatactgctataaattttgtattacattttatactgcaagaagcatactatcttccagatacatttatctatcggttttagccttgaatgtaaaaggtcaaaagacatgttattggccaggcatgctggtatacgcctataatcccggaactttgggaagccgaggagggagaaatacttgaggccanaagtttgagaccaacctgggcaacaggatgaaactccgtctctacaaaaaacaacgacaaaaattagccgggtgtggtggtgcatgcctgcagtcccagctactcaggaggctaaggtgaaagggtcgattgtgcccaggagatcaaggctgcagtgagctatgatgaccccactgcactccagcctgagcaacagagcaagacactatttcaaaaagaaaaataataataataataataataatactatgagtttct

SEQ ID NO: 703775 - DNA, 978 bp, Homo sapiens
caagttaacaaaattaaagcaagcagaagttcattaacccattcccatcacaagcaaaagttcattaacccattcttatcacatcggagaggctttagttcaaaattatttctcacaaagcagaggcttaggggctttacttaaatcgtattttaataaagaaccataaatcctatatagtgaaaagacaaaggagagagaagttttcatcttttaaaagatgggaaaatatgggagaatagtaaaaccgcttcccagatgtctctggtgtgtctgagggtgccttccccgggccaatgagaaagtgttgtctccagtaagaaaatatgtattgcttaccaccaggcaaacagaggctgaggaagagtgtttccctgcatttttagtgtctttaacttaayaatttcttaatattttggggagaattattttcatttacgtaatgtcaaacaaaaattattaactattttctttgctttccagccttaagtctagacattgggagacaactgaggaaaaagtcattgaaacaactatcacaaagcaattggggattgattcataaacctgagtgtcaacagaaagaaaagcatccaagaaaaataatagatctgcctagtttcccatgataattcagtggttctaccctctggctcacatggcccagtggatgttgactctttctatcacactggtaacatatattccttttcttcctagcactgaaaattgtgatgagttgactcaaggtcctttcccccaaatactctggggggaccgagttattttaataatttcctttttttattaatgatatattaaagaatgtcataatggattttcttataaaatatgtccccaaatttatagaaaaaaaaattttattattttaaaatgaatagcaatacaattaatgtaagactatatttatagcaagattattatgtaaagaaatcctgtataataataataaaatta

SEQ ID NO: 703776 - DNA, 978 bp, Homo sapiens
caagttaacaaaattaaagcaagcagaagttcattaacccattcccatcacaagcaaaagttcattaacccattcttatcacatcggagaggctttagttcaaaattatttctcacaaagcagaggcttaggggctttacttaaatcgtattttaataaagaaccataaatcctatatagtgaaaagacaaaggagagagaagttttcatcttttaaaagatgggaaaatatgggagaatagtaaaaccgcttcccagatgtctctggtgtgtctgagggtgccttccccgggccaatgagaaagtgttgtctccagtaagaaaatatgtattgcttaccaccaggcaaacagaggctgaggaagagtgtttccctgcatttttagtgtctttaacttaacaatttcttaatattttggggagaattattttcatttacgtaatgtcaaacaaaaattattaactattttctttgctttccagccttaagtctagacattgggagacaactgaggaaaaagtcattgaaacaactatcacaaagcaattggggattgattcataaacctgagtgtcaacagaaagaaaagcatccaagaaaaataatagatctgcctagtttcccatgataattcagtggttctaccctctggctcacatggcccagtggatgttgactctttctatcacactggtaacatatattccttttcttcctagcactgaaaattgtgatgagttgactcaaggtcctttcccccaaatactctggggggaccgagttattttaataatttcctttttttattaatgatatattaaagaatgtcataatggattttcttataaaatatgtccccaaatttatagaaaaaaaaawtttattattttaaaatgaatagcaatacaattaatgtaagactatatttatagcaagattattatgtaaagaaatcctgtataataataataaaatta

SEQ ID NO: 703777 - DNA, 978 bp, Homo sapiens
caagttaacaaaattaaagcaagcagaagttcattaacccattcccatcacaagcaaaagttcattaacccattcttatcacatcggagaggctttagttcaaaattatttctcacaaagcagaggcttaggggctttacttaaatcgtattttaataaagaaccataaatcctatatagtgaaaagacaaaggagagagaagttttcatcttttaaaagatgggaaaatatgggagaatagtaaaaccgcttcccagatgtctctggtgtgtctgagggtgccttccccgggccaatgagaaagtgttgtctccagtaagaaaatatgtattgcttaccaccaggcaaacagaggctgaggaagagtgtttccctgcatttttagtgtctttaacttaacaatttcttaatattttggggagaattattttcatttacgtaatgtcaaacaaaaattattaactattttctttgctttccagccttaagtctagacattgggagacaactgaggaaaaagtcattgaaacaactatcacaaagcaattggggattgattcataaacctgagtgtcaacagaaagaaaagcatccaagaaaaataatagatctgcctagtttcccatgataattcagtggttctaccctctggctcacatggcccagtggatgttgactctttctatcacactggtaacatatattccttttcttcctagcactgaaaattgtgatgagttgactcaaggtcctttcccccaaatactctggggggaccgagttattttaataatttcctttttttattaatgatatattaaagaatgtcataatggattttcttataaaatatgtccccaaatttatagaaaaaaaaattttattattttaaaatgaatagcaatacaattaatgtargactatatttatagcaagattattatgtaaagaaatcctgtataataataataaaatta

SEQ ID NO: 703778 - DNA, 632 bp, Homo sapiens
ttttagtttttgttcaactcaaaacttacaagagcattcaggtacgtcgtcaggtggtaaatgtccactccagtttctgttccccaaatgtacatatatttagtgacatggtatttggtgaatgaagctcatgtttggtgtatacaatcaacagtaatgtgacaggggactaacatattctgatacgtttgggaaaattttggctgcagttaactataatttgctaattttgcatttacattggttttttttttctcctgttacttaaaatataacgaaatggggacaagcacctttgccttggtgtaattaaaaataaaattatgtcaggaacatctgttttcagaagggatttctatttgttttatcaccaaaaggtggcgtcctacccccatgccctttattttaaaacctttcttgctttaatttaacaaaaagaaacttccagttgattactgatraagaaattaaaatctgccccccacgaatgtaacgtgacagtgttgaaaatgaacaatatgttaagctgcagttaagtttccctctaatgtaaaccaaatggacatcgagttctttaataaggcagcacagcacattagacagtatcatacaaaattgagtacaatatatca

SEQ ID NO: 703779 - DNA, 635 bp, Homo sapiens
ttacttctgtatacctcctaagtatcggagcttcaacttctttgtccatctgctgaagcagagaatctgctccatccatgatgaaatgtaaagcctgcagatgcataaatctcttgaaaacaggtgagagaaaggccaggcagccatcctcggatagaccactgaacttaacgagccctgtgcttcctgggcccttaatctaaataagaaacataccgaaagctataaaagctacgggcctttctttgaaatctcaattaaaaccaacacwaaacaagaatgctgaatgtccccatccaggaccatctctcaggaataaacctttaaaatctcagtaacttgaattagaaccacttccctccacgcgcgtctacaattcttccgacgtttactgaaaaataaataaatcttacaaaccgggaaggatgggctgagagagaacacaattacatctaccatctcaaaaccgtttttcaaatcttttcagtcttggcgaaatgccaaaacatgttttgacatgattcttccccccctaatttataacctatgtgtatctgcaaggaaatttaatccttatgtttctgattcctttacacttaactcatcaaatgttactgtggaagagccatttgatg

SEQ ID NO: 703780 - DNA, 635 bp, Homo sapiens
ttacttctgtatacctcctaagtatcggagcttcaacttctttgtccatctgctgaagcagagaatctgctccatccatgatgaaatgtaaagcctgcagatgcataaatctcttgaaaacaggtgagagaaaggccaggcagccatcctcggatagaccactgaacttaacgagccctgtgcttcctgggcccttaatctaaataagaaacataccgaaagctataaaagctacgggcctttctttgaaatctcaattaaaaccaacacaaaacaagaatgctgaatgtccccatccaggaccatctctcaggaataaacctttaaaatctcagtaacttgaattagaaccacttccctccacgygcgtctacaattcttccgacgtttactgaaaaataaataaatcttacaaaccgggaaggatgggctgagagagaacacaattacatctaccatctcaaaaccgtttttcaaatcttttcagtcttggcgaaatgccaaaacatgttttgacatgattcttccccccctaatttataacctatgtgtatctgcaaggaaatttaatccttatgtttctgattcctttacacttaactcatcaaatgttactgtggaagagccatttgatg

SEQ ID NO: 703781 - DNA, 635 bp, Homo sapiens
ttacttctgtatacctcctaagtatcggagcttcaacttctttgtccatctgctgaagcagagaatctgctccatccatgatgaaatgtaaagcctgcagatgcataaatctcttgaaaacaggtgagagaaaggccaggcagccatcctcggatagaccactgaacttaacgagccctgtgcttcctgggcccttaatctaaataagaaacataccgaaagctataaaagctacgggcctttctttgaaatctcaattaaaaccaacacaaaacaagaatgctgaatgtccccatccaggaccatctctcaggaataaacctttaaaatctcagtaacttgaattagaaccacttccctccacgcgcgtctacaattcttccgacgtttactgaaaaataaataaatcttacaaacygggaaggatgggctgagagagaacacaattacatctaccatctcaaaaccgtttttcaaatcttttcagtcttggcgaaatgccaaaacatgttttgacatgattcttccccccctaatttataacctatgtgtatctgcaaggaaatttaatccttatgtttctgattcctttacacttaactcatcaaatgttactgtggaagagccatttgatg

SEQ ID NO: 703782 - DNA, 474 bp, Homo sapiens
ctcccgggttcacgccattctcctgcctcagcctcccgagtagctrggactacaggcgcccaccatcaagcccggctaattttttgtattttttagtagagacggggtttcaccatgttagccaggatggtcttgatctcctgaccttgtgatctggctgccttggcctcccagagtgctgggattacaggcgtgagccaccgcacctggccaaactttttatatttttagtagagatggggtttaaacatattggccaggctggtctcttaactcctcccacctcggcctcccaaagtgctgggattataggcgtgagccagcacaccaggcccttttagttattttaaattagcatatcctatgctgattgaagccctggagtcagctattcctgaagcctacagatcgacttctttggttataaaagccaatagatttcctctattagtctaagctagtttgagttatatt

SEQ ID NO: 703783 - DNA, 788 bp, Homo sapiens
  misc_feature 125, 311, 313, 315, 316, 317, 322, 323, 324, 325, 327, 332,340, 372: n = A,T,C or G
ggcagaatcaaatgcaaattctatttagagaaagagatcaaaataattctcacaaataaagattcaagaaaaatgagtacagagtaaaagagaaaccggaatgcacacataaaaaaaaaatcatncaggtgcggtggctcacgcctgtaatcccggcacttcgggaggccgaggcaggtggattacctgaggtcaggaattcaagaccagcctggccaacgtggtgaaaccccgtctctactaaaaatacaaaaattagcccaggcgcggtggcacacacctgtaatcccacctaatggggagggctgtgngnannnaaaannnntngaacnaaggaggnggagggtggagggagccgagattgggcaattnacttcagcctgggtgacagaacaagactccgtctcaaaaaaaaaaaaaaaccaaccaaaaccaaaaaaaaaacagaaggcaaaaccatcatcactgctgggtgtcagtgcaccaagtatatgctgtaagtaattgcccttcactgaacaccctcaaaggatttcacaagtatytaccccctcccccaactttttttttgagacagggtctcactgttgcccagactggagtacagtgcagctcactgcatccttgacctcctgggctcaagtgatcctcctgcctcaacctcctgagtagctgggattgcaggtgtgcaccgctgtaaccagcttttaagaaacttttgtagacagggttttgtcacgttgccctgggtgttgtcatgctgagaagttttgatacattactcattc

SEQ ID NO: 703784 - DNA, 647 bp, Homo sapiens
tcacactaactctaccttaatttgcacatgggacccaagaagaggcttgaagagacaactgcacatggtcggggactttccagacttcctttttccttcaccattcacctgtgaatcccagaatccaccctctaaaccttttttcacaatagtgctgccttaagggcagcacagagagatagatttgaactaaactcctgtcactttgttggtcaactcgcaattaagcttttcttttctcaaacgcctggtgccatagtattggcttctgtgcacatcgggcaatgaggtcttttgcgtagcagtatttggatatccggtttcctcacgctatttattgaagcgactgtcctttccccatcgtgtattcttgacacaagattagttgacttgcctaagattagttgactgtatatgcatggggttatttctggtttttctacgctgttccacattggtccatgcgtctgtttttatgctagtacttcactggtgasttctacctctgggaataaatataagaattctctaatcactggatgtttgaagcaattcactaagcaactcattatgatgctttctggcaaaggatctctgaatttgtcttcaaattgtggataaaattgggtcaaatttggcccatgttg

SEQ ID NO: 703785 - DNA, 1438 bp, Homo sapiens
tggaggtttctgccatcgatcccttccaaggattcagtcactcagccacatttaacattcactaggtcagacctttattcaagctgacgtcatctgaaccctcgtgcaattcaatcatagcatacattctgcccaacctcctcctactcctcccccagcctcttgctagggtgtcagccaataaacagcagttaatccagaccccagaacttttsgaatccgtctttccagagcttctatttagttatgctgcaggggaaagggtcgagagtgaaagatagaggcgtggcccctcccatagcagcaatgaatctttaagacttgagtctctgggcaaagagagaactctccctttcttcttggaaatgaaatcgagcagcactatcagccaggggccagccacatgaaaagggattcctagttgcctgtcccttactcccggatgtcagaaagaagtcggatatttctcacgcaagaaataaacacccctctgcccgctgctgcttcctctgatttctccgcgagcatgagatgactgagtaacgcagctggatttttctagtccccagagttcaacacccgcccgctcacctctaccatcctctcttctgttcccttcctcttttacttccccttcccccactttccctcatttaaatacaaacgcttaggtttccctgcgctccggagccgccattgacatcaagcagggtctccatagaaaccaggaggcgcgcagcgggcttctgcagccccagcccaggattcccaggcagaggtgtggctcggtccagaggagctgcggggagaccttctccttattaatatgaacctggggaggaggagagagcgtttaggcagagagggcacgcgacgaggtagaaacagaaggggctaagggaacagattatctattaaaaatgtttggttttagcctaggaacattcagaggagaagtagtccaagacaccccagggtcagggtcttcctcctctcaatttttcatgtactcaacagatctcagcttaatgtggagattatttgggggagccagtttccagtgtttagttgcaacgaagcagctgccacgccctggactgcatgcagcaaaacattcttcctgaaagcacttaaaacgggcaagagaaccacacctttgcactcgtctttttttcctagccattttacatgttacctcattttatcctcacgaaggtggcgttatgaaccccatttcatagacaaggatgcgcatgagacggtggtttatagttattctgtccatagccttacacctaatgtcttgaagaaaactctgcacctccagagtaagagagtctttattttcccttctcatcctcattcttctttggcggtcactcctctgaccttctcccatctttctcctctcaagcatggtcataaaaaaattcttctg

SEQ ID NO: 703786 - DNA, 721 bp, Homo sapiens
caaatttatctttatctcacagttctgaaaggatgtcagaagtctcactggtctaaaaccaaggtgtctgcagtgctgtgttccttttggatgctctaagataagaatcagtttcttgccttttctggctcttgggagctgctggcatttcttggctcacagcaccctttcttcttcaaaaccagcaatagcatccctccagcctctgttgtcacatttccttctctggtcctgaccctccagcctccttctttaaaggatctttgtgattacacagggcacacctggataatccaaggataatctctccatctcaaaatccttaatttaatcacagttgcaaagtactrtttgccatcaaagatactatatttacagttccaggggattaggaaagaaggaattattcttcctaccacaaacctcatgtcttttatcatcttaaaaataatgacactttaaaaatctttgtctctcctaaattgtaaatcaatttgtctctttcctaatacagtcaagtgttttttttgttgttgttgttgtttataaacaaacaaaaaaaatccattctcactatgtctatttccttaactaccatttatttccttactgttaattagctccccactataatttacttctctctccatggtataaaaactcttctgtcaaaattcaaaattactttcaaattgccaatttcatagacatttactagtcc

SEQ ID NO: 703787 - DNA, 721 bp, Homo sapiens
caaatttatctttatctcacagttctgaaaggatgtcagaagtctcactggtctaaaaccaaggtgtctgcagtgctgtgttccttttggatgctctaagataagaatcagtttcttgccttttctggctcttgggagctgctggcatttcttggctcacagcaccctttcttcttcaaaaccagcaatagcatccctccagcctctgttgtcacatttccttctctggtcctgaccctccagcctccttctttaaaggatctttgtgattacacagggcacacctggataatccaaggataatctctccatctcaaaatccttaatttaatcacagttgcaaagtactatttgccatcaaagatactatatttacagttccaggggattaggaaagaaggaattattcttcctaccacaaacctcatgtcttttatcatcttaaaaataatgacactttaaaaatctttgtctctcctaaattgtaaatcaatttgtctctttcctaatacagtcaagtgttttttttgttgttgttgttgtttataamcaaacaaaaaaaatccattctcactatgtctatttccttaactaccatttatttccttactgttaattagctccccactataatttacttctctctccatggtataaaaactcttctgtcaaaattcaaaattactttcaaattgccaatttcatagacatttactagtcc

SEQ ID NO: 703788 - DNA, 851 bp, Homo sapiens
tagttcatcattgcttttttagacatcggattatataatattgaacaaataaagtttatgcctttacatagcttatactcgagtgcagggcaaactgtgaccctttgacctagcctgctgcccaaattttgaaaggaaagctttgtttgaacacagctagcctattcctttacattttatctatagctgcttttttgctgcaaaggcaaaatcgagtagttgctacatagatggtatatcctgaaaagtagaaaatacttgcgatttttctcttaacagaaagttagctgacttctctttttgtgaaaatagatatactttctttaggagatagcctaggtattggaaattctactggagccagggagatctgggttagatctagctttcctattaaactaacttcttgcatggttttagcatatgtctcttaatctttcctaaacatcagtttccttgataccaaaatgggcttaatgtctatctcaacttttttatatgattaaagaataaaatgtatataaagtgcctgaaaattttggtgctataaaaaatgtttctctttccttttggacaataatgggtttcttttatattgatagtataagtattaatatttattacaactgtacagctacataaaaccaatttagactagaagtcaaagtaatcatagtcyataataaaataagattcagtagaaaaataatagactttgattgaagtaagtacaaagaagagatataagttaaacttctccactttccatgctagagcgatttgcattttaccgtcacagtcttggtttaaatttgtcatagttaagctataggtttaaaccctttatatgc

SEQ ID NO: 703789 - DNA, 606 bp, Homo sapiens
tgtgagcataggtgctccaggccctttcttctattcagatagaaaattcctcagtgattcatagtggttttaaaagctaggagagagttcagacattrggtaaatcatccctgttttatggtgcctatcttttcttcatctgcagttagaccagtctcactataaaatacaaagcacaataatacacagaagctatttacaagtgagatttaaaaattatacttactgccttttgaaaacattgggctttttcctctctgttcagctttgcccaggatacctgttagacaagtcttcagtatattcttttggctttgtcatgtcaaccacataccttggccaggtctctgatgatttccaaatgtttaatcatcctaatttgtgatatccttgttctgtcacttttttagtatcttcagcctaacgtgtcttgaataggtctttggtctgtgcttataatcaggttagtagtcctgtcgtttttccctcctccaataaatctttcatattttaaaggaaaagcagcttccttgttaaaccaatcataacaaaagccccacacccttatcccaaaccttcgtggttaagattaatgatagctgaaaa

SEQ ID NO: 703790 - DNA, 618 bp, Homo sapiens
tcactttttctctacatctatagtttaccaaattcattaattcacagtcatgctgaaattctgaacaaccactttgaaataagatttaaaactttaatatctttttcatgtaccaacagcagagcccacacatctgatcatcctttactctagaacttagaggattatgcaaaaaacttttttttttttttttttgagacggagtctcgctctgtcgcccaggctggagtgcagtggcgcgatctcggctcactgcaagctcygcctcccgggttcacgccattctcctgcctcagcctcccgagtagctgggactacaggcgcccgctaccacgcccgactaattttttgtatttttagtagagatggggtttcaccgtgttagccaggatggtctcgatctcctgtcctcgtgatccgcccgcctcggcctcccaaagtgctgggattacaggtgtgagccaccgcgcccggccgcaaaaaacttttatgagagcatacttcataaggttttctttctacttcaaccaaaatattgtacagcttatgaggaaacttgcaataataaattgtaaaatgttttatagacactaatatttgttaatctttatgagaaca

SEQ ID NO: 703791 - DNA, 618 bp, Homo sapiens
tcactttttctctacatctatagtttaccaaattcattaattcacagtcatgctgaaattctgaacaaccactttgaaataagatttaaaactttaatatctttttcatgtaccaacagcagagcccacacatctgatcatcctttactctagaacttagaggattatgcaaaaaacttttttttttttttttttgagacggagtctcgctctgtcgcccaggctggagtgcagtggcgcgatctcggctcactgcaagctctgcctcccggrttcacgccattctcctgcctcagcctcccgagtagctgggactacaggcgcccgctaccacgcccgactaattttttgtatttttagtagagatggggtttcaccgtgttagccaggatggtctcgatctcctgtcctcgtgatccgcccgcctcggcctcccaaagtgctgggattacaggtgtgagccaccgcgcccggccgcaaaaaacttttatgagagcatacttcataaggttttctttctacttcaaccaaaatattgtacagcttatgaggaaacttgcaataataaattgtaaaatgttttatagacactaatatttgttaatctttatgagaaca

SEQ ID NO: 703792 - DNA, 618 bp, Homo sapiens
tcactttttctctacatctatagtttaccaaattcattaattcacagtcatgctgaaattctgaacaaccactttgaaataagatttaaaactttaatatctttttcatgtaccaacagcagagcccacacatctgatcatcctttactctagaacttagaggattatgcaaaaaacttttttttttttttttttgagacggagtctcgctctgtcgcccaggctggagtgcagtggcgcgatctcggctcactgcaagctctgcctcccgggttcamgccattctcctgcctcagcctcccgagtagctgggactacaggcgcccgctaccacgcccgactaattttttgtatttttagtagagatggggtttcaccgtgttagccaggatggtctcgatctcctgtcctcgtgatccgcccgcctcggcctcccaaagtgctgggattacaggtgtgagccaccgcgcccggccgcaaaaaacttttatgagagcatacttcataaggttttctttctacttcaaccaaaatattgtacagcttatgaggaaacttgcaataataaattgtaaaatgttttatagacactaatatttgttaatctttatgagaaca

SEQ ID NO: 703793 - DNA, 618 bp, Homo sapiens
tcactttttctctacatctatagtttaccaaattcattaattcacagtcatgctgaaattctgaacaaccactttgaaataagatttaaaactttaatatctttttcatgtaccaacagcagagcccacacatctgatcatcctttactctagaacttagaggattatgcaaaaaacttttttttttttttttttgagacggagtctcgctctgtcgcccaggctggagtgcagtggcgcgatctcggctcactgcaagctctgcctcccgggttcacgccattctcctgcctcagcctcccgagtagctgggactacaggcgcccgctaccacgcccgactaattttttgtatttttagtagagatggggtttcaccgtgttagccaggatggtctcgatctcctgwcctcgtgatccgcccgcctcggcctcccaaagtgctgggattacaggtgtgagccaccgcgcccggccgcaaaaaacttttatgagagcatacttcataaggttttctttctacttcaaccaaaatattgtacagcttatgaggaaacttgcaataataaattgtaaaatgttttatagacactaatatttgttaatctttatgagaaca

SEQ ID NO: 703794 - DNA, 440 bp, Homo sapiens
cctttgcctggttcctttttattggctatttaagatttttcaagtctaatcttaaatgtcacctcttagagaagacttttgtgacaacactattaaagtatcttcactatcacatcacactgttgttttcctttcctaacactttcctgtaggaaaaaaacttggtattgatggtttatttgtatatctcttttctctctcttcaagagcatatgctctatgagaacaggaacttaygtgcttagcagatttattatttattatttattattattttttttttgagagggagtttcactcagtcacccaggctggagtgcagtggcacgaacttggctcactgcaacctctgcctcctgggttcaagcgattctcctgcctcagcctccctagcagctggtattacaggcatgcatcaccaagcctgactaattgttgta

SEQ ID NO: 703795 - DNA, 1342 bp, Homo sapiens
tccttttcttccctgttattaagtaaatagttaatgtttattcaataaatatttactacaattatggatccatttctttctttttcctttctgatccagcaacactgccattattaccactaccacccagatacaaatgtcataatctggaaaatggaccagagtggccaatggaagacttcctaaacatcaaccatatttacactctttaattggttttatagggacttggctctaaaataactgcttctgcaagataatgatggtatcagaagtgtcctggaaaaaaaacccatgctctaggttgtggtgctatcagtgtttactgatgtgtcagtaatactgctcactgattccttttctcttttatcagtaagttattaactacaatgagcaagctgttcaaataaatatggtattttttcttcctcttttttctctttttataactagagtcacgaatatagatatttactcatattaatttaatttctcaagattgtgtgtgggaggcagctaaagcagcactagagggaaatttgtagtgttcaatgcttgtattaaaagaaaaacaatatctaaaatcaataatctaagtttcttcttcaggaaggtagaaaaataaaagcaagttaaacataagaaaggctgaagagaacaaatgtatttaatatatgtgtgtatataatatacatggattatatataaggtattttatataatggtgtatatgtattatatatgtatgtgtgtataatatacatggaatatgtgtgtggggggctgtggggatgtatacacacacacacatatatatatatatatatcctatcagtctgttcctctggggaacccagactaaaactcatggattacatatagattatgctaataagtatgtaatatatagttatagaatacataatatgtcatttatatatcatgcaaatatatatgtttgtgttacatatatatgtagcataaattatatatataaatatgtatatttatatataatatataatatattatatatatttatatataatatctaatatattatatataaatatatatattatatatattatattttatatatttatatataaatataaatttatatatatttatatatattatatatatatttatatatatatttwtatatattatatttatatataaatatattatatatatatatatataaatatattttaaaaataaggaattgtctcacaggttatgaagcctgagaggtctcatgatctgcagtcagcaagctggagacccaggagagccaatattatagttctagtctgaattcaaaggcaggaga

SEQ ID NO: 703796 - DNA, 613 bp, Homo sapiens
ttaatgaagaaggctcagaagctgctgctgtctcaggtactgtttgctagaatcttctcccctcttctagatttgtatttttagagcaatcttgagtggggagtggggtcattttcaaaatgaagccaaaaaagtcactctgctctaacttagaagtcaagcaaatgctgaaccagccggaattttctaaatagaatgtgaagtgtgaactcactccagtgcccctttacagataactctcatcttcattttctctctaatgagagacaggaggacattggcagttctgcgaaaatagattttttctgctgtgctgcctgtttaaatattttaaatattttcctgctacccatttaaacatttttcttcctaccaaattatttgctgaagttgattcttaattttgtcagcaaaaagttcttattttttattttcatggttacatggcaaatgtatatatttatggagaatatgggatatttttgawacaggtatgtaatgcataataatgacatcagggtaaatggggtattcatcacctgaagcatttatcatttctttttattacaaacatttcaatcatacttttccagttatttttaaatgtacaaca

SEQ ID NO: 703797 - DNA, 1147 bp, Homo sapiens
ccccccagaacaggatagcaggcacttgaaatgttgaatgaatgaataaatggctattgtaggaaattattaatgagtggcagaattatcgggtaggatacaacttcaaaagtttaggtgaaatggataccacatgttcttagttataagtgggagctaaacattgggtctcatggacataaagatggcaacaagagacactgaggactactaaaggtgggaggaagagaaggggaaaaggactcaaaaactaactattgggtactatactcagcacctgggtgatggaataattcaaacttcagcatcatctaatatacccaggtaacaaacctgtatatgtactgcctgaatctaaaataaaagttgaaaaaaaaaagcttaggtgaaatatattgaaaactttagggcaacagtgttggaaatcgacgttataagggcataggaaattggagagttatgasagccaacaaatcattttattgtttaagctactttatgttgggttatctgtttcttgcaggcaaaaacatgctaactgacaagaaaatcatgggttttatacaaggataacaagtgctgggttgcttagctatgaggaaggctaggctcactggtaagtgtctcaagatgtagatcatgctaatctgaagatatgtgttgatgttgcaatctgatgtcctgtacaggttctatgagcagtttggccgaagttggtaatatctgtctatgccagagtgggactgattagaagacctataaactaaataacatcaaaccccaaagttgcatctgtctactcactgtagtggcggtagttctaccagtcatcagtggtgacccataatgacatatccaataattgcattgctgtagtttctagtatatctgctcacttgacctttgtagtactttcttgcatcttctataatgcacagagatctgagccactctctccttggttttagcataccagaagatgtacagcgttggagaattcagggatttttatcaacaatcaaactatatttgtggaaattttgtgcataagtgccaaagatggctgacatcggaccacattctatttaactcaactgaatgacaccaagctctcatcctaaaacttatagttacatccacccttctg

SEQ ID NO: 703798 - DNA, 1147 bp, Homo sapiens
ccccccagaacaggatagcaggcacttgaaatgttgaatgaatgaataaatggctattgtaggaaattattaatgagtggcagaattatcgggtaggatacaacttcaaaagtttaggtgaaatggataccacatgttcttagttataagtgggagctaaacattgggtctcatggacataaagatggcaacaagagacactgaggactactaaaggtgggaggaagagaaggggaaaaggactcaaaaactaactattgggtactatactcagcacctgggtgatggaataattcaaacttcagcatcatctaatatacccaggtaacaaacctgtatatgtactgcctgaatctaaaataaaagttgaaaaaaaaaagcttaggtgaaatatattgaaaactttagggcaacagtgttggaaatcgacgttataagggcataggaaattggagagttatgacagccaacaaatcattttattgtttaagctactttatgttgggttatctgtttcttgcaggcaaaaacatgctaactgacaagaaaatcatgggttttatacaaggataacaagtgctgggttgcttagctatgaggaaggctaggctcactggtaagtgtctcaagatgtagatcatgctaatctgaagatatgtgttgatgttgcaatctgatgtcctgtacaggttctatgagcagtttggccgaagttggtaatatctgtctatgccagagtgggactgattagaagacctataaactaaataacatcaaaccccaaagttgcatctgtctactcactgtagtggyggtagttctaccagtcatcagtggtgacccataatgacatatccaataattgcattgctgtagtttctagtatatctgctcacttgacctttgtagtactttcttgcatcttctataatgcacagagatctgagccactctctccttggttttagcataccagaagatgtacagcgttggagaattcagggatttttatcaacaatcaaactatatttgtggaaattttgtgcataagtgccaaagatggctgacatcggaccacattctatttaactcaactgaatgacaccaagctctcatcctaaaacttatagttacatccacccttctg

SEQ ID NO: 703799 - DNA, 1944 bp, Homo sapiens
gaaacaaacaaacaaacaaacaaaaacattagagtcagaaaaactaaatataacacatgttcctagattgcattctataaagaatattattgggataattaactaacttgaacagagtttgtgaatttaatgttagtgtcaatgacaatgtcctgattttgattcttgtgtattggttatctgaaaaatgcccttcttggaagrgttacacattattcaacagtgatgcgctctctgttcacaatgtactctcaagtagctccagaaaaaaaatgttctttgtgctattcttgcagcttttaacatttgaagttattttaaaattaacattatctttagcattttaaaaagataaagttgattttatggcctgtgagtttatcattgattttctcagattctctgggtaaactatatcaactgtaaatagttttatttcttcttttccatttcctgtgaatcgatttttttcttttttaattgtgttggttataatctctaggaaaaaaatgttcaatagatggagagagagtaagcatccttacctttttgtaatctcagtggaaatacctctagtattttctgactaaacataacaccggctttaggaccgaggtatagaaaaatatgcattatcatttctcagccttatggctaagatcaagtgtagaaaatatgcctcaatttctattttcttgagtgtttttatcaggaataggaattgagttttgtttaaaagccccccacccccgcttttttttttttttttttttttttgcgccaagtgtggtggctcatgcctgtaatcccagcacttcgggaggctgaggcagcagaattgcttgagacaaggagtttaagaccaacctaggcaaaatagtgaggccccatttctaacaaatcaaaataaaaatattagccaggtagagtggtacatgcctgtagtcctacctgcttggaagactgaggcagaagaattgcttgagcccaggaggttgaggctgcaatgagctatgattgcaccactgcactccagcctgggtgacagtgagaccctgtctccaaaaaaaatttgtttaataaaataaaattaaaagaattttaaaaagccttttccccaactgaggataatatacaattaatcttcttatatctactaatatagtatttaaattaatagatttcctcatattgaatcatccttgcattccagaaataaatcctacctggtcatggtatattttcttaatgtggtgtttggattctgttttctaatatttactctagcatttttgcattgatattggataatggcttgtagtcttgtttacacattagagtcattttcctccataccacttttaggagaacagtttccatgaaagggagcttgatgataacagaaaagataaagagacaatctaacacagaaatagacctgtcttagggccacataaattaaggggaggttgctgactcctctcttactgactaggtgaccttagagaagttattcctcctcttctgccctcaattttcttgcctatcaattagacgaacctactcaaaagattgtgtgagaataaaatgacaagatgtctatacagacttcagtacaatgcctgacacaatgtaagctcacgtaaacactggtataccctattttattaaaaagaactacttttcttctactgcctctcacattataataatgcataaagacatatgtggacagatgtcatagtttcatcagcaggcagatagtccccaataccattttgtcatgattaccaggccacagaggagtttaggcagctaatctagggagctaggtttgtattttttctcttcttttatagttactccattccagactagaagtttgaatttataattttatttaattaattaattttgtgtatttatttttgagacggagtctca

SEQ ID NO: 703800 - DNA, 964 bp, Homo sapiens
atccctgaggaatcaccacactgacttccacaatggttgaactagtttacactcccaccaacagtgtaaaagtgttcctatttctccacatcctctccaacatctgttgtttcctgactttttaatgattgcctttctaactggtgtgagatggtttctcattgttgttttgatttgcatttctctaatgaccagtgatgatgagcttttttttcrtatgtttgttggctgcatgaatgtcttcttttgagaagtgtctgttcatatcctttgcccactttttgatagggttgtttttttcttgtaaatttgtttgagttcattgtagattctggatattagcccttaaagtaagtacattttttgtcactgggtaatataaagaaaaatgttatctgtcatcagatcaccttgggtcattagagaataaagcaaggactttctctctacaaattgctggtttgcgtgtgtgtgtgtgtgtgtgtgtatgtatgtatgtgtgggtctgtatgtgtgtatatgttgattaaatattaaaggaattaatcattagcaaagttgggctgccaattgtcctccattaactgagagtaaaaaaaaaaaaacggttgtcataccttttttctttcttcttcacttggagagatgggcagaaaagcagtgagaaggaaaaattagcatttggcaataatctaatgacttcacattggggaaacagagctaaagtcttcatgaaattctatattgcagtagtccattcttgagagcaaaccctctgttcttatagtagcagtacaagctattgcctcttgatggtgccatgcattaaagaatttgagagatgtatgttctgactcttcacatggttcagctttctcaggctaaacgctgaaatatagaaagcaacttggactaaaaagaggccctgtatgcccctgtgtcagttatagaagaagtctcattc

SEQ ID NO: 703801 - DNA, 964 bp, Homo sapiens
atccctgaggaatcaccacactgacttccacaatggttgaactagtttacactcccaccaacagtgtaaaagtgttcctatttctccacatcctctccaacatctgttgtttcctgactttttaatgattgcctttctaactggtgtgagatggtttctcattgttgttttgatttgcatttctctaatgaccagtgatgatgagcttttttttcgtatgtttgttggctgcatgaatgtcttcttttgagaagtgtctgttcatatcctttgcccactttttgatagggttgtttttttcttgtaaatttgtttgagttcattgtagattctggatattagcccttaaartaagtacattttttgtcactgggtaatataaagaaaaatgttatctgtcatcagatcaccttgggtcattagagaataaagcaaggactttctctctacaaattgctggtttgcgtgtgtgtgtgtgtgtgtgtgtatgtatgtatgtgtgggtctgtatgtgtgtatatgttgattaaatattaaaggaattaatcattagcaaagttgggctgccaattgtcctccattaactgagagtaaaaaaaaaaaaacggttgtcataccttttttctttcttcttcacttggagagatgggcagaaaagcagtgagaaggaaaaattagcatttggcaataatctaatgacttcacattggggaaacagagctaaagtcttcatgaaattctatattgcagtagtccattcttgagagcaaaccctctgttcttatagtagcagtacaagctattgcctcttgatggtgccatgcattaaagaatttgagagatgtatgttctgactcttcacatggttcagctttctcaggctaaacgctgaaatatagaaagcaacttggactaaaaagaggccctgtatgcccctgtgtcagttatagaagaagtctcattc

SEQ ID NO: 703802 - DNA, 964 bp, Homo sapiens
atccctgaggaatcaccacactgacttccacaatggttgaactagtttacactcccaccaacagtgtaaaagtgttcctatttctccacatcctctccaacatctgttgtttcctgactttttaatgattgcctttctaactggtgtgagatggtttctcattgttgttttgatttgcatttctctaatgaccagtgatgatgagcttttttttcgtatgtttgttggctgcatgaatgtcttcttttgagaagtgtctgttcatatcctttgcccactttttgatagggttgtttttttcttgtaaatttgtttgagttcattgtagattctggatattagcccttaaagtaagtacattttttgtcactgggtaatataaagaaaaatgttatctgtcatcagatcaccttgggtcattagagaataaagcaaggactttctctctacaaattgctggtttgcgtgtgtgtgtgtgtgtgtgtgtatgtatgtatgtgtgggtctgtatgtgtgtatatgttgattaaatattaaaggaattaatcattagcaaagttgggctgccaattgtcctccattaactgagagtaaaaaaaaaaaaacggttgtcataccttttttctttcttcttcacttggagagatgggcagaaaagcagtgagaaggaaaaattagcatttggcaataatctaatgacttcacattggggaaamagagctaaagtcttcatgaaattctatattgcagtagtccattcttgagagcaaaccctctgttcttatagtagcagtacaagctattgcctcttgatggtgccatgcattaaagaatttgagagatgtatgttctgactcttcacatggttcagctttctcaggctaaacgctgaaatatagaaagcaacttggactaaaaagaggccctgtatgcccctgtgtcagttatagaagaagtctcattc

SEQ ID NO: 703803 - DNA, 675 bp, Homo sapiens
tcagcttgcagaaatagtagaaagagaaaggctagtatcctattcgtttcccctttcatttctttaggagcaaaccactttctaccctgtgaccttcacagtaaaaacagtctataaatttactaggtgtcattttattgtcctccactacttttgacaactgcaatataaatttcggtccataaattcaaaacgcaaaaaagaattgttttatttttcctttaatctacctatgtgtgctcccaagccctcattctgctaagtgccagaaatttcatctttgttacctcagagttttgtccctatcccctccaggggatgcatctgagatgcatacagtagacttaaactacgaggaaatttcatcaggttctgggtctycctctgtacattttggccccttcatgacattccgcaccacacccctctgcagtccttgatccaattcagctttctgagcatagcaaagaagcaactggatgttcatagaatattgataaaggaggagtggaaatgttaattgcgttagttggttgcttagttgctggggtagcttttcccctggttggaaagaaattgtctcaggataagagccagatttgagagaaaggggtacaccatccacatttctttttcagtcttggaaaaagtctgaataaccaaagcaaggtgggg

SEQ ID NO: 703804 - DNA, 565 bp, Homo sapiens
tgtttttctttataaatcaccctgtcatgggtatgtctttatcagcagcataaaaacagactaatataataatcttgcctgccttgggtggcagtgagcatttgataaatcagcacacttgagaacataacacagtgcctcgctcagtccagtcctttgtaagaaattgcartgccttgctatctggcctcaatctctccccccctctctctctccttctgtaaacatgtattacgtaccccttcaggtccaatactataaaatagtaacagtcaactttatgtaatagttacaaatgaatgtgcatctgtttgctttatagaagtcatttagtttaaaagattctgagaactcctccttctgctctaggcttgctcttccttgtctagtccaggcagaggcctctcatttaggccctttcaggcctccccacatccctgccccaagatagaagtgagagaacggcaagggcaagctctcactctacccactctgccccacccctgtccatatcctccacctggcagtctcacctgagtaatgataaggttgagcatcctttcct

SEQ ID NO: 703805 - DNA, 3398 bp, Homo sapiens
ccccaccagctaatttttgaattttttcttctttttttttttgtcatggagtctagctctattgcctaggctggagtgcagtggcatgatctcggctcactgcaacctccacctcccaggtccaagcaattctcccgcctcagcctcctgagtagctgggattccaggtgtgtgtcaccatgtgcggcttttttgtatttttagtagatacagggtttcaccatgttggccaggctggtctcaaattcctaccctcaaatgatccacctgccttggcttcccaatgtgctgggattacaggtgtgagccatggtgcccagtcatatttctgtatatgtgacatttgcccttctagaactttgatccaactctagggaattggcttggcaaccctttttaatctaatctctttgtttacttaccttgaacttttggtcaaatgttcactacagataaacatgactaagtcaaaacagttggagaagtagaaataaattccaggttgatgtgttttaatgaatacagtttcttaatttccggagcttgcggaaaattccggagcttgcagaaactcataacattttgataagtagagatggagtctgttttaattaagtggccagtatcatacataattaatattagctgtgtacacacgcaaggggcttactcacctgctacttagatgctgctctcttaggctgattaacaagctctttgcattggtgtgtgcatcactcatttgctacttgcagaagacatcttttgcctttacgtttcctacctgtatttctttttcttttctttctttcttttttttttttgagacaaaatctcactctgtcacccagggagtctagctctgtctccccggctggagtgcagtggcacgatctcagctcactgcaacctctgcctcctgggtttaagcaattctcctgcctcagcctcctgagtagctgggattacaggcacctgctaccacgctcacctttttttttttttttgtatttttagtagagacggggtttcactatgttggccaggatggtcttgatctcctgacttcgtgatccacccgcctcagcctcccaaaatgctgggattacaggggtgagccaccacacccagctgtaattttgtatttttagtagagatgggatttctccatgttggtcaggctggtctggaactcctgacctcaggtgatctgcctgcctcggcctctcaaagtgctgggattacaggcgtgagccaccacacccggcctttattatcttataatttctatagatcaggggtttggggataccagacctgggtcttccgctgacccagggtctcgcaaggtttcaataaggtctcagccaggtctcgggtctcattgtcaaaaccttagtcaagctgggagggcaagctgaggtgtcaggtgtccaaatagccaattaagcaataagccattggccaggtgtattgggctcatacctgtaatccaagcgctttgagaggccaaggcaggaggatcacttgagcccaggagtttgagaccggcctcgacaacatagtgagactctgtctctccaaaaaaaaaaaaaaaaaaaaaaaaaaaccattaaaaaaattagcagggcatggtggtgcacacctgtagtcctagctactcaagaggtcgaggtgggaggatcacttgagcccacatggttgaggctgcagtgaaccatgattgcaccactgcactccagcttgggtgacaaagcgaggccctgtctcaaaaaataaaaaaaataataaaaaagatagaaagcaataagccaaaaatgaaagaggaaaggctttatcacttgactgtgatggtataagggctaagagtggaaaagtactaggtatgaaatcagggtaggaaacagtgggttcaaggtttcccgctcccatccctagaaggrggccttggcagaagccccatagaagacctctgcccaaggccccagataaagagacctaggatcaaaggtgctgcctggctaggaatgcaaatgtgttcaagagcatggccggccagggccactggagtctctgactccagttcccttcagacactgcagtgcataggctgggcacccagtgtggtgtggggagggcagctttccccgaggccggccagggaaagccttcatcattgcccacagtcaggcaggcctgaagaatctcacctaggttttcagccaggactcgtactccccactcacctgaaagccgggctttcgggggaaggatccacttccaaggtcactcactggttgctggcaaaattcagttcctggaggggtgttgggctacggtctcaggtcctcgctggctgttggccagaagccgcccttggttccttgccacctgggcctctgccacacgatggcttgcttcccagaggcctgcaagctgagaaagtaatggagagcgcgtgctagcaagatggaagccacagccttatttatgtatttatttatttatttttttttttttgagacggagtcttgctctgtcgcccaggctggactgcagtggcgcgatctcggctcactgcaagctccgcctcccgggttcacgccattctcctgcctcagcctcccgagtagctgggactacaggcgcccgctaccacgcccggctaattgtttgtatttttagtagagacggggtttcaccgtgttagccacgatggtctccatctcctgacctcgtgatctgcccgcctcggcctcccaaagtggtgggattacaggcgtgagccaccgcgcccagcccaccacagccttatacaacggaatcggaagtgacatcctgtccgcacgtcatatgttgtttgagatagggtcttgctctgtcgcccaggctggggcgcagtggtgtgatgatggttcactgtagccctgaactcttaggctcaagccatcctccagcctcagcctcctcagtagttgggactacaggtgtgccaccacacctggctaattttttaatttttgggggagatgggggtcttaccatgttgcccaggctggtcttgagctcctgggcttaagcaatcctcctgcctcggcttcccaaagtgctaggattataggcgtgagctgctgcacctgacccagccttacataacttaatcagaagtgacatcccgtttacatgttatgttattgattagaagcaagttactcaaggggaggggagcacacggggccatgaataccaggacgtggggttcactgggtccatcttagaaactgtctaccagaatggttatctggaaacatgaaggaggagtctacttgaaattgaaaccaccccacaggtggaaacacaggagggagacagatacctaaggtattaggtaagtccct

SEQ ID NO: 703806 - DNA, 1046 bp, Homo sapiens
cttccttggctgggcacggtggctcatgcctgtaatcccagcactttgggaggccaaggtgggtggatcaactgaggtcaggagttcaagaccagcctggccaacatggtaaaacgacatctctataaaaatacaaaattagctgagcttgatggcgggygcctgtaatcccagctactcaggaggttgaggcaggacaaattgcttgaatacaggaggcagaggttgcagtaagccgagatcacaccactgcactccagcctgggcaacagagtaagactctgtctcaaaaaaaaatcgtaaaataaaataaatagataccttccttatttctaactccacgcgtccactcatccactggaggccatactttatgactatggccaccattttgagtttttgtaacattgagatatttggaaatttcatgaactctaccttctagaagattttcccacagaacagcatttaagagtccccactcagtcctcaagcatacgtcaatttttggctcaccatactcagacttgagtgccaaagcccacaggcctacacttctgtctttgaacatgctcatgaaaaaaaaaaaaaagccagaagccaatttgagataaccccactagaccattctatgcaaaagctaatattactttttctgaagtaaagcttagttcagactatttaaagtggcatatatatttagatatttatatacttacagatattgtccttggaatgacaaaaaaattttttcattatcaccacttttgatagataacaggagtatctaatacagaatgatagatggtccagaaataatttattcttgattttggagtaaatttttgtgattatatttgaatcggggtctgcagtctagtggttaatggccaaccaagtagtgacatcacggcatgaagagatgaatgacccaggcttcctcttgtgatcccagcttactccagcttactctgaaaacaacactttctcttgttgattctaagatttcacttacagcttcactggaacaggatagttgaaagttg

SEQ ID NO: 703807 - DNA, 642 bp, Homo sapiens
tgaatagaatgaatatgtttctagctgcattaaatgttttaaattacatgtttaaaaactcagcatttttgtcacaaatattttttcccctattattctataacacaaaggcacctgagatggttgtttgctcctgacactaaacagctctggctgctctgcctttaaatgattagctctgccttctagctcccctgactttttccgtatggttaaattattcttgtgcctgtttgtatgcatgtatctaacagctcagttccttagagctctttctgattggtctatcaaaccagttgtagacagaaaccaggtagccatgcttattagcagtctatataatctaagaataaacaggtggccgggtgcagtggctcatgcctgtaattccagcactttgggaggcmgaggtgggcggatcacctgaggtcgggagttcgagaccagcctgaccaacatggagaaaccccgtctctactaaatacacaaaattagccgggtgtggtactccggtggctgagacaggagaatcacttgaacccgggaggtggaggttgcagtcagccgagatcgcgccattgcactccagcctgggcaacaagagcaaaactctgtctcaaaaaaaaaaaaaaagagaaaaac

SEQ ID NO: 703808 - DNA, 646 bp, Homo sapiens
agttcactttttccataattaaatatacagtaaacagcctacctctattacttaaaagggcaactgtaaatgattagtacaatgtagcaatggatagaaaaagaagccctgtgtttaaaaatggtgtgaacacctgtgtttctatgaaggcagcagacgttcacatacgcgtgcatcaagacatgaaagatgctttgtagcttcgtaaagggactgctttccatgaaatggtatcaacttaaattttaaaatgtattcaagagagaaaactttctatggtccacaygaggcttgaaaatatggaaaagatgcagtgagaactcaacacagtgatcactaattgggagttattttttcctagagtatttcttcaggatggtagaaacaaatgggtttagctgaaaagcagagtaaaactggttttccagcaacacttgttaaattattaccaaagaaagaccttgtcaaatatggctcctatctattaaaaaaatgtggcatctacatagagatgattagagtctactggccgaagttactaaattacaaagttactgtcagaatgaattatgatagatttgaatgactagaaattttcagtgattccaggaagactgataaaaatattcctcttactgggtcacac

SEQ ID NO: 703809 - DNA, 2042 bp, Homo sapiens
taaaatttattgtttgaatccaaaggaccaagaatagccaatatgattttgtaaaacaacaaagttcaacgacttacacgatttcaaaatttcaaaatttaccataaagctacagtaatcaagactgtggtattgacataaagataggtatatagctgggcatggtggctcatgcttttaattcaccctgggcaacacactaagaccccatctggaagaaaaggaaaaaaatatgatattgtaaaccaaaaataaaattctaagtggatctctcctcaggggtcagggcattttattttatttatttttttgagacagggtctcactctgatgcccaggctggagtgcaatggcacaacttcagctcactgaaaccactgcttcctggactcaagtgattctccagcctcagcctcctgaatagttaggattacacacacaggccaccacacctggctaattttttttttttttcctgagacggagtctcactctgtcatccaggctggagtgcagtggcactatcttggctcactacaacctccacctcttgggctcgagcaactctcctgccttagtctcccaggtagctgggataacaggagtgtgccaccatacgcagctaattttcgtatttttagtagagatggggttttgccatgttggccaggctggtctcgaactcctgacctggggtgaattgcctacctcagcctcccaaagggttgggattacagacatgagacaccgcactcagccatgcagagattttcaaagtaccaaaaaaaatggttttgcacctcagcccaacaccttcctcaatgttttcttttttctttttctgttttttttttgcccccagatggagttttgcctcttgttgcccaggctggagtgcaaagatgcaatcctagctcactgcacctccgcctcctgggttcaagcaattctgcctcagcctcccaagtagctgggattacaggcacatgccaccacacctggctaatttttgtacttttttttttagtagaggtgtggtttcatcatgttggtcaagctggtctcaaactctggrcctcaagtgatccacctgccttggcctcccaaagtgctgggattacaggtgtgagccaccatgccctgcccctcaaggttctcaaagagtcggtgaaagagaaaattttcgttggggaggtgctcaagtgctttacaatttccacctttctccctcacaaagggatgctccccacttcaatataagctcaagagcctgaactatgtcctctgacatctctgaggcccaaagttctatatcaaatacaaaccagaaatacacgaaagttgagactagccaactaactgcctgtctgataaagaggtgtctacctagggacagcttaacactacctggatctgtgaaggcacagtatgcacatttcatagagaactggcctgctgtcttttttttttttttttttttttttgagaaagaatctcgctgtgtcacctagcctgaagtgcagtggcacaatcttggctcactgcaacctctgcctcccaagttcaagtgattctcctgcctcagcctcccaagtatatgggattacaggtgcccaccataaggcctggctaatttttgtatttttggtagagacagggtttcacaatgttagccagcctggtcttgaactcctgacctcaagtgatctgccctgtgccccccaagtgctgggattacaggcataagccaaggcacccagccagtttttgaaacgtaagttctgtctccagtttcccatttttactaaagacaaatcacggtaagactgatttgctttattatgcttggtctgattatttgtataaagtgcagcaaaaataattattttttacataatctctttttaaattggctttgatggaactctgttccatagaaggtatcttagataagacttttttagagctgagcccatgggtttgtactctcaaatacctatgagttgagtaaattcctctcctcttgtggtcccaagataatt

SEQ ID NO: 703810 - DNA, 581 bp, Homo sapiens
gtcccaaacacttcagcagccccatcaccacaggttttgcatgaaactctaatccagagccaaaagatcactttcgcagagatggacaatagtcacaaagtgacatgtttcatctactaaatggtgtcctcatttttgttctaactaaccactgctgttatagtcatcaaatgcatgttctatatcctctagttttccaagcatccatgttttcactgtaatcttcaacgtattcgtcagttctagatattgcatacccaaactctcgaacttgataataaactgtcttcttcttaacaactgcatattaatgcccagttttcatccacttagaaaaccaccagtggatggctattaaataatgcatttttctagaatacttcactttgtataagctaagacttccacttcctctaccacccttaaagctgagtatccaataaattcagcagatcactatttcctggaggagttgtagtatttccaaatgatccacaggaatttttgttgagaaatttgttatataatatattaatcatcatrattcaaaacttactttgttttcaattaattaattaatt

SEQ ID NO: 703811 - DNA, 2088 bp, Homo sapiens
  misc_feature 1472, 1473, 1474, 1475, 1476, 1477, 1478, 1479, 1480, 1481,1482, 1483, 1484, 1485, 1486, 1487, 1488, 1489, 1490, 1491,1492, 1493, 1494, 1495, 1496, 1497, 1498, 1499, 1500, 1501,1502, 1503, 1504, 1505, 1506, 1507, 1508, 1509, 1510: n = A,T,C or G
  misc_feature 1511, 1512, 1513, 1514, 1515, 1516, 1517, 1518, 1519, 1520,1521, 1522, 1523, 1524, 1525, 1526, 1527, 1528, 1529, 1530,1531, 1532, 1533, 1534, 1535, 1536, 1537, 1538, 1539, 1540,1541, 1542, 1543, 1544, 1545, 1546, 1547, 1548, 1549: n = A,T,C or G
  misc_feature 1550, 1551, 1552, 1553, 1554, 1555, 1556, 1557, 1558, 1559,1560, 1561, 1562, 1563, 1564, 1565, 1566, 1567, 1568, 1569,1570, 1571: n = A,T,C or G
tttctaaatctctttctctgtgaacaggttaacaaaagacactttataagtgtctataaatttataactggtgacttcgatttatatataaaattagtctatgtttttttttattttttaaatgtacattttggaggacatgttgtcacaaaaaaccttctgtgtacgtgcatgtttggttgtgtgattatacctacaactttcatttcataaatctcctaatatatatagtttggaaataattaaataagtctatatttcaagaaatttaaaatatagtattttgttgttgttgtttatgcttgtgctgaaatatatcaatatcatttttctggggcctgttcactgtgtgttattttgatgccattacccattaaactcatgaaactttactctttagataaaactcattggctttttgactagagatacgtagtgtctaaggggaactttgatcatggcagaaatttataggatgattttaagaagatgctttttaacgtttcaaacactttattatagtaacatttagaaaacccaaagaatatagttaatgaattattttatttataaaactcatacaataaaaactactttaatattcaaaagtcatatatgtaaatattatcccaagaaataggacaaagctactttcttcagtcgcttgttatagaagaaaatactcaatgatcactacttcataacatagtgataatgttaaaagaaaacaagaagccaaaacttaaacctaaaagaataaaacataaacaatttttccaatattatagtcaacaagtatgtcaaaggtgttatttgaaagcacagtaaaatgtagtattgagcatgaaggaaatttttttaaaattagccaatttcttagagcagaatgaatggaaagacagagccacatggacatttattgacaaaaaagggttatagcgaaatagacaatttttcaggtttacatatgaagattctctcctttaaatgatacatattgtttcacactatagtctataatttattcactattctcttattattagacatgtaggtcatttctataactactataaaacaatgccacaatggctaatgccattactgtgcctctacttatgggttcaaatatcacaaacccattggagagtatatccctccaaataatttagataaaactaaattgccctccaaagaatagtatagatttttctacatcttcaaggagtttgtgaaaatattatttcctctataacttgcctaayattgactgttccaattttttagctgtttgccaaataaataggctactttctcatttttattatcatttgcagttccttgatgcaggttaatttgaacatttttatcaccagtttgtctgcatatctaatccaaatttcccacactgaaattatatattaacttatttgtttttagtattaaatttgttttcttgtatgttctcattnnnnnnnnnnnnnnnnnnnnnnnnnnnnnnnnnnnnnnnnnnnnnnnnnnnnnnnnnnnnnnnnnnnnnnnnnnnnnnnnnnnnnnnnnnnnnnnnnnnngacaatagcacagatctcattgtacatagaatctaaaaaagttgatcccacagaaataaagagcaaatggtggttactagaatctgggaaaagcagggggaaaggaggatggtcaataggtacaaagagatttggtcaataggtacaaagttatagactgataagaggaataagttctagttttctgttgcacagtagagtgatgatagttaaaaattacatgttatatttcaaaatagctacaagagattttaaatgttttcaccataaagaaatgataaatgcttgacgtgatgggtatgctaattgccctaatttggttatgacacattgtatatatgcattgaagcatcacactggacctgataaacatgtatgattgctatgtgtcaaaaaatacaataaaactttaaaaataaagtttaagagaagaaagaaattttaataaaatttaatctatactgaaaaaaagaagtagtgccacatgcaggctaagcctcaaggtagatgtaataat

SEQ ID NO: 703812 - DNA, 2088 bp, Homo sapiens
  misc_feature 1472, 1473, 1474, 1475, 1476, 1477, 1478, 1479, 1480, 1481,1482, 1483, 1484, 1485, 1486, 1487, 1488, 1489, 1490, 1491,1492, 1493, 1494, 1495, 1496, 1497, 1498, 1499, 1500, 1501,1502, 1503, 1504, 1505, 1506, 1507, 1508, 1509, 1510: n = A,T,C or G
  misc_feature 1511, 1512, 1513, 1514, 1515, 1516, 1517, 1518, 1519, 1520,1521, 1522, 1523, 1524, 1525, 1526, 1527, 1528, 1529, 1530,1531, 1532, 1533, 1534, 1535, 1536, 1537, 1538, 1539, 1540,1541, 1542, 1543, 1544, 1545, 1546, 1547, 1548, 1549: n = A,T,C or G
  misc_feature 1550, 1551, 1552, 1553, 1554, 1555, 1556, 1557, 1558, 1559,1560, 1561, 1562, 1563, 1564, 1565, 1566, 1567, 1568, 1569,1570, 1571: n = A,T,C or G
tttctaaatctctttctctgtgaacaggttaacaaaagacactttataagtgtctataaatttataactggtgacttcgatttatatataaaattagtctatgtttttttttattttttaaatgtacattttggaggacatgttgtcacaaaaaaccttctgtgtacgtgcatgtttggttgtgtgattatacctacaactttcatttcataaatctcctaatatatatagtttggaaataattaaataagtctatatttcaagaaatttaaaatatagtattttgttgttgttgtttatgcttgtgctgaaatatatcaatatcatttttctggggcctgttcactgtgtgttattttgatgccattacccattaaactcatgaaactttactctttagataaaactcattggctttttgactagagatacgtagtgtctaaggggaactttgatcatggcagaaatttataggatgattttaagaagatgctttttaacgtttcaaacactttattatagtaacatttagaaaacccaaagaatatagttaatgaattattttatttataaaactcatacaataaaaactactttaatattcaaaagtcatatatgtaaatattatcccaagaaataggacaaagctactttcttcagtcgcttgttatagaagaaaatactcaatgatcactacttcataacatagtgataatgttaaaagaaaacaagaagccaaaacttaaacctaaaagaataaaacataaacaatttttccaatattatagtcaacaagtatgtcaaaggtgttatttgaaagcacagtaaaatgtagtattgagcatgaaggaaatttttttaaaattagccaatttcttagagcagaatgaatggaaagacagagccacatggacatttattgacaaaaaagggttatagcgaaatagacaatttttcaggtttacatatgaagattctctcctttaaatgatacatattgtttcacactatagtctataatttattcactattctcttattattagacatgtaggtcatttctataactactataaaacaatgccacaatggctaatgccattactgtgcctctacttatgggttcaaatatcacaaacccattggagagtatatccctccaaataatttagataaaactaaattgccctccaaagaatagtatagatttttctacatcttcaaggagtttgtgaaaatattatttcctctataacttgcctaacattgactgttmcaattttttagctgtttgccaaataaataggctactttctcatttttattatcatttgcagttccttgatgcaggttaatttgaacatttttatcaccagtttgtctgcatatctaatccaaatttcccacactgaaattatatattaacttatttgtttttagtattaaatttgttttcttgtatgttctcattnnnnnnnnnnnnnnnnnnnnnnnnnnnnnnnnnnnnnnnnnnnnnnnnnnnnnnnnnnnnnnnnnnnnnnnnnnnnnnnnnnnnnnnnnnnnnnnnnnnngacaatagcacagatctcattgtacatagaatctaaaaaagttgatcccacagaaataaagagcaaatggtggttactagaatctgggaaaagcagggggaaaggaggatggtcaataggtacaaagagatttggtcaataggtacaaagttatagactgataagaggaataagttctagttttctgttgcacagtagagtgatgatagttaaaaattacatgttatatttcaaaatagctacaagagattttaaatgttttcaccataaagaaatgataaatgcttgacgtgatgggtatgctaattgccctaatttggttatgacacattgtatatatgcattgaagcatcacactggacctgataaacatgtatgattgctatgtgtcaaaaaatacaataaaactttaaaaataaagtttaagagaagaaagaaattttaataaaatttaatctatactgaaaaaaagaagtagtgccacatgcaggctaagcctcaaggtagatgtaataat

SEQ ID NO: 703813 - DNA, 1693 bp, Homo sapiens
tatgggagtcagggagaaatctggggaattatttattcagagacatctgtggggcattttctggtgactttcagaaacagtaagaaaataagttagaaagaaagacagagattcttccttcttccctcccttcaccttatttgagttctttcttcccatcctccttcgtcatatggatacaaacatgaaaaaaataaaatatcaaaatggatcaaaaatgtttatttttaatgaaggtcctgatactatatagtatctattaatctgtttagaacattacaataataaaaccaagggcatgaatgttatatatatatatatatacatacatatatcattatatacatatacatacatatatatatatatatatatacacacacacacacacacacacatatatatatgggctgaacaaatttgctcaagcaaagacagccacatttttgctctgcattcccaaaaccaatatacatgagcttttagaagtgtgtgcaatttagtcacaaggggaaccaaatgaaagagggtgggtatttttgtgaaaacctatcatctttaacagcaaaataaaaaaatgcctaaagctgatgtcctgactaatcactcagattatagttaggcccaggaagagaagacttttcattaggaaacaaataattcacaacaggaaatgcaggtattgacaactgttcctccacttttgaaatgagactgggagattgggtggggggaggcactatattcaatagatatatctttcagaaaattgttcctatcactataaagtgacctcatatatgtatttctttttagaaaaaaatctataaattgtgtttataaataagtttctagtaattgtcttcctagaagattctgctaaaaccaaaaagaaccgtcaaagttcagaagaagcggtaagaaaaagaataaaggcaaatatttcagtgaggcaaatccaaagcaaacactgaaacaaatgaggttacagacaatggtatgaatgttaatgaacataaagcctgatggtggaaatctgctaaatgcatagttgagggaattgagaggacatttccctaacagtttgttcctgttgcttaaaattttttaaaaaagtyaccgcaggatggcccaattcagtcccaacatcatattatgcagatgagttacaattccctgctgaagttctgcagaagagttgagtctaatttagcacagttgtttcacacaatatcatcaagatcagtgaatgaatacccaaagcatgtgtgaaaggctgagaagtgattgcagttttgcaaccagaaactattctttggaggttcacaaatgtgtgagaaagggaaaagaaaccacatacaacaacaacaagaaaaactcacacaagagttagttaactttggacattttaccttcaacttgaacctgtattttattatttttattcataatgatgaaaacagcattttcatcattgatatcatttatgatatcagtgttgatatcgtaaaccctggaggaaggcttttgtcagacatttgggctcatgctatgcacgcacttatatcttaattcttccaactgcggatgttcatgggaaaagacctgtctcagcaatctgctcactattaaccttttcacagggaggaagaatagatggcatttgtttatttacctattctcttattccttc

SEQ ID NO: 703814 - DNA, 1693 bp, Homo sapiens
tatgggagtcagggagaaatctggggaattatttattcagagacatctgtggggcattttctggtgactttcagaaacagtaagaaaataagttagaaagaaagacagagattcttccttcttccctcccttcaccttatttgagttctttcttcccatcctccttcgtcatatggatacaaacatgaaaaaaataaaatatcaaaatggatcaaaaatgtttatttttaatgaaggtcctgatactatatagtatctattaatctgtttagaacattacaataataaaaccaagggcatgaatgttatatatatatatatatacatacatatatcattatatacatatacatacatatatatatatatatatatacacacacacacacacacacacatatatatatgggctgaacaaatttgctcaagcaaagacagccacatttttgctctgcattcccaaaaccaatatacatgagcttttagaagtgtgtgcaatttagtcacaaggggaaccaaatgaaagagggtgggtatttttgtgaaaacctatcatctttaacagcaaaataaaaaaatgcctaaagctgatgtcctgactaatcactcagattatagttaggcccaggaagagaagacttttcattaggaaacaaataattcacaacaggaaatgcaggtattgacaactgttcctccacttttgaaatgagactgggagattgggtggggggaggcactatattcaatagatatatctttcagaaaattgttcctatcactataaagtgacctcatatatgtatttctttttagaaaaaaatctataaattgtgtttataaataagtttctagtaattgtcttcctagaagattctgctaaaaccaaaaagaaccgtcaaagttcagaagaagcggtaagaaaaagaataaaggcaaatatttcagtgaggcaaatccaaagcaaacactgaaacaaatgaggttacagacaatggtatgaatgttaatgaacataaagcctgatggtggaaatctgctaaatgcatagttgagggaattgagaggacatttccctaacagtttgttcctgttgcttaaaattttttaaaaaagttaccrcaggatggcccaattcagtcccaacatcatattatgcagatgagttacaattccctgctgaagttctgcagaagagttgagtctaatttagcacagttgtttcacacaatatcatcaagatcagtgaatgaatacccaaagcatgtgtgaaaggctgagaagtgattgcagttttgcaaccagaaactattctttggaggttcacaaatgtgtgagaaagggaaaagaaaccacatacaacaacaacaagaaaaactcacacaagagttagttaactttggacattttaccttcaacttgaacctgtattttattatttttattcataatgatgaaaacagcattttcatcattgatatcatttatgatatcagtgttgatatcgtaaaccctggaggaaggcttttgtcagacatttgggctcatgctatgcacgcacttatatcttaattcttccaactgcggatgttcatgggaaaagacctgtctcagcaatctgctcactattaaccttttcacagggaggaagaatagatggcatttgtttatttacctattctcttattccttc

SEQ ID NO: 703815 - DNA, 1693 bp, Homo sapiens
tatgggagtcagggagaaatctggggaattatttattcagagacatctgtggggcattttctggtgactttcagaaacagtaagaaaataagttagaaagaaagacagagattcttccttcttccctcccttcaccttatttgagttctttcttcccatcctccttcgtcatatggatacaaacatgaaaaaaataaaatatcaaaatggatcaaaaatgtttatttttaatgaaggtcctgatactatatagtatctattaatctgtttagaacattacaataataaaaccaagggcatgaatgttatatatatatatatatacatacatatatcattatatacatatacatacatatatatatatatatatatacacacacacacacacacacacatatatatatgggctgaacaaatttgctcaagcaaagacagccacatttttgctctgcattcccaaaaccaatatacatgagcttttagaagtgtgtgcaatttagtcacaaggggaaccaaatgaaagagggtgggtatttttgtgaaaacctatcatctttaacagcaaaataaaaaaatgcctaaagctgatgtcctgactaatcactcagattatagttaggcccaggaagagaagacttttcattaggaaacaaataattcacaacaggaaatgcaggtattgacaactgttcctccacttttgaaatgagactgggagattgggtggggggaggcactatattcaatagatatatctttcagaaaattgttcctatcactataaagtgacctcatatatgtatttctttttagaaaaaaatctataaattgtgtttataaataagtttctagtaattgtcttcctagaagattctgctaaaaccaaaaagaaccgtcaaagttcagaagaagcggtaagaaaaagaataaaggcaaatatttcagtgaggcaaatccaaagcaaacactgaaacaaatgaggttacagacaatggtatgaatgttaatgaacataaagcctgatggtggaaatctgctaaatgcatagttgagggaattgagaggacatttccctaacagtttgttcctgttgcttaaaattttttaaaaaagttaccgcaggatggcccaattcagtcccaacatcatattatgcagatgagttacaattccctgctgaagttctgcagaagagttgagtctaatttagcacagttgtttcacacaatatcatcaagatcagtgaatgaatacccaaagcatgtgtgaaaggctgagaagtgattgcagttttgcaaccagaaactattctttggaggttcacaaatgtgtgagaaagggaaaagaaaccacatacaacaacaacaagaaaaactcacacaagagttagttaactttggacattttaccttcaacttgaacctgtattttattatttttattcataatgatgaaaacagcattttcatcattgatatcatttatgatatcagtgttgatatygtaaaccctggaggaaggcttttgtcagacatttgggctcatgctatgcacgcacttatatcttaattcttccaactgcggatgttcatgggaaaagacctgtctcagcaatctgctcactattaaccttttcacagggaggaagaatagatggcatttgtttatttacctattctcttattccttc

SEQ ID NO: 703816 - DNA, 634 bp, Homo sapiens
ttccccaaccccctctccctgcaggtaagcacatcgttagcttcttgtgtatcatcccgggatttttgccgatacaagcaaacacaagcatatccctattttcctccctttcccaatgtttttgagaaagaatttmggagagaaggaacttgctttatttgtcctggtagtgggaatccatgaatagagaaggtatgatggtatatcagcagcttggaagaatggaaatgatttctgttatttagattcccagaatcgttttatttgactttggttctttggttaaacctattctttgggcctcttaactctttaagcttcaaaaatctttgttgtctgaacaagcgaaagttttagatgattcatagagctcatcttttttgcctaacaacaaaaacatgtgtatgctgactttaagaaaagaacacgaaacacagtggcaagtgcggtacagtgtccccttaggaagagctgccctcaccctgggtctcagtgttagcatgttggggtgctgcccatggcctgaggcatgaacatttattccacccagaagcttttctttatcttaaatcaacctggacatagagacaaagaaggccttagaaatatcttatttttctgacacttaagtgtc

SEQ ID NO: 703817 - DNA, 603 bp, Homo sapiens
agctgacattttcagaattggcctttctcttggactgaaaactcatgtatgcaaatgctctctcaacatctccacttgaatatctaacagatcattcaaaccttgcatttctaaaactgaattttttatatccctccaccaatgttattctgctcacagcttttcccagcccagctgatggcaactccattcttccaactgctcagggcaaagggcatctctctttttctcaggtttgacctctaatccatgagaatttcctttttgctcttatgccaggcatgttttgaccttggacctgttttcactgtctggaatgctcacccmgctcttggctgccccttcaattcatttaatatgctacgtaatttatttgctgattttgtttgatatttatcgtctccttctttccaacatactctgccaaacccatccctgactagaatacaagttccactaatgggtgcatttgtttttctctgttttgtcctttgatgcatccctagaacccaaaacaatacctggcacatgttaaaggctcaatacatatgtttaaatcaaagaataatagggagaaggccaaagtgggaaccagatatatgg

SEQ ID NO: 703818 - DNA, 578 bp, Homo sapiens
tcaaaacaayaaacagtaattgagtcaataagacatatgctgtagggaaatgttcccaggtattgatccaaaatattggcatgatatttacatctgtttgccaaagtcatacattgtcctaattccatgaacagacaggcagcagggcatagaggcacggaggctgcatggagatccctcactgcattgtccgctgtcttcccacatggcctttggcacatggctccccctgccaccagctgcctccttctgggggagtgcgagaagactgaagttccaggaactgcccagtattctattctgcattggaatcctctaataaataatgccatatcaatgtagctaattatcattatttgagcatacaacttgagtgcatccatctggaacattcaaaattgaccctctatggtatgatgagtgtgtgtgttgtgggcaggaaaatcctccataggagaaatctagcattacccaggatgagatggagaaatccttcactaatccatgcgctactcatctgaagctttattttctagactttctcttctgaagtgtacatttagtccccatgcaaatga

SEQ ID NO: 703819 - DNA, 578 bp, Homo sapiens
tcaaaacaacaaacagtaattgagtcaataagacatatgctgtagggaaatgttcccaggtattgatccaaaatattggcatgatatttacatctgtttgccaaagtcatacatygtcctaattccatgaacagacaggcagcagggcatagaggcacggaggctgcatggagatccctcactgcattgtccgctgtcttcccacatggcctttggcacatggctccccctgccaccagctgcctccttctgggggagtgcgagaagactgaagttccaggaactgcccagtattctattctgcattggaatcctctaataaataatgccatatcaatgtagctaattatcattatttgagcatacaacttgagtgcatccatctggaacattcaaaattgaccctctatggtatgatgagtgtgtgtgttgtgggcaggaaaatcctccataggagaaatctagcattacccaggatgagatggagaaatccttcactaatccatgcgctactcatctgaagctttattttctagactttctcttctgaagtgtacatttagtccccatgcaaatga

SEQ ID NO: 703820 - DNA, 611 bp, Homo sapiens
gaagactcgcctttgaactgtgtggagttgaactaaaaagtgcagctgttatataaatcagagagaaaagaacaaggttacacctgtgggttgactcaacagctatattttctcagctgaaatagtagagtagtataatgatagctaatacaatattcagattaattaagtaatcttgacttcaattatttagataactccagagaatagggaattagttccaaaattaaagtgttaatttcagaaatggagacaaaagggtccctatcaggaaatcactcaggaaaatattttcctaaaagatttgaacatttaatggcaaggaaagttataaacaggaccaggtgttatcaatttaaggccagggatctaatatcaactttattatgtacgtacagagaacatgtcacaaacaagtttgtagatatctatttgttagaaattgttttctaactacctgcatcaatctaaatttgtctctaacttgatgyctggtaaaaaagaacaggtaaatgtgtgccaagctggtcataatacattactgttaacatttctgccataacaaggatcatctatgtgtttcgatttgtacagaggtagtgtgctgaaac

SEQ ID NO: 703821 - DNA, 653 bp, Homo sapiens
tctgatatttctctatgtgtcactattaagtagtggtaatgtggtggaaaacagacatgcagaaatgactcttcaagtttctttctatttttattatacagcataattagaagaaacatgattttctgagttctgattgggaaagagaaaaaaggagcagtatctgacatttggargctgacttggctctcacacgaggtcttattattgtctgactagacataaacaatctcacagaatactaaactcagacaagtttactaacctcagacaagatcatgatgaaaggagacaagtcaaggacatttcataattctgtctaaacacagatagaaacaaggtcactatgacacccacaaagtatcaaacatccttttacctcttcaaagtttgtgactgatatttatcaattacatctctttcttatcagtaaagtttatcgagatacgctctcatagatgctcctctgcttcagacagcatacaactttgagtgaacccccacttttgtaggttctcccccaaattacccagccaaagacaacttactgagataccctacgattttcgatgcaacaagtaataagccaaatcttcttcaactagagggcattccctgtgggttttggttgtaagacattcacatacttttga

SEQ ID NO: 703822 - DNA, 653 bp, Homo sapiens
tctgatatttctctatgtgtcactattaagtagtggtaatgtggtggaaaacagacatgcagaaatgactcttcaagtttctttctatttttattatacagcataattagaagaaacatgattttctgagttctgattgggaaagagaaaaaaggagcagtatctgacatttggaagctgrcttggctctcacacgaggtcttattattgtctgactagacataaacaatctcacagaatactaaactcagacaagtttactaacctcagacaagatcatgatgaaaggagacaagtcaaggacatttcataattctgtctaaacacagatagaaacaaggtcactatgacacccacaaagtatcaaacatccttttacctcttcaaagtttgtgactgatatttatcaattacatctctttcttatcagtaaagtttatcgagatacgctctcatagatgctcctctgcttcagacagcatacaactttgagtgaacccccacttttgtaggttctcccccaaattacccagccaaagacaacttactgagataccctacgattttcgatgcaacaagtaataagccaaatcttcttcaactagagggcattccctgtgggttttggttgtaagacattcacatacttttga

SEQ ID NO: 703823 - DNA, 653 bp, Homo sapiens
tctgatatttctctatgtgtcactattaagtagtggtaatgtggtggaaaacagacatgcagaaatgactcttcaagtttctttctatttttattatacagcataattagaagaaacatgattttctgagttctgattgggaaagagaaaaaaggagcagtatctgacatttggaagctgacttggctctcacackaggtcttattattgtctgactagacataaacaatctcacagaatactaaactcagacaagtttactaacctcagacaagatcatgatgaaaggagacaagtcaaggacatttcataattctgtctaaacacagatagaaacaaggtcactatgacacccacaaagtatcaaacatccttttacctcttcaaagtttgtgactgatatttatcaattacatctctttcttatcagtaaagtttatcgagatacgctctcatagatgctcctctgcttcagacagcatacaactttgagtgaacccccacttttgtaggttctcccccaaattacccagccaaagacaacttactgagataccctacgattttcgatgcaacaagtaataagccaaatcttcttcaactagagggcattccctgtgggttttggttgtaagacattcacatacttttga

SEQ ID NO: 703824 - DNA, 653 bp, Homo sapiens
tctgatatttctctatgtgtcactattaagtagtggtaatgtggtggaaaacagacatgcagaaatgactcttcaagtttctttctatttttattatacagcataattagaagaaacatgattttctgagttctgattgggaaagagaaaaaaggagcagtatctgacatttggaagctgacttggctctcacacgaggtcttattattgtctgactagacataaacaatctcacagaatactaaactcagacaagtttactaacctcagacaagatcatgatgaaaggagacaagtmaaggacatttcataattctgtctaaacacagatagaaacaaggtcactatgacacccacaaagtatcaaacatccttttacctcttcaaagtttgtgactgatatttatcaattacatctctttcttatcagtaaagtttatcgagatacgctctcatagatgctcctctgcttcagacagcatacaactttgagtgaacccccacttttgtaggttctcccccaaattacccagccaaagacaacttactgagataccctacgattttcgatgcaacaagtaataagccaaatcttcttcaactagagggcattccctgtgggttttggttgtaagacattcacatacttttga

SEQ ID NO: 703825 - DNA, 653 bp, Homo sapiens
tctgatatttctctatgtgtcactattaagtagtggtaatgtggtggaaaacagacatgcagaaatgactcttcaagtttctttctatttttattatacagcataattagaagaaacatgattttctgagttctgattgggaaagagaaaaaaggagcagtatctgacatttggaagctgacttggctctcacacgaggtcttattattgtctgactagacataaacaatctcacagaatactaaactcagacaagtttactaacctcagacaagatcatgatgaaaggagacaagtcaaggacatttcataattctgtctaaacacagatagaaacaaggtcactatgacacccacaaagtatcaaacatccttttacctcttcaaagtttgtgactgatatttatcaattacatctctttcttatcagtaaagtttatcgagatacgctctcatagatgctcctctgcttcagacagcatacaactttgagtgaacccccacttttgtaggttctcccccaaattacccagccaaagacaacttactgagataccctacgattttcgatrcaacaagtaataagccaaatcttcttcaactagagggcattccctgtgggttttggttgtaagacattcacatacttttga

SEQ ID NO: 703826 - DNA, 2263 bp, Homo sapiens
  misc_feature 2163, 2164, 2165, 2166, 2167, 2168, 2169, 2170, 2171, 2172,2173, 2174, 2175, 2176, 2177, 2178, 2179, 2180, 2181, 2182,2183, 2184, 2185, 2186, 2187, 2188, 2189, 2190, 2191, 2192,2193, 2194, 2195, 2196, 2197, 2198, 2199, 2200, 2201: n = A,T,C or G
  misc_feature 2202, 2203, 2204, 2205, 2206, 2207, 2208, 2209, 2210, 2211,2212, 2213, 2214, 2215, 2216, 2217, 2218, 2219, 2220, 2221,2222, 2223, 2224, 2225, 2226, 2227, 2228, 2229, 2230, 2231,2232, 2233, 2234, 2235, 2236, 2237, 2238, 2239, 2240: n = A,T,C or G
  misc_feature 2241, 2242, 2243, 2244, 2245, 2246, 2247, 2248, 2249, 2250,2251, 2252, 2253, 2254, 2255, 2256, 2257, 2258, 2259, 2260,2261, 2262: n = A,T,C or G
tggtattcttccatattacaaacactgagttttgtgacctttcagggtggggaataagtgatatgtctccaaatggtgagactgtcaaattctgttggctatggtcatgatacctgatggaaggtaactagtaatttctgtttatccttgtgtaaatcatctcatcatgttctttgcccatttttctacttgaaccactgaacactttgtacaaatactttgtatttaataacatatatatatgtgtatatatatatgtgtatatatatatatatgtacaatatatatagtcttctgataactttggggttggttttctcctggttctctagttcttttatttgtgatgttaggtcattaaattaagatctttctaactttttgatgtggttatctagtgctataaatttccctcttaacactgctttagctgtgtctcagagattctggtatgttgtatttttgttctcattagtctcaaagaactttttgatttctgccttaatttcatcatttacccaaaagttgtttaagagcaggttattcaatttccatgtaattgtataattttgagtgaatttcttactctttatttctaatttggttgtgctgtggtctgagagattgtttgttatgatttcagttctttgggagtgatctctgccttgctgcctcagggctgtgaatgccatagacatgttgccatcatcaccactattggcaagttctgagtgatctgtaaataaataaagtcttattggaacacaactgcactcattcttttatatattgtctatgggcacttttctacggctacttttgttctacagtggtggaactgggtagtcgcaacagggaactgaactgcaaagccaaaagtatttactctgactgttcacagaaaaaaaatggctgctctaaattaaatacaaaattttcacagccaaataacatggcatttacttgttggtaaataaatttctgaatacaggtgagtgtagcaggcaagatgaggatggaagacaaggtagatgttttaacttctgaatgagcagactcagtttccacctggtggcagtaatctgggacacatgtctgtttcctcaaccccaaggcaattctggaagttgtccttgtctgaactactatttcagagtaccctattgtacataaatcattctagggagaaaacagctcttcttttttcctcttctctttgccagctagcatttagagaataggaaacgctcacattctgctgcctttccgtctggccccaacattcaccttaggagacttccctacacagaaagtgtatttattttgaaagtaatttattggaccttatctgagggtatatgccctggctaccccctgctcagtgttgaggacagtggacagaaggtctactggcccagctccttggaatgtaaacctttatttaattatcctgatgactgtcctagaaccccctttagtatctgtatttgactacaaacatggagtttccctagaacaggagttctcaaactttatgtgcatcagaatcatcaggaaggcttgtaaaaatctagatccttgggttccacccccagaatttcagatttgtgggtcaggagtgagattcaagaatttgcatttccatcaggttcccaggtgaggatgctactgttggtccaggaaccaccctttggaaacccctgctttagagttttattgcgaagaacaggtcttatctgtagagtagcttttctcatttttgctttgagctatagttttttccccactttccctcttcccrtactttatgaatttctggtacactaatagtatttattttatttgttttggggcagattttattctttcaagctactctttctattatttccataggcactgggaacaggaggggagagagacacatatacttcatcttctgttgtgatctaatcttcctttgtgatttcgtcccattcctttacacttaaataggactttttattctatatttacttctagtatttaatgggttaaaggttaccaattgcaatttattttagagtgataatttaactttttttccaaatagtttgtcccagaccatttattcaataatctttctttttctcactgatttgtgatgccacctttaatatatannnnnnnnnnnnnnnnnnnnnnnnnnnnnnnnnnnnnnnnnnnnnnnnnnnnnnnnnnnnnnnnnnnnnnnnnnnnnnnnnnnnnnnnnnnnnnnnnnnnt

SEQ ID NO: 703827 - DNA, 576 bp, Homo sapiens
tatctgacagcacagacacaaaagtggcaaacaattgaccaagcaggtatctcctgtgggttacaacaccattttctcattagaatcactwgggttgcttttaagacatatagaatctgtacacagagagattcacactcaattattctgggatggggcaaaattggaaattgaaacatttttaaagctctcagttattctatcgtgcagctagaattacaagtcactgcatcaagccaacaaatgaataatcccaatccttctatctttgatgatttcaacaattaaaaaagtgtcctattttctggcatggtgctaccagtagaaggtaggcattagaagaacccaaatatcagcaaacatgaaacacttcattttggtgcccatttttcttttataagttcccactcatgttctatagcaggaaaatactgcaatctgttaagcactggtttaatgtaatatatctgtagtcaaattcaagtattatcatttcaattactatccagttcaaaattctctcttcacactgccttcactccctgcattcaactgcaattcaaactgcattcaact

SEQ ID NO: 703828 - DNA, 1344 bp, Homo sapiens
tgcaggttttaaaaagatgacattagagcaaaattctacaaggagttctgggctttgctgttgatgtaaatttcagcagtttggctcagacagggtcttaagtgtggtttcatgaatttgttcttccagtgaaactcactgaccacctctgtgccagtctctgctccacacttaggacttaatgttaaattggacaaggtccttgccctcagcgagtcttcctgtcatcttgcagaggtgcctataatctacaggcctcaaattacgtggatgagaaactgtattttaccagttttccctggaatcttcactgtatggagagttgacttatcccaaacaaaatcccaacagactaattataaatcagaatatgtgagagctggtagaaaccctttcacaactcatttcctacttacctcccaggccaattccacttaccctgatctagtgtcccacttccatcatggttcctccccagatccctggggagaatacacacacacacacacacacacacacacacacacacacacacatatatatgttctaaaatatagatagacagacagttagatagatagatagatagatagatagatagatagatagatagatatttaagtcagtacttgctatgcatggaaaaagaagctaatatctaaacatccaaatgacctgggcctagcattgagctaggtgtggttatctcatttaatgtagactatataacaactataaggtaagtatttttatgctcatttcatgtaatgtggaaacagaagcctgtagatggtaagttgcccaaagtcatagagctggcaaagggtgaagctcagattccagcaggcttgtctgatttcagaggccttccaatttcatgatcataatctcattattaagatcatctttccctcttaggtcagtagcagttaattctttctacttattccaggtgtcaactacttacttaargtcatctaatttacctgtcccaaacaatttttcaaaaaaaaagtcaaatgcatttcttccatttggtttcttaaccatggaaacagcagacattttcccaacttggggcataatttccaggatccaaacataccacaagttggttatttcgtcatggtcccattgagcaaaaaaaggaaaaagaaaccataatattttttccttttttcccttcctccttccttgcctcctttcttctattctttcttgtttcatttcctttcttccttctattcctggtttactaagcaccatgtactaggcaaagtgtactcatatcttggtgtaaaaaaacaaatgcaaacatatatttatcaggaaataggatatgta

SEQ ID NO: 703829 - DNA, 914 bp, Homo sapiens
gcatcttctcctttccttagactccaaatgcagcagtttttgctaaggatatgtaatctataaggccagagaacagttctgttcatgattgtaaataactaaatccaggtcacctgcaccctgcaccacatcaggtaattcagcctacacagaagttgccctgaaagcaagaaattcctttttgctattgctttcatatattgtgccacgatatattgaagaacctaaatggtggtggattttggttatttgaggttatgtatgatttttggaaggagtaaaacatctctcagtgtcatacccagtcaactaaagataaagctaagcaaacagttttgggatagaagatacctacagcataagacagtattcatttttatcctttttttttttttttttttttttttttttgagacagagtcttgctctatcrcccaggctggagtgcagtggcacaatctcggctcactgcaagctctgcctcctaggttcaggttcacaccattctcctgcctcagcctcccgagtagctgggactacaggcgcctgccacaaggcccggctaattttttgtattttttagtagagacggggtttctccatgttagccaggatggtcttgatctcctgacctcatgaaccacccacctcggccttccaaaatgctgggattacaggcgtaagccaccgcacccagctatcctatggttttaaaagcagttccaaaaagaatttaaaacaccatttcaacacctgtgtacatttggggggaagacagtaacaagcctccctgggcaagtacttttaaaggatagctctcatgtagctatggggatttggttttattaaaaaccaatatattcattgttattactggctccggtcccagccacgaaattcagaatcaacatttt

SEQ ID NO: 703830 - DNA, 914 bp, Homo sapiens
gcatcttctcctttccttagactccaaatgcagcagtttttgctaaggatatgtaatctataaggccagagaacagttctgttcatgattgtaaataactaaatccaggtcacctgcaccctgcaccacatcaggtaattcagcctacacagaagttgccctgaaagcaagaaattcctttttgctattgctttcatatattgtgccacgatatattgaagaacctaaatggtggtggattttggttatttgaggttatgtatgatttttggaaggagtaaaacatctctcagtgtcatacccagtcaactaaagataaagctaagcaaacagttttgggatagaagatacctacagcataagacagtattcatttttatcctttttttttttttttttttttttttttttgagacagagtcttgctctatcacccaggctggagtgcagtggcacaatctcggctcactgcaagctctgcctcctaggttcaggttcacaccattctcctgcctcagcctcccgagtagctgggactacaggcgcctgccacaaggcccggctaattttttgtattttttagtagagacggggtttctccatgttagccaggatggtcttgatctcctgacctcatgaaccacccacctcggccttccaaaatgctgggattacaggcgtaagccaccgcrcccagctatcctatggttttaaaagcagttccaaaaagaatttaaaacaccatttcaacacctgtgtacatttggggggaagacagtaacaagcctccctgggcaagtacttttaaaggatagctctcatgtagctatggggatttggttttattaaaaaccaatatattcattgttattactggctccggtcccagccacgaaattcagaatcaacatttt

SEQ ID NO: 703831 - DNA, 1035 bp, Homo sapiens
cagatttttattgaatagtcagtttcacagttcaagaaaacattgtatagcaagacattcatcttgctttagaaatctgaagtgtgtgtgtgtgtgtgtgtgtgtgtgtgtgtgttgtaatgaccttaacctagaatggtggtatcatcagaatctttttgtttagactgattccatttttgttcacacttgaagcaaatccaaactaatgagattttcttttaaataggtaaaacaagaatcatcatcacaaccatcgcttgtctgtcttttttttattaacgctcacttgcagaatcaacttaggcaggtgaataagtgacttagggaacaggcaagatatatgtttctgagctactcattgctagcatctttttagcacatggaaaaatatttaatatgttatatggtgtctagaacattttaagaaaaaatacccccagaagaattttgctatataattataagacattctttgaaaacattttttggttattttgtaagataattaaacacttgcttggattattggaaatgatatttgcattctttctgtttgagatgccaatactagcaatatatttacacccactgtctcctcagtttggatatatcacatatgattagagtgaaatgaaatcagaatttcctaaaggaccactttttgccatgccaatatgtgataagatttcttggatgtataccaggttctactttcatattttcctaggtctattttcctttccatgtttactccagttttcattttggtaattaccatactggaggtgataaccttcacaagtgatggcattacttattccttatttactaatctaataggaaatgattgaaaagggcattcaatttgtttrctcactttttattaagagatgttttggggggaattgaatgtatttccaggattcaaacaccttggcctttaatttgtcaaacttcggtatttaagtaaatgatctacattctgactgaattaattgaactcagggaaggctgtacaaaaagattgttcct

SEQ ID NO: 703832 - DNA, 1356 bp, Homo sapiens
tcttttgtttattatttttagtcctataaaatttatgatgtattaacggctgcttacattattaatttcttggtacttcacactcactcaaattgaagaaattacctattgacaataaatattatagtgtagaaagaattcaacaaattcatctttcagataacaaccgggtgcttcgccatttcatagctctattgtttttatgcccttgcctcatttcactaaacagaaagcattcttataagtgaggattttgtcttatttaatattattcagtatttgtctcatttaaagtaacatcctttaaaatacacatgacctcccaaaaaagagatttagtgaattctaaccgaaatgatattggcagttattgtactgagcagttagtattttccaaaactatatttgtgtgaaataagttttttgaatatgggtaattgggtgaatattactgtcatatgatatcaaaagacaaaatccgaacwtatttaattaaataattggcttttatttgtgattcatgaattgggaaacatctcctctaaaataaagaggtactactctgggcgtggcagaaaagccagttcttacaagatagcttcagcagaaaaaaggaaataacaaaaagcagattgattaacatcaggttagttcaggtaactttctttaagtgttaaagcagaggggacttctttatcatgctagctaaaactggcatgtttgggaattcagcaatcatctttctccaggtttctcaaaagttcagataaacaatttggttttcgtttggtgatgtgaaactttagcatgagtgactccatttgggtttagtccactgaggcctagtgcaggagctcagcccaaaacaatggccttccataaaatgtatttagcaatgataattacttgatgactttttgctttagtatatatgtagttttaaaatcaacataatttctaacatcttaagaaaaaagcaacagggtaagattcttcgcacacatcaaatatcttttacaagaaaatgctgaatttactaacatatataggtgttgtgaagatgttaaatgagcttaatgtatagttttttttttctactggttcaattattctggaaaaatattcaatgctagtgtttattttgtctcccagaaatgagtcaagaaactcgtatctgcaatttagtgtattatcttaccaattcctgtgtagttggtaccaaacaaaccaggattagaattcttgagcaattttatgaatactaatttgttttgttgtttaattcctggaagtgtaattaatgtacagttttcatataaataatatgtaagatataaatataatttttaaatagca

SEQ ID NO: 703833 - DNA, 1035 bp, Homo sapiens
ttcttggactagtcactcacagcataaaggcctgagtttaagagtttgaaaagaaggaaaagaaagcaaacagaaagaaagttgatgtgtgtttatagtccccgctctacctcaggtgaaggccagacatccacatccacagaaaggaacaactggccttttagacagttggaccagggatccagtgtccattgggatggccgtgtaatgaaaatggctagctccacttgtcctgccattcctaatggaggaggattccaaatgcagtacttagagtagttcttgctttagatctggaaatataggtagccagatacagtactatcagaaactctggttaaaatacacataaaaactcagaatctactgtgtttagggctttcttccatcttaacttagaatgttttagcttataaaaatggaaccttgaaatagtctcttaaaccacagaccaaaacatgtaggtggatgtgtatatacacgaatatgggtgtatctctgttcacacacacccagttttgaccattttgcttcattactacattatgataaatggtaaagcaaaaatcttatttaaaaaaagctgtagtaaacgacgcaatcagcagccaggtatagactytacatcccaaaccaaacacgatgctatatatttacaaagaaaatcattttcctcaacaaccctcaactgtaaaggtaattttttttttttttttttttttttttttgtacaaacactatctggtaacagttttaccggttacaactgggaaggcatctggaagaaggtcccctctttgtctttctctctcccctgtctcaatgaggctccgagctctgcctggcggacattcccacacagtgctggttttgaaaggtagtcaagacacagtcgcccgttcaggacgggtctccacagtcctgcccctgggccctccccgttacaaggcctttttgtgagggctgctacgcaaactctctttcccccgcctctgccgtaccacaaagtccttctcattagaaagagagatgggg

SEQ ID NO: 703834 - DNA, 620 bp, Homo sapiens
aaatggaagctcccactgtaggtggagggtgaattggtaaatctatattagagaggaatttgacaatrtcttttaaaattgacaatgtttaagccctcaacccagctctagtactcataggtatgtgtcctaggaaaacttgagcataagcaaattatagaacaatgttcactgaagcattatttataatatagagaagataatgataattaaattatgccataatcatgtaatacatggcaattaaagaaaataaactgagtcaacatgcataagtctacaaaagacataatgttaaagtagctgactttatgtaaactttatgaatccatgcatacaaattgcaaatattgtgaaatattatattcttacacacattcagtgatctttcactatccaaatttttgctattcaaatttaggaattgatgagatctggtacatttctttataaatctctctctgtctaaactgtcattacttgctatttgaaattcagaaaccaaatagatttagataatatgctattctttgctccataaccctgtatccaaattcagatagagattataattgcatagagaggggaacttttcatacaaaataattgatgggaacctg

SEQ ID NO: 703835 - DNA, 620 bp, Homo sapiens
aaatggaagctcccactgtaggtggagggtgaattggtaaatctatattagagaggaatttgacaatatcttttaaaattgacaatgtttaagccctcaacccagctctagtactcataggtatgtgtcctaggaaaacttgagcataagcaaattatagaacaatgttcactgaagcattatttataatatagagaagataatgataattaaattatgccataatcatgtaatacatggcaattaaagaaaataaactgagtcaacatgcataagtctacaaaagacataatgttaaagtagctgactttatgtaaactttatgaatccrtgcatacaaattgcaaatattgtgaaatattatattcttacacacattcagtgatctttcactatccaaatttttgctattcaaatttaggaattgatgagatctggtacatttctttataaatctctctctgtctaaactgtcattacttgctatttgaaattcagaaaccaaatagatttagataatatgctattctttgctccataaccctgtatccaaattcagatagagattataattgcatagagaggggaacttttcatacaaaataattgatgggaacctg

SEQ ID NO: 703836 - DNA, 1448 bp, Homo sapiens
tccacgttaagaatatatcatttctatatgatacatctagcgtaaaaaccaaaagcccttagtaattcatgattaagtagaaaataaaaattttacttatatcataggataacatgcatttgactgtaagttccatgatagaagcaaggagtcttttttgcttaccatcatatcaaggcaaagggaaattgggactaggaaaagaagatgtgaaacccttctctccacccacctcatgttgtggtggctgcctcctgcctggtccccaggggtggtggcagtggtgtggccctcagaggatatcagaggctgggatcatgccttccagccaggctcagtgggtccaaaggtcaggagccttggtccagcccaaagcttgtgcgtgtttagtgcttatttcatcgtacatatacatcgtgcctgttcttcatttgctgtacttttgtaggttagtatcactgttggcataataatgagccaacctcaaggaatttccatatattcctatktatacatcatgattgcactttgtatttgaaactcacttttcttacacttttatttccttggtattcatagcacgttctgaattttcgtttcatatatcttttattttcccttgagagggaggataatttgaatatagatttacttaagcaagccagttatgcaagaatccatatttattaaagaagcaaagctaaggagtgcttattgattttataacaggattacttatatgttagataaattttataggatgtgtttacactgtggatgctttaatatatttaagttgtgatacaatttgaaaaattttagattgcacctaatacagcaaatcatctatgccaagtgtgtaatcaatagcaatgtggatttgttatgtaactgagtctttttaagtataattcagaaagtgtatattggagtctggaattaaattgcatttaggatctaatctgagaagctcaaaggaaaaacagcaggttaccagctgcccggtttctggctgtgggagagactaattgttaggaatttggatctctgttctgactgtttgtcttcagggaacatagggtattaatttttttccacaggaaaagaaaaaggagactgtaccattgtccattctgtatagcatgaagctattgattgagtagaatccatctcttaggtttcgcaagccattgcttacctctttcaaaggcattaaaattggaaggaatgggagtaaggattgggaggagctaaaaataggaaagtgcctaaggtgactaaatcctaaagcaaatctaaatgcatttctcaccctgctttcctttctcctccctggtcccttcccaggcctgacacctataccttggtagagttttggtagggccagtgaacaaaacaccagcattaacatttaatgcaggacatcagactttaaaaatgcaatggca

SEQ ID NO: 703837 - DNA, 580 bp, Homo sapiens
ccagctactcaggaggctgagacagcagaatggcgtgaacccaggaggccgaggcttgccagtgagccgagttgcgccactgcaactccagcctgagcaacagactgagactccgtctcaaaaaaaaaaaaaaaaaaatttctcttggtccaaattaaaaaaggaaggctggacacaggggctcacacctgtaatcgcagcacttkggatggctgaagcaagatgactgcttgaggccaggagtttgacacaagcctgggccacacagcaagactccatcactaccaacaataataataataataataataatgtaaaggtttaaaactttatcacccaacctggtcaatctcccattcctaaatagaacaatagatttaatttgtaagactgagaccagtcctaaccatgtgtattttggaaaggaaaaaaaagaaaaaaaaaaaaaaacagccaggtgatcagggttttatcaggtcactcctgttaagaaacacaaagacagaggaagaattctggggaaaatgatcagaaggaaaggtgagaagctaaaaagcaggtaattggcagtatagtttat

SEQ ID NO: 703838 - DNA, 580 bp, Homo sapiens
ccagctactcaggaggctgagacagcagaatggcgtgaacccaggaggccgaggcttgccagtgagccgagttgcgccactgcaactccagcctgagcaacagactgagactccgtctcaaaaaaaaaaaaaaaaaaatttctcttggtccaaattaaaaaaggaaggctggacacaggggctcacacctgtaatcgcagcacttgggatggctgaagcaagatgactgcttgaggccaggagtttgacacaagcctgggccacacagcaagactccatcactaccaacaataataataataataataataatgtaaaggtttaaaactttatcacccaacctggtcaatctcccattcctaaatagaacaatagatttaatttgtaagactgagaccagtcctaaccatgtgtattttggaaaggaaaaaaaagaaaaaaaaaaaaaaacagccaggtgatcagggttttatcaggtcactcctgttaagaaacacaaagacagaggaagaattctggggaaaatgatcagaaggaaaggtgagaagctaaaaagcaggtaattkgcagtatagtttat

SEQ ID NO: 703839 - DNA, 827 bp, Homo sapiens
gcccggatgccaggcccaagataaccacaagggggcgacaagcatcttggtcgcgtcgccttccccaaagcctcaggggccaggcctgagtcagctccccgaagaccagtcactgccagaccctgcgcttggtggcaccagcccctctgcctcatgctgccacccacacacagtgtcaggcaaggcccctgtttatgtcacacagacacagccagataccgagttcacacgggtactcccattcagaagcgttggttttatttggattgtagagaggggggtcccactatgtggcccaggctggtctcgaaatcctggattcaagtgatccctctgcctggccctcccaaagtgctgggattacaggcatgagctactgcwcccggcttgttgttatttttatttctgagacagggtcttgctctgtcacccaggctggagtgcagtggcgcaatcacagctcactgcagcctcgacctcccaggcttaagctatcctcccatctcagcctcctgagtagattggattacaggcatgtgccaccacacctggctaatttttatttatttattttaatttttagttctggggtacatgtgcaggatgtgcaggcttgttacataggtaaacgtgtgccatggtagtttgctgcacctatcatgcctaatttttaattttttttttgtagagttggcatctctttatgttgcccaggctggtctagaactcctggcctcaagtgatccttccacctcagcctcccaaagcactaggattaccagcatgagccactgtgcccagcttattcacaagtactgacgaagcac

SEQ ID NO: 703840 - DNA, 2110 bp, Homo sapiens
taaacccctaaatctctctggaggtctctctttctatctcttgtcagtcatctttaacttccaagtcttgccctttaacctaggttccagtttctttgcttagaaaagtataactgagcaaaaacttaagcttactcacctcctcacgatgttaaatttaaataaaacgttcaaaattatgagggatagaaatctacatcaaaaaaatcaactctgaaattattacctatatattttctcaaacctgaccaagggtagctcactattaacatttttgcaaataatacaaccaagctgtattacttagagccttttctacataacaccaaaaagtcaaaacatttttcaatgaaaattaaatgtaataggctgttttcatctatctaattgccaataacatgggataagatgaaaatattgcatttcatatcattgttcatcatatgacatttcctcagagacttaatccccatgcaacatatttggaaacaaccaaagctttaataagtgaaagtcaatgaacctcatgtaccttttataaaacatgacataagrcaatataattaagactaaacttatttcctgtggtgaaattaacttacagaaatgaaggtgtttatttattaaatgggatctctggagctctagccttattctttcccctcctgggaaggttttgattgtttgcctcctttctcttgcctgcttgctgtgtaatttaaaactgatgctttcctttgggaaacaaaatttgatcagagaacagcctgcaccaccagctaaacaaattaccaatgttttactcacttttctttctgtattccttttttccccccgcaagaatcaaagaattgtgtgcaggggtttacaagtgctgttgtacagttcagatttaatttgcaataaggaggacatatcagtccctttagtgacatatagctgcttgatgaaagtaaacttaggaacaaacaggttattattctcttttttcctattgcctgaagtctttctctgacaagcttttggtttctaaggagctagattttgataagtgattaaattacaaatataaaataattaaaatagaagcaatttttaaattatttcttatacaagcaaagaccaaaaaaattttatagtgcaatactttaaaatagataagatatatcatataaataccttttcattaacttgttaaatacaaaaatattcctggaacattaattctgtctcaagaattatggaaatgactgctattagaaggtataattttgaataatatgccatgtatacttggcaaaatttatgtaacattctattcacttatattgagaaaagcatgcttagaaatatatttatcatgcctttggatagcactaagataagctttattattcacatgattactggataataatcagaaatctttttagaatataagtaaatttagtcagtaaatcatatgcattgatgaattatttttcacttaacctcatatttgtttgtgaaggattctgttctagtccgcagtgacataccaagaaaaatctaactttaatgcacaggtaactattcttaacttcttattttctttgtaatcatcgaatattttctgaagttaagattagtgtgaacattttaaaatattatcatttaataaaatctttattaccatttatgaattttacttttaaatttggagacagtttataaaggcacagaaaaatgctacaaatgacacaggcctaagaaatctggaaataccttaataattaaaatattttcatgtagccttaaggagagttagtatcagtgtccagatggtaactcaggcttccttatgtgagtccagtgttcctcccatagagaagcctacacaaattaaatatttcatctgttcatttattcagtgaacgaatatgcgttaagtactctctacgtgacatttttgtaggtgctgaagttagaatagtaaaaagatcatgataaagcccgcaatccaataaggagatagccatcaccaattataaagtatatattaaaaataccaaaattcaagtctcagtaacttcaatctaaaaaaaggaaaaacattaaattttaattaata

SEQ ID NO: 703841 - DNA, 1425 bp, Homo sapiens
ttttggctaaaacttttaaagttttgtttttaatatctagatagtttaatcatgtgtagttaatttttttgtaatgtgatacggagttagagttaggcaatatttttctacatattcatattttgtgagtctgtttctgaacactattccatgtcatcggcccttgtgtcagaactacgctgttttccctttcgctttatatgtctttacataataaggcagtccttctttttatttaataaatcacttattattatggttgtaaagtctgaatccaattctgtctttcacaagctggctattcaatattctccgcatcacttccataagatccaactatactgcagtattttgaaatatcacctttattgtatactaaatttatgtatctacttggttctatttctaggcttcctattctagttccctgatccagttgtcgcttctgtatgatgtagttgtattatttctgctgcaaggtttctttcttaatttacttgytttcttgttgtttttgtaattttttaaaattccacttaataaattcacatttgagggtattctgctctgagtactttacaattaatcactatttttgaaataacatttcacttatcataatagtttcaaggcctatctatgttgcatcatgttgtttacattaggattgctgacctcagcctgtcaacattcatccttgattattttagttttatggattgacagtttccttgttgcttgcccatcaacattgccaccagaggtgtcatattcattttatcagatgtgtagttctatatggctcaagaactgcactgacagtccaaattatatatgtatctcattttataataatgtgtcttatcataataattacacatttttatgtttcttatatataaatgtgtctatttgatctacattattttttgatattatcattcccattataactgagaagccatttctgaataagcatatactattatcagccctggcctacagagaacagccactgctgatttctcaacaatgcttatgcctgtacttactagctcagttattatctctttgttgaaaaacctggtctgattatggattttctggtcttacatattacattgattctagtatgcccacttctctgagcttttcatctctttctcaactatttcatttggcagttgtcatttctacttcatttagtgtcatctattacttttgtgaatcatagaagaggtatcttaacatcattatgaattgttttccacagcccttgtcagatttaggcagattacagtatatatacacatcaaatttacattttaattctcccttgatcttgtgccctcaggattcattcccccaatacatttccagctctcattgctatatgctgtcccagttctgcaacttacctgaggt

SEQ ID NO: 703842 - DNA, 665 bp, Homo sapiens
tttcagtttataaacatataaaataatcatgcatttttactccttagagtattttttaaaagtttaaaattacatagattgagaaatgttatgtcagagtatggtcaggctgtgcctaaagatcataaatgttaaggaactattacaacctgcagaaatccattccactttttgcaatctgttagtaatctcaccccatttcttcatacatatgctttttcagagagctcattctatttttctgtagcaagcamctgatcgttcagtaaatttaatcctaacgaccaataaggaaaatcagtatttaccatgtttcttccatgacagccactctctaaaagtttctttctctttaccatattcttgtaatatttctactgtggcatgtttcaaacagactagcaccattgcatcaactctaaatacctttatgttacactaatagttgtttaaactataaaatctatagtagttccgtttcacttttctctgagaaatgagtacattttcttagtcatctgtccactaatattttggaaaaagaaggccagcgcagtcatttcttcccttctgtcagacataattcctcggtttagccttcccacctctatacagtccgataacggactggccttactagtcaaatcacccaagcagtttctcag

SEQ ID NO: 703843 - DNA, 665 bp, Homo sapiens
tttcagtttataaacatataaaataatcatgcatttttactccttagagtattttttaaaagtttaaaattacatagattgagaaatgttatgtcagagtatggtcaggctgtgcctaaagatcataaatgttaaggaactattacaacctgcagaaatccattccactttttgcaatctgttagtaatctcaccccatttcttcatacatatgctttttcagagagctcattctatttttctgtagcaagcacctgatcgttcagtaaatttaatcctaacgaccaataaggaaaatcagtatttaccatgtttcttccatgacagccactctctaaaagtttctttctctttaccatattcttgtaatatttctactgtggcatgtttcaaacagactagcaccattgcatcaactctaaatacctttatgttacactaatagttgtttaaactataaaatctatagtagttccgtttmacttttctctgagaaatgagtacattttcttagtcatctgtccactaatattttggaaaaagaaggccagcgcagtcatttcttcccttctgtcagacataattcctcggtttagccttcccacctctatacagtccgataacggactggccttactagtcaaatcacccaagcagtttctcag

SEQ ID NO: 703844 - DNA, 599 bp, Homo sapiens
cagttactcctttatatcttatcttataaatgaatgactttaattatttatactatgtcctgaaacttaagtgtcaaggtgcwcatttcataatcattgtcactctcttgattaaagactcacacaaaaacaggaaaaaggatgaaactgtttcattactatattaggccattcttgtgttgctataaatacctgaggctggataattcataaagaaaagaggtttaattagctgatgggtctgcaaacagtgcaagaaataaggtgccagcatctgctactggtgacagcctcaggaaggttacaatcatggtggaaggtgaaggaggagcagccatctcacatggtgagaggggaagcaagagagcaagggggcagtgccacactcttttaagcaaccagatctcatgtgaactcagagtgagaactcactattgcaaggacagcaccaagtctttcatgagggatctatgcccatgacccaaacacctcccaccagactccctgcaacattgtggattattttttaacatgatatttgcaggggacaaacatcctaactataccaattactttgcagggcgttcatctttcatcag

SEQ ID NO: 703845 - DNA, 594 bp, Homo sapiens
aatgcccaccatctttattttataggaaaataccagggatgtgcccaaggccactcatgccaagtatggactaggctaaattctactaaactcatcgagtgcttgctaagcacccactgtgtgcatctgttggccacagtcatttggaaattatgatatatccagagcatgtggttatataaatattgttcttacaaatctctaggtgagacaaccaagtacaaggcaggtactgctactcccccagtgtcacatagcacrtaaatggcagaagggagtccggaatccaagtctcctcctatcaacccagtaacttacacttatgttacaactggaaaaactgtgagcaccacagttcattttcacgtacggttacatacaagacacaacaatttgccctaattgtatcccctcactttcagaggagtaatcctcaacccaaactccagtctgctgaagatattctcatcaacagctttgttttattttaaaccaaggctttctttccactctgaaatgccaccagcaattataggaccagaaggaatatccatttcagttcaactgttgtcataaaatattaatcatctcggc

SEQ ID NO: 703846 - DNA, 876 bp, Homo sapiens
tgtccttacttaactctggatatagaatgaggtctctagtggttgcctccagacttgatcccctttaatccatccttacattactgccaaggtgatttttctgaagtgcaaatctattcattgcttcttttcttgtttcttttctcttttctttctctttctttcttagaaatgttactgagatttatttatttatctttcaacttttcttttaagttcaggggcacatgtgcagaatgggcaggtttgtgacacaggtaaacatgtgccatagtgatttactgcacagatcatcccatcacccaggtataaagcccagcatccactagctattcttctcttcctgatgctgtctctccctgcccttctttcttaaagcccatactttatcagcccaactctctatcgttacaaggcctttcatcatctgactaatcttatgcatttcccccaccataaatctaaagctgcacttgtactaatacgagcagtttactgaatgagccatactgtttcctgactcagagccttcacatatgttctctccactatttaggatgtctttccttctcttgtcttgctggcaaagtctactgattttttaagatacaacgtaagcactgtctgctttttttttttttttttttttagctcttttttagttaccattttttcttttttttctttctttactggctgctttttaagtcttctggtcttccctcttcccaaccctaggggttatatactcactgtatcatgttcattcattctcttgkgtttactaatgggttgtaattaagtctctctttcctcctggactcaaaggcaggtttatatttgccttattactttttgacttcctgttgcttgttt

SEQ ID NO: 703847 - DNA, 2000 bp, Homo sapiens
gtgaaccttaatgcaaactataagatgtatcatgtaggttctttaattgtaacaaatgcaccactctggtgggggatgtttattatgggggaggctatgcatgtgtgggggacagggagtatatgggaaatctatacctgctgctcagttttgctgtgaactttgaactgctcttaaaaataatgtgtgtatgtgtgtatatatacatacatatacatgtttgtgtgtatgcatatctgatcataagaaacaatacatagtttcacttatttaaaaagtcaaatgtgcaaaactaaacaatatacaagtctgtaatgacaagcaatggaatgattaacaggaagttagggatagtggttacctcttgtggaaggagtgagtggcattgtagaagggcaatgggagtttctaagatactggaaatattctatttcataacctgaaggaaggacacatatgctcattttatattcttcttaagctgtacatacacacttttatatttatgatctatttcattaagtaataagacaattaaatatatgcatttgtaaataagtgagattaacaaatttttggatacatttaacttattaaagttgactcaaataattagaaaatctggatggaaatcataccattaaagtaattgagttgataattaataattctacaaagaaaacaggatgcccagatgatgtcacaagtagttccaatgttacactaattatttgcgaggggagaaaaaagaggccattcttcaattyatttgagactagggtaaccttgctattgtgtacctcatccatgcacacagagacaaatattgtaaacaaaatactaggaagtatacctagcaaagtataaaaaccatgaacaagctcggttagtaatacaaatttagtccaatgttagaaaatctactgaaatcatctccttatcaatgaattaaagacaaaagttatatgattgtctcaaaaggcctataaaattattttacaaaaattaaataattcatgatatttccacctatgaataaagggtaatttccttaacctgataaaaggagtcaacaaataacctacagcacctatcatgttttgtgattaaaaatatcgaaatcactccttttaaaatcaagaaaaagacaagagtaccattgtcactaaactgcttccaaagcttatacggaagataaaagggcccagtataactaagacaatcccatagaagactaaagtgtgtgaaggtgggaggtggagcttatgtgagtctatcacgtaccagatttactgtgaagttataattaccacagcaggaattgctattgtgaaagtgtatgcttgtgtgaaatcttgatgtatgccctggctaacattacagaacagtcagaaagggtctatataatccatggtatgagcagttggtatccatatgggaaaatatcagaatggatctctatcccaaaaatggatcgctatcacacaaaggccagatctaaatggacaaaggacttaaatttgagatgcaaatatttaaaaatcttttagaagaaaatataggagggtaacttattacatgccacacctactatgtgtactttgtacgatgcaagtgttgtatacgagtgtagtatgttaagtgtagatgcctctaagcagtatatgcatgcttgctactttacacacgtgaaacactgggaatgggagcatgagaggaaaccctaggtcattctggtctccagactgctgctcctgcccacccccggttccagcactcccttccccattctcctatacagatcctctgttcccggcacagccacttacagcagctcaagccagcggcacccacggagaggccctcttcaccctactgctgggctgtcatgtcccctttcttttctttctgaaaaacagttttctctgcctgtgactcctcatgtttcactctctctaaagcacacggaagcccggttccctcctctgctttatcagacc

SEQ ID NO: 703848 - DNA, 2000 bp, Homo sapiens
gtgaaccttaatgcaaactataagatgtatcatgtaggttctttaattgtaacaaatgcaccactctggtgggggatgtttattatgggggaggctatgcatgtgtgggggacagggagtatatgggaaatctatacctgctgctcagttttgctgtgaactttgaactgctcttaaaaataatgtgtgtatgtgtgtatatatacatacatatacatgtttgtgtgtatgcatatctgatcataagaaacaatacatagtttcacttatttaaaaagtcaaatgtgcaaaactaaacaatatacaagtctgtaatgacaagcaatggaatgattaacaggaagttagggatagtggttacctcttgtggaaggagtgagtggcattgtagaagggcaatgggagtttctaagatactggaaatattctatttcataacctgaaggaaggacacatatgctcattttatattcttcttaagctgtacatacacacttttatatttatgatctatttcattaagtaataagacaattaaatatatgcatttgtaaataagtgagattaacaaatttttggatacatttaacttattaaagttgactcaaataattagaaaatctggatggaaatcataccattaaagtaattgagttgataattaataattctacaaagaaaacaggatgcccagatgatgtcacaagtagttccaatgttacactaattatttgcgaggggagaaaaaagaggccattcttcaattcatttgagactagggtaamcttgctattgtgtacctcatccatgcacacagagacaaatattgtaaacaaaatactaggaagtatacctagcaaagtataaaaaccatgaacaagctcggttagtaatacaaatttagtccaatgttagaaaatctactgaaatcatctccttatcaatgaattaaagacaaaagttatatgattgtctcaaaaggcctataaaattattttacaaaaattaaataattcatgatatttccacctatgaataaagggtaatttccttaacctgataaaaggagtcaacaaataacctacagcacctatcatgttttgtgattaaaaatatcgaaatcactccttttaaaatcaagaaaaagacaagagtaccattgtcactaaactgcttccaaagcttatacggaagataaaagggcccagtataactaagacaatcccatagaagactaaagtgtgtgaaggtgggaggtggagcttatgtgagtctatcacgtaccagatttactgtgaagttataattaccacagcaggaattgctattgtgaaagtgtatgcttgtgtgaaatcttgatgtatgccctggctaacattacagaacagtcagaaagggtctatataatccatggtatgagcagttggtatccatatgggaaaatatcagaatggatctctatcccaaaaatggatcgctatcacacaaaggccagatctaaatggacaaaggacttaaatttgagatgcaaatatttaaaaatcttttagaagaaaatataggagggtaacttattacatgccacacctactatgtgtactttgtacgatgcaagtgttgtatacgagtgtagtatgttaagtgtagatgcctctaagcagtatatgcatgcttgctactttacacacgtgaaacactgggaatgggagcatgagaggaaaccctaggtcattctggtctccagactgctgctcctgcccacccccggttccagcactcccttccccattctcctatacagatcctctgttcccggcacagccacttacagcagctcaagccagcggcacccacggagaggccctcttcaccctactgctgggctgtcatgtcccctttcttttctttctgaaaaacagttttctctgcctgtgactcctcatgtttcactctctctaaagcacacggaagcccggttccctcctctgctttatcagacc

SEQ ID NO: 703849 - DNA, 2000 bp, Homo sapiens
gtgaaccttaatgcaaactataagatgtatcatgtaggttctttaattgtaacaaatgcaccactctggtgggggatgtttattatgggggaggctatgcatgtgtgggggacagggagtatatgggaaatctatacctgctgctcagttttgctgtgaactttgaactgctcttaaaaataatgtgtgtatgtgtgtatatatacatacatatacatgtttgtgtgtatgcatatctgatcataagaaacaatacatagtttcacttatttaaaaagtcaaatgtgcaaaactaaacaatatacaagtctgtaatgacaagcaatggaatgattaacaggaagttagggatagtggttacctcttgtggaaggagtgagtggcattgtagaagggcaatgggagtttctaagatactggaaatattctatttcataacctgaaggaaggacacatatgctcattttatattcttcttaagctgtacatacacacttttatatttatgatctatttcattaagtaataagacaattaaatatatgcatttgtaaataagtgagattaacaaatttttggatacatttaacttattaaagttgactcaaataattagaaaatctggatggaaatcataccattaaagtaattgagttgataattaataattctacaaagaaaacaggatgcccagatgatgtcacaagtagttccaatgttacactaattatttgcgaggggagaaaaaagaggccattcttcaattcatttgagactagggtaaccttgctattgtgtacctcatccatgcacacagagacaaatattgtaaacaaaatactaggaagtatacctagcaaagtataaaaaccatgaacaagctcggttagtaatacaaatttagtycaatgttagaaaatctactgaaatcatctccttatcaatgaattaaagacaaaagttatatgattgtctcaaaaggcctataaaattattttacaaaaattaaataattcatgatatttccacctatgaataaagggtaatttccttaacctgataaaaggagtcaacaaataacctacagcacctatcatgttttgtgattaaaaatatcgaaatcactccttttaaaatcaagaaaaagacaagagtaccattgtcactaaactgcttccaaagcttatacggaagataaaagggcccagtataactaagacaatcccatagaagactaaagtgtgtgaaggtgggaggtggagcttatgtgagtctatcacgtaccagatttactgtgaagttataattaccacagcaggaattgctattgtgaaagtgtatgcttgtgtgaaatcttgatgtatgccctggctaacattacagaacagtcagaaagggtctatataatccatggtatgagcagttggtatccatatgggaaaatatcagaatggatctctatcccaaaaatggatcgctatcacacaaaggccagatctaaatggacaaaggacttaaatttgagatgcaaatatttaaaaatcttttagaagaaaatataggagggtaacttattacatgccacacctactatgtgtactttgtacgatgcaagtgttgtatacgagtgtagtatgttaagtgtagatgcctctaagcagtatatgcatgcttgctactttacacacgtgaaacactgggaatgggagcatgagaggaaaccctaggtcattctggtctccagactgctgctcctgcccacccccggttccagcactcccttccccattctcctatacagatcctctgttcccggcacagccacttacagcagctcaagccagcggcacccacggagaggccctcttcaccctactgctgggctgtcatgtcccctttcttttctttctgaaaaacagttttctctgcctgtgactcctcatgtttcactctctctaaagcacacggaagcccggttccctcctctgctttatcagacc

SEQ ID NO: 703850 - DNA, 583 bp, Homo sapiens
ttttcttgtggcatctcagtgattttattagtttcaccacaagtactcccagcaagggaaatcagtgatcccaaaggcaccaggctggagttttcccgcataaagatcactcttcgaagcagctccttcctagaaatttgttatgtttacctttgccaatcatctatgattagtgtagtaattattctgtttttgctatcttttatttttgatactcactgaaggcttcacttatcaacgattaaggcatgtgcttctgctttgattcagtgtcttcttagtatgagcatggtggtataattctcttgaatcagtgctgggatttatttgatyatgaaaatttattttcattcaggtattttaaatgcacttttaatattaagtacatttaatattacatgtaatattaacttgaagtgtaactaatatgaacaaattccaaagtacatgaaaataacttttaatcctgtaagtatgactatttaatttatttcttttcacaatataaaaagcacatgcgatattttgaaagactattaaaggtggggacaagaggttatttaaatctatgtttggatgcaac

SEQ ID NO: 703851 - DNA, 2037 bp, Homo sapiens
gcttaattcagagaatgtataaatatgtaattttgcatgacttttaaggcagccattttattttgaaacgcaactaacgttatatgcataaattcaataaatataaagctgttttcaaaaattgaatgtttttacttgtaagttattctttcaataataataaagagatgatcactagtcagtttatttttcatagttgaattgatttagttgaacttcattgggtgttcttatgttttagtcatgagtccatgctctttaacaagctaaaggaaaccatattatatgctaaaagatgtcagtttgtgaacaatttaatgaatatatagagttacaacatttttcccgattggatgttggggtttactataattctttgttactttatatgtgaatatactcactactcactatgtttatgtatgtaggaaacatgctagtgatgaaaattcaagcagttattaccctagttttctttcattaacaaaatacagaatagaaattatctacttattcttggaggtcttaaaatatcttttcagttgactgataattctgctatcaagagctacaagtaggtgctctggccgtctatatctgtatttccatatattcaattccttactatatatttctcatttgatattctatacccaattcaaacaaaaccatttcatgtatacaatgtacttttatttatgcttttctctatcattaagtagaaagccatttgcaccttagtctaaatctgaaatgtgcctctacctaacctttctaatacattttcactatttcttagttattagaataaatttacataatttctgaaacaactttctctatggagtattccctttagtttcttttcccttccaaacaatttaatgaattacaaatatgggggagatattttttcaatgggtaagacttgacttctacaaatacatgtttaattccttctcaaaattatttctacttcctcttattcaacactgtgctagattttagggatatataataagacaatatatgaggtccttgctgttgtgaaaggtacattcttatctttggcaaattgtagaatctttagctttggtatgcaagggcattggtgtttggtacatgcttggctctttgccttaagaattgcctctttccaccatgcatatttcacctgtgtgggaattcttgcagatctctgtattattgatagtcattttgctctgacattttatacaaagctgaatcagcaacagtatgactaaacacaaccaaaaaagaaagctagaaagattatattagacacttacgtgtatggatcattatggtgaggactgctaaaaaaaacaaaacaaaacaaaaaaaaccttcagccaaaatagatttacagtttaatcgagtaatgaatgattcataaattggaaagcccccacaatcacagcagattcagagagactccaggggtgtctcatggtcagaatgaatttatagacaatacaaagtaaagtgacscatagaaatcagaagtgaggtacagaaacagctggattggttatggcttggcacttgccttatttgaacactcagctgtatgcgactagttgaagtatggctgctggaattggccaagactcagcgattgttacaggcgcatattcctaagttaggttttagtcttgtgtacctattgagttaggttgcagttcattcacaaggactgaaatatagaagtatggcgtttttcctcaggccatatttaatttgatttaacaggactttgggtatgtcattgtattttactaatatattttacaaacaccccatgttatcttaatctatttaagttcacactttttaatcaaattttactttaaatgtatctaacctcctaaatttctgcctttgtgaaccaataatactttttccaaattcttattatagcatatatcagactatatagctatagacactttggcatcattgttttcccatacaaaacacaatacatttaatgaattaatgaatgatgcatcagca

SEQ ID NO: 703852 - DNA, 642 bp, Homo sapiens
ttgtgcatatgttgcaagtaatgtattgagaaaagtatttatatctgtatacatgtttggtccttaatgatgaaattaatgcacagttgtctaactgtaataatttccttataatcacactagttttcctttggtgccacaagatgatgaatctcactttagtgtgaccaagcaaaatgaggtacaaaaacagtccaatcaatgtgaaaatatctcaaattcacatgaattttaaaaatattttatatgtaaattaaattagaaattaaatatatataatatattttatttcagaaatatttgcttgccttttggaactcaaagttcaaaaccttctattgtcatctttaaataactartttttaagttaatttctacttggttctatgaaaatactaccacacaatgtggagataaagaaaacatttacagaaaaattgtccatatggacacattttaaacagatgatctaattagcataatagccaccaaactggtaaataaacagttttgttgatttgctgcttaatcagcatctattcagaattctgtaatattgtttagtaaaacagtttatttccatccataaatgtattttataaatttatgcccagtaaacttccaggtaaaccatcgaaatat

SEQ ID NO: 703853 - DNA, 2297 bp, Homo sapiens
caaagcctccatcaagtagtccaattctccagcttctgtcactcctggacaacatttgtatttaaaaatacctttcagccaggtgacacacacctgttgtcccagctactcaggatgctgaggcgggaggaacacttgagcccaggatttctgggttgtatgcactatgctgaggaagtgtctgcactaagtttggcatcaatatgttagcttccagggagcagaggaccaccaggttgcctaaggagtggtcaactcaaaaattgagcagaataaaactcctctgcttatcagtagtgggatgacccctttgaatagtcactgcactacaacctgggcaacatagtgagaccctatttcttaacaaaaaaaagaaagaamtaccttccatatttctgcaagtatgtgagttatctttgatgtagtgttaccttttcgcagtgaatgaagtgtaataacctcttgctcattttgtttacaaaaataaataaataaataaaagcagggacattctaagtggaatcaagttccaagtaatacagacttaatactatttatagaataattcaattttatgatatatttcatgtgttgctatcctcagttatatttactcatgtatagttacacttgtcaatgtcctagctataatcacctatttttagattttaataaatgtaattaaattaatagcatttctatttttataacaagttctaaaattaagccacagtagaaaattcatgataagattaagtttgatttttatttcacttttatatgtatgaatcttaagaatttggtatttcctatctaatatttgtctttctgttcttggaaactaatttcaaattatttacaagtttcagaagtatgcagccagtgaagaatccaatatcattttgttcaatatacctataatttgaacttaaataagtatacttccacaaatgtcactgaagcaagtatttcaagtatttatttccaggtataatttcaattatggggtattcagatatcttgttatatcaacaactaaacataatatattacattatttgagatataaaaagtatatcttgaaaacagtgcagttgtaaatctttaaggtaggaaagcagctcagcaaatgttttcctccactgtccatgaggcaaatgtctaatgactgtacacacacactcacactcacacacatacatacacattctgtctcaaatatagatatatattcacactctgattcaatgaattcaacctcatgactaaggatttgaatagatagtgttttttaaccttcatcctttcctctactgcaatttataattgaattagcttacttatttcccagtaaaaacattccagcattgtgatactatgataaggttaagatgtgaaagtgttttttaccatttattatagaaaaactatcttattttcagatttctaagaaccttttcaaatccaccaaggaaaagtgtctatgccttatagattgaaaagctcatctttaccagttaatttacattttactttttcctaaaatataaggctctccatatctgtaggtacacagtttgacttaattatcctatgttatatattgtacataattatatgagagataatggcaatttaaacaaataaaatgatggctatttctttttattaacttcatcatatttcactgaggttttccttactttaggcttcctcgatggctgcaatgtatgctaaaagtaaatttttatgtgaaatgtttaaaatatttgaaaaagatgcttattgtttgtcaggttttgccactgttagcatgactcagtacccatagagtctgtctcttagggatgtgaagcaaatgatttctctgatccaaaacatttcatatgccttaaaagtcaaacaatgcaaagatgtgatatttagaatactagttacataataatggataatgacttagcttttaaaacaactgctttaaacatgacacatttaaagctaatttgtaactttcatatgtttctgaaacttttacagtcactaaataatttgagtaaagcaaatgggtttcagaccgattacaatttggaaagattgattataaatttttaataatatgtaacaaagaaaaatgtggtcacttgattatatacctcttccccaagatcaagtaaatactttatcaatagaaaaaagaaagaaaagcaaaaagaaaagaaaaagaaagcaacactgctatatagaacattttttttttctaaatggaatccagcagcaaaaaaaaagataattgaaga

SEQ ID NO: 703854 - DNA, 2297 bp, Homo sapiens
caaagcctccatcaagtagtccaattctccagcttctgtcactcctggacaacatttgtatttaaaaatacctttcagccaggtgacacacacctgttgtcccagctactcaggatgctgaggcgggaggaacacttgagcccaggatttctgggttgtatgcactatgctgaggaagtgtctgcactaagtttggcatcaatatgttagcttccagggagcagaggaccaccaggttgcctaaggagtggtcaactcaaaaattgagcagaataaaactcctctgcttatcagtagtgggatgacccctttgaatagtcactgcactacaacctgggcaacatagtgagaccctatttcttaacaaaaaaaagaaagaactaccttccatatttctgcaagtatgtgagttatctttgatgtagtgttaccttttygcagtgaatgaagtgtaataacctcttgctcattttgtttacaaaaataaataaataaataaaagcagggacattctaagtggaatcaagttccaagtaatacagacttaatactatttatagaataattcaattttatgatatatttcatgtgttgctatcctcagttatatttactcatgtatagttacacttgtcaatgtcctagctataatcacctatttttagattttaataaatgtaattaaattaatagcatttctatttttataacaagttctaaaattaagccacagtagaaaattcatgataagattaagtttgatttttatttcacttttatatgtatgaatcttaagaatttggtatttcctatctaatatttgtctttctgttcttggaaactaatttcaaattatttacaagtttcagaagtatgcagccagtgaagaatccaatatcattttgttcaatatacctataatttgaacttaaataagtatacttccacaaatgtcactgaagcaagtatttcaagtatttatttccaggtataatttcaattatggggtattcagatatcttgttatatcaacaactaaacataatatattacattatttgagatataaaaagtatatcttgaaaacagtgcagttgtaaatctttaaggtaggaaagcagctcagcaaatgttttcctccactgtccatgaggcaaatgtctaatgactgtacacacacactcacactcacacacatacatacacattctgtctcaaatatagatatatattcacactctgattcaatgaattcaacctcatgactaaggatttgaatagatagtgttttttaaccttcatcctttcctctactgcaatttataattgaattagcttacttatttcccagtaaaaacattccagcattgtgatactatgataaggttaagatgtgaaagtgttttttaccatttattatagaaaaactatcttattttcagatttctaagaaccttttcaaatccaccaaggaaaagtgtctatgccttatagattgaaaagctcatctttaccagttaatttacattttactttttcctaaaatataaggctctccatatctgtaggtacacagtttgacttaattatcctatgttatatattgtacataattatatgagagataatggcaatttaaacaaataaaatgatggctatttctttttattaacttcatcatatttcactgaggttttccttactttaggcttcctcgatggctgcaatgtatgctaaaagtaaatttttatgtgaaatgtttaaaatatttgaaaaagatgcttattgtttgtcaggttttgccactgttagcatgactcagtacccatagagtctgtctcttagggatgtgaagcaaatgatttctctgatccaaaacatttcatatgccttaaaagtcaaacaatgcaaagatgtgatatttagaatactagttacataataatggataatgacttagcttttaaaacaactgctttaaacatgacacatttaaagctaatttgtaactttcatatgtttctgaaacttttacagtcactaaataatttgagtaaagcaaatgggtttcagaccgattacaatttggaaagattgattataaatttttaataatatgtaacaaagaaaaatgtggtcacttgattatatacctcttccccaagatcaagtaaatactttatcaatagaaaaaagaaagaaaagcaaaaagaaaagaaaaagaaagcaacactgctatatagaacattttttttttctaaatggaatccagcagcaaaaaaaaagataattgaaga

SEQ ID NO: 703855 - DNA, 561 bp, Homo sapiens
gagctacataatccacagtgttcatcccctctgtcttatgaactgaactgggcagagtgaggaatgggtytcaggaaaaatagacccattatcatcacgacattcaggtggaagtgtaaaaaatgcaattggatttatgcgtgtggaatttgggatagagatatggcatggaaatataaatttgggagtcattagcatttacactgcatgtaaaaccacgagattggatgagataaccaaggaaagaagtacagagaaagatgatggtggggggaaataaaatactgaggcctggagcattccaacattgagtctgaggaatagaagaaaacactaaaagagagagagagagagagagggagacagagagagagagaagtatacaaataatataaaaccagggagtcaaatgaagatagtattatgagaataatctacttcaaatgctgctgataaatcaagtaaggtgagaaaaataactataagattaacaaagtggaggacaggtttaattagagtagtggggggcaaaaatctgtatggaaatgaaatgattaaaga

SEQ ID NO: 703856 - DNA, 1692 bp, Homo sapiens
atgtattccctcacagttctggagggtgtaagtccaaaaccaaggtttccaagaagccatgctctctctgaaagttctaggaaataatcattccttgcctctttccagctacttagggtttctggcaatcttttgtgttccttggtttgtaactgcatcactgcactcccttcctttatcctaacatggcaattcctccctttgtgcatgtatctttctgtgtctccaaacctctctctccttataagagcaccaattattaaattgggtcccaacctaatccagtatgacctcgttttaattaaatttgcaaagaccctatttccaaaaaaggtcacattcacaggttccaggaggacaggaatttagggggacactattcaacccagtacaccaggatatctctatatccctactcctcgtatcacatcgccttggagctgtctcttgccttcatcgtgaataatccttccccttggatggcttccctttactggagtcaaaattattatcctcattgttcttgacaataggctctccctcctgtaatccatgtttcacaggagactgctgtcaggctaatctcatgaaaaaaggacagcttggatatctttactcctctactgaaaaactttttgatggtccccattatctgttggactaagggctacacttcctcagagagaacttcacagactttttcatgtgatcccaacacacctttccagtcttactctcaagactcccctccacgcacaccccaccttgwccttaactccgtggcctgtccttttccctctccagcatggtttttccctccatctgaaaagccattatttctaatacagcatgtattattcccaactctctagaaaagccacctcctttccaaagtctaccaagatccctaccccgcacccagccagaatagtccctccaactccaaactcccataatattttgtgcttcacctgatatttttcttctggaaattgtgatcatgctatgtctcttttgattagaacatgagctcttaagagcagggaccgtttcttactccctagtttctggttcttaggagatgtttggtacatatttcaaagggagtgagggactgagggagggagaaaagagggaagagagggagggaggggaaggagaaagaaataattctaaagtaaagattttcagaaggtacttcaagggatgtgcaaatattttgtattttaataatagtcaagctgattaaaaaattaaaatgttatctttacccctaattttaaattttgatatttgcaaaaatagctcatttttttataataagcatctattataattagattttccaagtaaaggtatattaataaagtgtatttctatcttataagtagaaagataagattttgtccaggcacagtggctcacacctgtaaccctaggactttggaaggctgagacggctggataacttgaggtcaggagttcgagaccatcctgggtaacatggtgaaaccctgtctctacaaaaaatataaaaattagctgggcgtggtgcccacaactgtagtcccagctactcaggaggctgaggtgggaggattaactgagcccagcaggttgaggctgtagtgagccatgattgtgccactgcactccagcctaggtgacagagtaagaccctgtctcaagaaa

SEQ ID NO: 703857 - DNA, 1692 bp, Homo sapiens
atgtattccctcacagttctggagggtgtaagtccaaaaccaaggtttccaagaagccatgctctctctgaaagttctaggaaataatcattccttgcctctttccagctacttagggtttctggcaatcttttgtgttccttggtttgtaactgcatcactgcactcccttcctttatcctaacatggcaattcctccctttgtgcatgtatctttctgtgtctccaaacctctctctccttataagagcaccaattattaaattgggtcccaacctaatccagtatgacctcgttttaattaaatttgcaaagaccctatttccaaaaaaggtcacattcacaggttccaggaggacaggaatttagggggacactattcaacccagtacaccaggatatctctatatccctactcctcgtatcacatcgccttggagctgtctcttgccttcatcgtgaataatccttccccttggatggcttccctttactggagtcaaaattattatcctcattgttcttgacaataggctctccctcctgtaatccatgtttcacaggagactgctgtcaggctaatctcatgaaaaaaggacagcttggatatctttactcctctactgaaaaactttttgatggtccccattatctgttggactaagggctacacttcctcagagagaacttcacagactttttcatgtgatcccaacacacctttccagtcttactctcaagactcccctccacgcacaccccaccttgtccttaactccgtggcctgtccttttccctctccagcatggtttttccctccatctgaaaagccattatttctaatacagcatgtattattcccaactctctagaaaagccacctcctttccaaagtctaccaagatccctaccccgcacccagccagaatagtccctccaactccaaactcccataatattttgtgcttcacctgatatttttcttctggaaattgtgatcatgctatgtctcttttgattagaacatgagctcttaagagcagggaccgtttcttactccctagtttctggttcttaggagatgtttggtacatatttcaaagggagtgagggactgagggagggagaaaagagggaagagagggagggaggggaaggagaaagaaataattctaaagtaaagattttcagaaggtacttcaagggatgtgcaaatattttgtattttaataatagtcaagctgattaaaaaattaaaatgttatctttacccctaattttaaattttgatatttrcaaaaatagctcatttttttataataagcatctattataattagattttccaagtaaaggtatattaataaagtgtatttctatcttataagtagaaagataagattttgtccaggcacagtggctcacacctgtaaccctaggactttggaaggctgagacggctggataacttgaggtcaggagttcgagaccatcctgggtaacatggtgaaaccctgtctctacaaaaaatataaaaattagctgggcgtggtgcccacaactgtagtcccagctactcaggaggctgaggtgggaggattaactgagcccagcaggttgaggctgtagtgagccatgattgtgccactgcactccagcctaggtgacagagtaagaccctgtctcaagaaa

SEQ ID NO: 703858 - DNA, 1692 bp, Homo sapiens
atgtattccctcacagttctggagggtgtaagtccaaaaccaaggtttccaagaagccatgctctctctgaaagttctaggaaataatcattccttgcctctttccagctacttagggtttctggcaatcttttgtgttccttggtttgtaactgcatcactgcactcccttcctttatcctaacatggcaattcctccctttgtgcatgtatctttctgtgtctccaaacctctctctccttataagagcaccaattattaaattgggtcccaacctaatccagtatgacctcgttttaattaaatttgcaaagaccctatttccaaaaaaggtcacattcacaggttccaggaggacaggaatttagggggacactattcaacccagtacaccaggatatctctatatccctactcctcgtatcacatcgccttggagctgtctcttgccttcatcgtgaataatccttccccttggatggcttccctttactggagtcaaaattattatcctcattgttcttgacaataggctctccctcctgtaatccatgtttcacaggagactgctgtcaggctaatctcatgaaaaaaggacagcttggatatctttactcctctactgaaaaactttttgatggtccccattatctgttggactaagggctacacttcctcagagagaacttcacagactttttcatgtgatcccaacacacctttccagtcttactctcaagactcccctccacgcacaccccaccttgtccttaactccgtggcctgtccttttccctctccagcatggtttttccctccatctgaaaagccattatttctaatacagcatgtattattcccaactctctagaaaagccacctcctttccaaagtctaccaagatccctaccccgcacccagccagaatagtccctccaactccaaactcccataatattttgtgcttcacctgatatttttcttctggaaattgtgatcatgctatgtctcttttgattagaacatgagctcttaagagcagggaccgtttcttactccctagtttctggttcttaggagatgtttggtacatatttcaaagggagtgagggactgagggagggagaaaagagggaagagagggagggaggggaaggagaaagaaataattctaaagtaaagattttcagaaggtacttcaagggatgtgcaaatattttgtattttaataatagtcaagctgattaaaaaattaaaatgttatctttacccctaattttaaattttgatatttgcaaaaatagctcatttttttataataagcatctattataattagattttccaagtaaaggtatattaataaagtgtatttctatcttataagtagaaagataagattttgkccaggcacagtggctcacacctgtaaccctaggactttggaaggctgagacggctggataacttgaggtcaggagttcgagaccatcctgggtaacatggtgaaaccctgtctctacaaaaaatataaaaattagctgggcgtggtgcccacaactgtagtcccagctactcaggaggctgaggtgggaggattaactgagcccagcaggttgaggctgtagtgagccatgattgtgccactgcactccagcctaggtgacagagtaagaccctgtctcaagaaa

SEQ ID NO: 703859 - DNA, 1428 bp, Homo sapiens
agcactagtgtttaaactatctacgtgtcttaattagttatttcttttcttttaaaggattttataaaaagatgtaaagagaatggtaattgtggcagcctttttcaacttcgtgttgcaattggatgtctatattttcttaactgaaggagaacatcaacttttagcataatttccttgccagtctttacttggcccctgagcctccctttgcacagcacatccaactttgcctgcattaccttttctccatttgtacctctactaaggcggcagataaaaaaaaataaaaaataaaacaggaatccttgcttatttgtacaacccagttggcatcttttttcagtttccactcaataaatatttttcaaactaatggagtccaactccttcaactgcagagtccaactcctaatgattgactttgttttgtgctgcttatgacaggctaaggatatttacctgtatgactaccagactacccatgtctccaagtcaggcaggatgacccattctagagtatgtttatgatggagacctggctctacgaaatgcattcagaagcatgaagtcttccaggatgtttagtatttgaaatttgaccctgaagataagcttctctaaagagacaagagggactcattggctcagattaaggtcatgtgattctttccatgctactgaattatattttaaaaattataaatatttatatatatatatayaaaaatatatattataaaatatgaattaataaataaaaaaataagtaaatttgtaaagtgtctaaatatttatattatatatattatatataatatatgtatttccccttcctcacgatggtatttaacattcttctctgtttaaaccgaacaacgaatcaacttagactccagaaccatgatgacataatgggttccatacagtgtgtgtagccaaaatccctaggtctagctctcagttctgctgcatagcatctgtgtgaacttgtgcctcagtttcccagtctatacaataataacatatttaaaagtgacatactcacaatccatagagctggaacttaaactctgtgcctctgctagttgcattaaatgttaatttaatttttaccagttcatctacttaaggatctgaacttggtcttatttatcttttcattcacagaacctagtacaatgtctagcacatagtacctgctcagtaaatttatgttgcatggatttttattattgttaaaagtttggcctaacatgagaaaattgccaaaattttaaagaaataatatcttatggccctgtaggcaagatattttctagcagtaaacaatgatcagaattcagctattgaaaaattatattttcttccaatataatgaaacaaaagcttataatggcatgctgagtatagcatgaaagccagaag

SEQ ID NO: 703860 - DNA, 1009 bp, Homo sapiens
gtaaatgccatactacagggtgacctcatacaaaaagtgtcattcttattctgtaatatctgaattagaaaaagatgcactgtattttcacagagccagtatttatattctcccagcaaatgatttccaaatttgtatagtcctgcctcaactttttcagtgtttatcatcacatatgcacatgatacatacacacatgtcctttgctctagcacagttagaataatgcacaaatatgcaactttctttaaatgagccggataatctatgtttattactagagaaattcttatgactaagcagagcctccagatttgaaaataaatacacacatgaacactatctacacctgtaaccgcatgggtcacattgcctagcctggcagcagaaatcttagctagagctgagacacaataaatagaaatgtaaatttcaaaacaaggagaggcaggccagagagaaaggggctgtcttctaaatgggaggctgcagcaggtcacctcgcccactcctctgtgtgtgtgtggcgtgactctcattcagtccggtaagattctcaaacaaagtccagtgtcctaaaaatatttggaactattacaaagcataaattataaatgtgtcaggaaaatrggaaaaggtgtcttgggcctacttaaaacacaaaatgatctcaaccattattcaacaatgatatgaacatcttttatttcatttctccttaaccattccttctgtttgctatcatttcctgctcagcaccatgtcaataattactaaattagcgggacgcctgtacaatttcagctcaagtgttattactgacaagtcaaacaatggggctgatggaaaagatgggactccatctccttatttaaatggaccgtgttcagaaggaaagattgaagccccctttttcttcaaaagaaggagggagggaatggtttacattttgtgcagctcaaggacacagagtcagaggaaatgcctttttaacagaaacctcttttca

SEQ ID NO: 703861 - DNA, 1009 bp, Homo sapiens
gtaaatgccatactacagggtgacctcatacaaaaagtgtcattcttattctgtaatatctgaattagaaaaagatgcactgtattttcacagagccagtatttatattctcccagcaaatgatttccaaatttgtatagtcctgcctcaactttttcagtgtttatcatcacatatgcacatgatacatacacacatgtcctttgctctagcacagttagaataatgcacaaatatgcaactttctttaaatgagccggataatctatgtttattactagagaaattcttatgactaagcagagcctccagatttgaaaataaatacacacatgaacactatctacacctgtaaccgcatgggtcacattgcctagcctggcagcagaaatcttagctagagctgagacacaataaatagaaatgtaaatttcaaaacaaggagaggcaggccagagagaaaggggctgtcttctaaatgggaggctgcagcaggtcacctcgcccactcctctgtgtgtgtgtggcgtgactctcattcagtccggtaagattctcaaacaaagtccagtgtcctaaaaatatttggaactattacaaagcataaattataaatgtgtcaggaaaatgggaaaaggtgtcttgggcctacttaawacacaaaatgatctcaaccattattcaacaatgatatgaacatcttttatttcatttctccttaaccattccttctgtttgctatcatttcctgctcagcaccatgtcaataattactaaattagcgggacgcctgtacaatttcagctcaagtgttattactgacaagtcaaacaatggggctgatggaaaagatgggactccatctccttatttaaatggaccgtgttcagaaggaaagattgaagccccctttttcttcaaaagaaggagggagggaatggtttacattttgtgcagctcaaggacacagagtcagaggaaatgcctttttaacagaaacctcttttca

SEQ ID NO: 703862 - DNA, 1084 bp, Homo sapiens
tgacatgtattaaaataaataaagtaaatggttttcaatttgaaatattccattaagtcttttctaacttgagcttatgaaatgcatgcttgcttcttgtttctttttaggcctttgcttccagaaatgttaaaataacatgattactaaatatatctccaagtttcatacagctactgtgaagtcaaaatctggaaaacaagtagaaaagtggagtacttactgttggcaagaactaccacagatccctaagactattgttctataaatgttaaattataaagtgatacaaataaattagattttaaaagggaggaatggagtaggaagaaggagaatgtgttgtgagacacagtagaacacacaggaagagttgaggtatatatctttattcttactgacatatatcccaaataaatgaaagcaaackcaatatttcatgtattcagattaataacacctatttctaattttaatgtaataggttctttaacaaaaagttttcaaaatatttcaaagggcttataaaagtgaatctttagctttcttctaagtacacttttgcgctcctacatctttcatagcctagacctaatttctagtttctggcctcatctccgtttctaggtcctgctccacagaggtgtgatcaggagggccatgcaccattacaaaattgacatgacttagatcttaaaagcagtaccacttgcccctcctccaaactgtttgtttttttatttttttgttttttttccttaaggctgctcaagaaagtagcaaataatatagcctaaataatatatgatttgttgaggacttttttggaggagaggaaagggatgtgattatttaaaactgcacaagtgggaaacaatttccaaatgcttttcagaaaatatcttgtaattagattctcttttaaaactactaggactttgaagtaaaataatgtctgctgctgagaacactgttgaattgcagttaactcctactagtgatcaaaatgacccagtcaaatctccagctgcttatgtaattctgaataaattctccattttttaagaaggatacaccaaagaaa

SEQ ID NO: 703863 - DNA, 627 bp, Homo sapiens
ttttaacccagattagcagactctggcaatatctataatgaaggctgagtctcagctcatttgagttgtaaacatcacagccattgctgaatcaagtacaagatgattcaactctcagattttgatgcaaaattcttctctcttccctgtgcctttracatagtcccatttgatttaatggtcctgactctgagcagtgctgaggattaaacgtgggtgatttcagttcaaggaaaatacctttgttatcttattttgaccttaaatactacagcgttctctattggctcctcaatccattaagttttacatggtagaactattgtttgtttcagaatttatttattccacctctgttaatatttcaagtctatttcaccaggaaaaaatatcatctagctgctgaaaaatcctcactattcctggccattctattcctgcatggttctctatgatatcacattcacaaattatgcataatctcctaaatactaagtttctttataggggaattttgtgcacattttagccaatttcctttggaatttttatgttgcttaggatacagttgaaaggatttcaattgaacttaataccttatattcatttatatatacacttatgtgt

SEQ ID NO: 703864 - DNA, 396 bp, Homo sapiens
attaggctttaacagtttttagtacactggttgtagcaaaagtatgtaataggagcactgcagtaagagaattgcaaatagcgaggatctcttgaaagataattgaagtagtgttggtttttctactagagaaacttcttcagagagtttaatgaatttgtgaagggtcatatgaagagttattatcattgttttgcatttcrtaatcagcagatactttaaaataatattagttctgtcagtgcctcagtgacaatggaaaataaatattatcatttatttttggcagttgatgaaaatatcagaagcatagctgttaattttgagggtgtttatccagaatgaaccattaactatataaagattattactacatcatagttcaagttttttttt

SEQ ID NO: 703865 - DNA, 396 bp, Homo sapiens
attaggctttaacagtttttagtacactggttgtagcaaaagtatgtaataggagcactgcagtaagagaattgcaaatagcgaggatctcttgaaagataattgaagtagtgttggtttttctactagagaaacttcttcagagagtttaatgaatttgtgaagggtcatatgaagagttattatcattgttttgcatttcataatcagcagatactttaaaataatattagttctgtcagtgcctcagtgacaatggaaaataaatattatcatttatttttggcagttgatgaaaatatcagaagcatarctgttaattttgagggtgtttatccagaatgaaccattaactatataaagattattactacatcatagttcaagttttttttt

SEQ ID NO: 703866 - DNA, 1508 bp, Homo sapiens
cacagatgagaaatccaggattcagagaagtgaaatttcctgcacaaggccactggctgacagagccagcagcctaatgaggtcttctggcaccrgcctctgctcatctgactacctactatgattactcttaggcttttgctctgaataaaagtctcactaccctacatttcaactaaggtctgaaaactacctgtacaactttggttgtaactgacaaccttttactcaacaatgtagagaaatagcatatataagaatcttactccaaatcaccttttaatcccaaacaataataagaggctgaagctgcctgtaaaactactttctatccttttgattttataagccacagacaacatcaaaattccagagtccatttgctgatatgtagaagccttcttgtgtgcaacaaaacaattaaaaaaaacaaaacaaaacaaaacaaaaaccacaaagatcatgcagaaaaagtgctctgcaaaattgaggcaatatttcaagctgatgcaatgaataaagacagccaatgtcagtcaacagccagtggaaaaataaccctcaacttcagattcatttgaagcctaccagaaagacagagtgaaatacaacacaaaactgtcacaaaagtctgttatttatagagaattgaattaaatatgacaattgaccaatagaattataatagttaactcttcctttcaggcatcacaagatggtgtttaccttacattacccagaaaatggactgcagatgatgatgaacttccctcagattaagaagcagccaacaaacaaaacaatcaaacttccaaattacagtctggctgaagaatcagaattattttgagagtttggcagctaaaacaaatgaactcaaagccatagggttagcaggatatatttggaatgagggtctaattgcagccaaagagagacaaaaggccaagggagatgctagagaaagagggtagtaacaaaattttttaatacactcagtcacatggacacttaaccaagttctattacagtctcatgctattagacactaaaaggtattgctaaggaatagtaaataaaacagtgtggcattaaggcagggatagatccaacataggcagaatatggtaatttagcccaaatcaatggagacaatatttattcatgaacaattggttttggaacaattggccagcagtttggaaaacaaggtaaaactggatcaccacttatttccttaaaacaaaataaattccaaaggaaacagaaatcaaaatccaaaaattaaaacaagaagaattataggagaatatataggaaaatacttttataatcttggaaaaaatgctttctaataacatcaaaaataaaaaaagcagttatttatataagaaatgaccattacatttaactccgtaaaactgtaaagtttctgcagagaaaaacatcttcacaaactgggttgaaggataaatgacaacatggaagagcaatttttcaaatacata

SEQ ID NO: 703867 - DNA, 1508 bp, Homo sapiens
cacagatgagaaatccaggattcagagaagtgaaatttcctgcacaaggccactggctgacagagccagcagcctaatgaggtcttctggcaccggcctctgctcatctgactacctactatgattactcttaggcttttgctctgaataaaagtctcactaccctacatttcaactaaggtctgaaaactacctgtacaactttggttgtaactgacaaccttttactcaacaatgtagagaaatagcatatataagaatcttactccaaatcaccttttaatcccaaacaataataagaggctgaagctgcctgtaaaactactttctatccttttgattttataagccacagacaacatcaaaattccagagtccatttgctgatatgtagaagccttcttgtgtgcaacaaaacaattaaaaaaaamaaaacaaaacaaaacaaaaaccacaaagatcatgcagaaaaagtgctctgcaaaattgaggcaatatttcaagctgatgcaatgaataaagacagccaatgtcagtcaacagccagtggaaaaataaccctcaacttcagattcatttgaagcctaccagaaagacagagtgaaatacaacacaaaactgtcacaaaagtctgttatttatagagaattgaattaaatatgacaattgaccaatagaattataatagttaactcttcctttcaggcatcacaagatggtgtttaccttacattacccagaaaatggactgcagatgatgatgaacttccctcagattaagaagcagccaacaaacaaaacaatcaaacttccaaattacagtctggctgaagaatcagaattattttgagagtttggcagctaaaacaaatgaactcaaagccatagggttagcaggatatatttggaatgagggtctaattgcagccaaagagagacaaaaggccaagggagatgctagagaaagagggtagtaacaaaattttttaatacactcagtcacatggacacttaaccaagttctattacagtctcatgctattagacactaaaaggtattgctaaggaatagtaaataaaacagtgtggcattaaggcagggatagatccaacataggcagaatatggtaatttagcccaaatcaatggagacaatatttattcatgaacaattggttttggaacaattggccagcagtttggaaaacaaggtaaaactggatcaccacttatttccttaaaacaaaataaattccaaaggaaacagaaatcaaaatccaaaaattaaaacaagaagaattataggagaatatataggaaaatacttttataatcttggaaaaaatgctttctaataacatcaaaaataaaaaaagcagttatttatataagaaatgaccattacatttaactccgtaaaactgtaaagtttctgcagagaaaaacatcttcacaaactgggttgaaggataaatgacaacatggaagagcaatttttcaaatacata

SEQ ID NO: 703868 - DNA, 1508 bp, Homo sapiens
cacagatgagaaatccaggattcagagaagtgaaatttcctgcacaaggccactggctgacagagccagcagcctaatgaggtcttctggcaccggcctctgctcatctgactacctactatgattactcttaggcttttgctctgaataaaagtctcactaccctacatttcaactaaggtctgaaaactacctgtacaactttggttgtaactgacaaccttttactcaacaatgtagagaaatagcatatataagaatcttactccaaatcaccttttaatcccaaacaataataagaggctgaagctgcctgtaaaactactttctatccttttgattttataagccacagacaacatcaaaattccagagtccatttgctgatatgtagaagccttcttgtgtgcaacaaaacaattaaaaaaaacaaaacaaaamaaaacaaaaaccacaaagatcatgcagaaaaagtgctctgcaaaattgaggcaatatttcaagctgatgcaatgaataaagacagccaatgtcagtcaacagccagtggaaaaataaccctcaacttcagattcatttgaagcctaccagaaagacagagtgaaatacaacacaaaactgtcacaaaagtctgttatttatagagaattgaattaaatatgacaattgaccaatagaattataatagttaactcttcctttcaggcatcacaagatggtgtttaccttacattacccagaaaatggactgcagatgatgatgaacttccctcagattaagaagcagccaacaaacaaaacaatcaaacttccaaattacagtctggctgaagaatcagaattattttgagagtttggcagctaaaacaaatgaactcaaagccatagggttagcaggatatatttggaatgagggtctaattgcagccaaagagagacaaaaggccaagggagatgctagagaaagagggtagtaacaaaattttttaatacactcagtcacatggacacttaaccaagttctattacagtctcatgctattagacactaaaaggtattgctaaggaatagtaaataaaacagtgtggcattaaggcagggatagatccaacataggcagaatatggtaatttagcccaaatcaatggagacaatatttattcatgaacaattggttttggaacaattggccagcagtttggaaaacaaggtaaaactggatcaccacttatttccttaaaacaaaataaattccaaaggaaacagaaatcaaaatccaaaaattaaaacaagaagaattataggagaatatataggaaaatacttttataatcttggaaaaaatgctttctaataacatcaaaaataaaaaaagcagttatttatataagaaatgaccattacatttaactccgtaaaactgtaaagtttctgcagagaaaaacatcttcacaaactgggttgaaggataaatgacaacatggaagagcaatttttcaaatacata

SEQ ID NO: 703869 - DNA, 1508 bp, Homo sapiens
cacagatgagaaatccaggattcagagaagtgaaatttcctgcacaaggccactggctgacagagccagcagcctaatgaggtcttctggcaccggcctctgctcatctgactacctactatgattactcttaggcttttgctctgaataaaagtctcactaccctacatttcaactaaggtctgaaaactacctgtacaactttggttgtaactgacaaccttttactcaacaatgtagagaaatagcatatataagaatcttactccaaatcaccttttaatcccaaacaataataagaggctgaagctgcctgtaaaactactttctatccttttgattttataagccacagacaacatcaaaattccagagtccatttgctgatatgtagaagccttcttgtgtgcaacaaaacaattaaaaaaaacaaaacaaaacaaaacaaaaaccacaaagatcatgcagaaaaagtgctctgcaaaattgaggcaatatttcaagctgatgcaatgaataaagacagccaatgtcagtcaacagccagtggaaaaataaccctcaacttcagattcatttgaagcctaccagaaagacagagtgaaatacaacacaaaactgtcacaaaagtctgttatttatagagaattgaattaaatatgacaattgaccaatagaattataatagttaactcttcctttcaggcatcacaagatggtgtttaccttacattacccagaaaatggactgcagatgatgatgaacttccctcagattaagaagcagccaacaaacaaaacaatcaaacttccaaattacagtctggctgaagaatcagaattattttgagagtttggcagctaaaacaaatgaactcaaagccatagggttagcaggatatatttggaatgagggtctaattgcagccaaagagagacaaaaggccaagggagatgctagagaaagagggtagtaacaaaattttttaatacactcagtcacatggacacttaaccaagttctattacagtctcatgctattagacactaaaaggtattgctaaggaatagtaaataaaacagtgtggcattaaggcagggatagatccaacataggcagaatatggtaatttagcccaaatcaatggagacaatatttattcatgaacaattggttttggaacaattggccagcagtttggaaaacaaggtaaaactggatcaccacttatttccttaaaacaaaataaattccaaaggaaacagaaatcaaaatccaaaaattaaaacaagaagaattataggagaatatataggaaaatacttttataatcttggaaaaaatgctttctaataacatcaaaaataaaaaaagcagttatttatataagaaatgaccattacatttaactccrtaaaactgtaaagtttctgcagagaaaaacatcttcacaaactgggttgaaggataaatgacaacatggaagagcaatttttcaaatacata

SEQ ID NO: 703870 - DNA, 1164 bp, Homo sapiens
caaatgcataattcagtggtttgtactttgcatctattaaccatggcaccaaatgcaggaatgacacaatggtgaggcttttgcttagacagtgtttttcctgagtgaagcttaacattcaaaccaatttataattcctttgcatagtagataagtatcataatagtcttttaatagatgactcgayggaaacacatatattataaggtcaatgtcactgcaaattattacaagaggtacaattcaagggtcctaactgttcgtatctaacatttacttctagattatgcatagtacatagtaggtttttaaaaatatccattgagctttattatattatcaatagtcaattaaataaaatgcagcttcaaggctttttttaaaaccaaagactgacttaagatagacacattcaactggtttgaaaatctctagctgaaaaataaccattatgtttctactagataaatgatggcagccggattaagtctcaactaactaaatatcatatttacttgcctttatgcaagtcgtgaaagcagaaatagagctgtggtggtaactttttatttattttccctatcttatacttacatatcttttacaaagtccaaatattcataattctattcattcacagaatgtctaggagaatctgttagtacagatactgttattcctgtttcaaagacagaagtcaaaaggttagaagtgatttatttatttttgctatgctttttttttttttaagttccagaatacatgtgcagaacctgtagatttgttacataggtatacatgagccatggtggtttgctgcacctatctacccataacctaggttttaagccccacatgcattagctatttgtcctgatgctgtctcttccctcacccccccaccccatgacaggtcgccatatgtgttgttgccctccctgtgtccatgtgttctcattgctcaactaccacttatgagtgagaacatgcagtgtttggttttctgttcctgtgttaatttgctgaagatgatggtttccagattcatctgtgtccccacaaaggacatgatctcattcctttttgtacctgcatagtattccatggtgtatatggactacattttctttatccagtctatcattgatgggcattgggttggtt

SEQ ID NO: 703871 - DNA, 1164 bp, Homo sapiens
caaatgcataattcagtggtttgtactttgcatctattaaccatggcaccaaatgcaggaatgacacaatggtgaggcttttgcttagacagtgtttttcctgagtgaagcttaacattcaaaccaatttataattcctttgcatagtagataagtatcataatagtcttttaatagatgactcgatggaaacacatatattataaggtcaatgtcactgcaaattattacaagaggtacaattcaagggtcctaactgttcgtatctaacatttacttctagattatgcatagtacatagtaggtttttaaaaatatccattgagctttattatattatcaatagtcaattaaataaaatgcagcttcaaggctttttttaaaaccaaagactgacttaagatagacacattcaactggtttgaaaatctctagctgaaaaataaccattatgtttctactagataaatgatggcagccggattaagtctcaactaactaaatatcatatttacttgcctttatgcaagtcgtgaaagcagaaatagagctgtggtggtaactttttatttattttccctatcttatacttacatatcttttacaaagtccaaatattcataattctattcattcacagaatgtctaggagaatctgttagtacagatactgttattcctgtttcaaagacagaagtcaaaaggttagaagtgatttatttatttttgctatgctttttttttttttaagttccagaatacatgtgcagaacctgtagatttgttacataggtatacatgagccatggtggtttgctgcacctatctacccataacctaggttttaagccccacatgcattagctatttgtcctgatgctgtctcttccctcaccccccsaccccatgacaggtcgccatatgtgttgttgccctccctgtgtccatgtgttctcattgctcaactaccacttatgagtgagaacatgcagtgtttggttttctgttcctgtgttaatttgctgaagatgatggtttccagattcatctgtgtccccacaaaggacatgatctcattcctttttgtacctgcatagtattccatggtgtatatggactacattttctttatccagtctatcattgatgggcattgggttggtt

SEQ ID NO: 703872 - DNA, 1164 bp, Homo sapiens
caaatgcataattcagtggtttgtactttgcatctattaaccatggcaccaaatgcaggaatgacacaatggtgaggcttttgcttagacagtgtttttcctgagtgaagcttaacattcaaaccaatttataattcctttgcatagtagataagtatcataatagtcttttaatagatgactcgatggaaacacatatattataaggtcaatgtcactgcaaattattacaagaggtacaattcaagggtcctaactgttcgtatctaacatttacttctagattatgcatagtacatagtaggtttttaaaaatatccattgagctttattatattatcaatagtcaattaaataaaatgcagcttcaaggctttttttaaaaccaaagactgacttaagatagacacattcaactggtttgaaaatctctagctgaaaaataaccattatgtttctactagataaatgatggcagccggattaagtctcaactaactaaatatcatatttacttgcctttatgcaagtcgtgaaagcagaaatagagctgtggtggtaactttttatttattttccctatcttatacttacatatcttttacaaagtccaaatattcataattctattcattcacagaatgtctaggagaatctgttagtacagatactgttattcctgtttcaaagacagaagtcaaaaggttagaagtgatttatttatttttgctatgctttttttttttttaagttccagaatacatgtgcagaacctgtagatttgttacataggtatacatgagccatggtggtttgctgcacctatctacccataacctaggttttaagccccacatgcattagctatttgtcctgatgctgtctcttccctcacccccccaccccatgacaggtcgccatatgtgttgttgccctccctgtgtccatgtgttctcattgctcaactmccacttatgagtgagaacatgcagtgtttggttttctgttcctgtgttaatttgctgaagatgatggtttccagattcatctgtgtccccacaaaggacatgatctcattcctttttgtacctgcatagtattccatggtgtatatggactacattttctttatccagtctatcattgatgggcattgggttggtt

SEQ ID NO: 703873 - DNA, 553 bp, Homo sapiens
gcatctcaaacaaacaaacaaacaaacaaacaaaaaacagatcttgagttgtcatcatccccatcaaggttttcaggctgaatttcattgttcaagagactcagcctgaaaaccgaacagctcaactgttttcatcaactgygctgtactctccgttttaaagacatcagatatatatctatcagcactatttttttttttttgctaatcacttattgcaggcaaattatttatatcttggatttttgttatttagttggacaatgaggttttggacaggtggatggaaaaaatttgtcctgattttaaaaataaattacacagcctaacagatatcataaatattcctgctttcttctctactaggttcaataaacatgtttttaggagttaaccagaaccttcctcatttagcaaagcattaccgaccatgcagtatctgtgttcaatccatgaagcattaagtcagggaatacatggataagcaagagccagccctggtcacccagagcccacaggtcgcctaagcttggtaggggctgaaagtggtttt

SEQ ID NO: 703874 - DNA, 553 bp, Homo sapiens
gcatctcaaacaaacaaacaaacaaacaaacaaaaaacagatcttgagttgtcatcatccccatcaaggttttcaggctgaatttcattgttcaagagactcagcctgaaaaccgaacagctcaactgttttcatcaactgcgctgtactctccgttttaaagacatcagatatmtatctatcagcactatttttttttttttgctaatcacttattgcaggcaaattatttatatcttggatttttgttatttagttggacaatgaggttttggacaggtggatggaaaaaatttgtcctgattttaaaaataaattacacagcctaacagatatcataaatattcctgctttcttctctactaggttcaataaacatgtttttaggagttaaccagaaccttcctcatttagcaaagcattaccgaccatgcagtatctgtgttcaatccatgaagcattaagtcagggaatacatggataagcaagagccagccctggtcacccagagcccacaggtcgcctaagcttggtaggggctgaaagtggtttt

SEQ ID NO: 703875 - DNA, 553 bp, Homo sapiens
gcatctcaaacaaacaaacaaacaaacaaacaaaaaacagatcttgagttgtcatcatccccatcaaggttttcaggctgaatttcattgttcaagagactcagcctgaaaaccgaacagctcaactgttttcatcaactgcgctgtactctccgttttaaagacatcagatatatatctatcagcactatttttttttttttgctaatcacttattgcaggcaaattatttatatcttggatttttgttatttagttggacaatgaggttttggacaggtggatggaaaaaatttgtcctgattttaaaaataaattacacagcctaacagatatcataaayattcctgctttcttctctactaggttcaataaacatgtttttaggagttaaccagaaccttcctcatttagcaaagcattaccgaccatgcagtatctgtgttcaatccatgaagcattaagtcagggaatacatggataagcaagagccagccctggtcacccagagcccacaggtcgcctaagcttggtaggggctgaaagtggtttt

SEQ ID NO: 703876 - DNA, 1965 bp, Homo sapiens
gatatgcagtccaccctgtcaagatagacaaagtacccacatgataaggacagtaataaataagttgtgaaatttcggaaatttttcatgtatttccataaatgcaattggtgataagatgactcacatagagcaccaaggtggcaatatgtctatcacccagtgctaggttcaccttcctggccatacgagatcgtttggaaagtcaccagcaaagtcctgggagtcaaaacacctgaattccaatacaactgactgagcccctgagaatcaattcatcctttggaattatcccatataaactggggataacagacctcacatagttattgtgattatgaatgagagtgttccagagacaatgttccataaactctaaagctcagtacagacaagcatgtcacatgtgaggggagagcactggatcaggggagaactcctttatttatttgatgatatttctggccattactttgtccaggtcctgagagaggtatgtttctttgactttatgtatacactaaaaacagtacagtaagtcctcacttgatattgacagactgttagaaactgtgactttaagcaaaatgacctacaacaagtcctcaaataacatccttttgttataacattgatgagaaaaaaagttggttttcttatacattgtttcacttaaaagttgcagtttccaagaacctattgatggtaggatgtagaagacttactgtaatggggttaaaaattattccacataattatggaatttttttctgcctccaaaatagcccatttacatgcaggaaggagattggtcactgatgaaaaactaagccaaacaaagaaggaaagatggttaaacatctgaattctcccattctttgagaaaccaccaaagagtgaagaagtaagagaacctatcttcttccatctttgggctagaaatatacttgtgcttatatgctggctattctaaccattgagtttacaactgccaagcaatgttttcttaaaaacaggcccttttacagaaagggaaagaactggtaggcatccttataaagcatgttgaatgttggcacctgggaaaggtgtacttgaatccacctggacacaaatagagaagacggggctttctggaagacagaggtagtatctgcacaaaaaagcagtccaccacagccttctctaccaccatctggatatgtttacgagcaacagaagctttttctttttcttcatttttttccatgtgataaattttgaatctgatatttctatttagatgagtaaaaagatcaatggaatcagatgaatcccaatcgatatttgacagttttcaagtaacattgaaccacatatggagtgtgctgaaagcacatagaatagatgattgagcactgttcatartttcaatagtggcttagaagatcaaaagatgctttctgcagatgtagtgccaagataattactacactacttgggccagatttaaataagttgaacaaacttatgtcagttgtatttgtagtttaattgcttttcacactatctcatcagattctttgtagaccttataaggttgtcagtataaggattattatccctattttacaaatgagtaatctgaattccagaagtctgagacatttgcttaagctcacttacgtattcattcaatcattccgacaacatttaaacgttttgttggaatgattgaatgaatacatgaaagaataaatgagcagatagcaataggcatgagtaggtccaaggtcaagtttcctgaccttcggtgcaaaatgttttccagtataccagcattattcaaacttgagcaatatgtgttttgctcaagaaaagaatctccattgtaattatatctattataatattatgatggacagtataattctggtattagcttttcaactcttatcggtaaaagactggggaatctagtttaaa

SEQ ID NO: 703877 - DNA, 715 bp, Homo sapiens
tatggcagcaaatgaccattaatgaactgtaagttgaaaatttctgtctttctcacatattaaagagatatataaaatatatacataaaaatataataaaatatacaaaaatagatacaaataaaataaagtactgtttccatatttgcatcaaatagtcttcataaaagacctggcaccaacttctttttgattattaatttcatattaacacggttgtacactaatggtgctccttctcttttgatatgggagaggtcactttgatccatggccaaccacattaaatgcagcaaattttttcagttaaaagaaaaaaattattatgtgatgatgcaacctggataatttcttctgtttgccttcctcsaaaaattgtaagatatcatataaaaatgtataagtaactcattagccaagagtcatttgcctcaataaatatttattcagcatcaatttcaacaggtgttaagcacaattttaaaatgtgtgtttttcctagagtaacttaaaagtttttttctgatgcttaagctataaatacatgtgaaacaactagaagattatgcttgcagttgtgccatataaaaatggtgttatataattagtactatacatagctggttctacacaatattaagtgaaatcaaagtgaggtcatgtctctctacgtgtctggcataatcagaaattattttcttggaggaaaattttt

SEQ ID NO: 703878 - DNA, 707 bp, Homo sapiens
ctggcatgacctacaagagagaaattttaattataattttggattatgtattctaatttctaattgatacactctgaaaatttagttgtccacaaaactgtccatttcttaaaggtgagcaaaaaagccataggtttccaatagtttcatcaaagatgaaaagtttatattcaccaaatcaatattaaagagatagtgggaaacaaaaataaaatagaattttaactacattttatgatttgtggtttctatgttttttaaatcattttctaagttttatgctttcctaagactatgaaacaagagtggtaatcactgctaagttaattatttatagtaacattttaataaaagcaatcatctttatgaaaaatggaaagatttggcacctagaatgtgtctttaaaattctgagattgagctggcaagcctagttaattgtagaaaaaggcccccagaaccctatcttttcgatatccattgagtcaccacaaacatggtgacagctttgcaaatcgtatgcctaatgcttagacaaaaccctacagctactatgaaataggtgatgagattaacccaaatgcccatgggtcatgcagagaggtaaaagaggataaggtagggtttaaaygcatatatgtttgtagaaaaaaggggcatttctcaatttaaaggggtgcttattactcagatctaactgaataata

SEQ ID NO: 703879 - DNA, 707 bp, Homo sapiens
ctggcatgacctacaagagagaaattttaattataattttggattatgtattctaatttctaattgatacactctgaaaatttagttgtccacaaaactgtccatttcttaaaggtgagcaaaaaagccataggtttccaatagtttcatcaaagatgaaaagtttatattcaccaaatcaatattaaagagatagtgggaaacaaaaataaaatagaattttaactacattttatgatttgtggtttctatgttttttaaatcattttctaagttttatgctttcctaagactatgaaacaagagtggtaatcactgctaagttaattatttatagtaacattttaataaaagcaatcatctttatgaaaaatggaaagatttggcacctagaatgtgtctttaaaattctgagattgagctggcaagcctagttaattgtagaaaaaggcccccagaaccctatcttttcgatatccattgagtcaccacaaacatggtgacagctttgcaaatcgtatgcctaatgcttagacaaaaccctacagctactatgaaataggtgatgagattaacccaaatgcccatgggtcatgcagagaggtaaaagaggataaggtagggtttaaatgcatatatgtttgtagaaaaaaggggcatttctcaatttaaaggggtrcttattactcagatctaactgaataata

SEQ ID NO: 703880 - DNA, 595 bp, Homo sapiens
taatttagttatgatttctcagaatctagctatgcattctgaattctaattttcaattaggttccttgtggcatcattgagcattgaaaataattttatgacttgtaacagctcatgagaaaataaatgggttcagtcaataacattaccaggcaggtcatccacaagccacaataatatcatggagaattcaaagcaaatggatttgcttactaggcaagatagcatgtcaaagccttgaacaaattaaggttcttggctattaggcctacagggacctcagttgcaaggttcagtgagggcaaaagccagaactgggactgagggcagaaccttgcaatagtgattattttaatgcatagtgtctaagggkgtttaaggagcaagaaatagatccaagaaaacatctgactaatggttaatctgttgggacagttatgtcagcagaaacccatgaggctttccaatgaccttccttaagccaatcaaacaataagcatttccaaactacggttttatattaggtatatgtagtgctttataaaaacaagagctacttgatcatgtaatcctagaaaatccttcaatcaatact

SEQ ID NO: 703881 - DNA, 2614 bp, Homo sapiens
cagcagcgtattagaatttgtaggagattcctggagcctttctgagaaattctgattgaattagtcagaggcgtgttctgggaatcagaattacaaagttccccagttgattctaatttgtaggcaaggtgatatatgccaaactgacccaggatacaggataccctggagtggatattcaaattcagtttcacaggaccaaaacaaccttctaactcaaaatctttggctatgtacctgagtattctgtaaggttaatgaagacctcaagtcacactctcaccatggaagattaaagacattgcctatcatattccacttcttgtccaaaacactttctcaatttttatttttacttttcatgattactactgaaccaagggtaacataggagggaaaaaaaggaaacagtgcaagctctgtcctatgctgaatatccattttttcctcttagagtcctcatttgagatgatttatctgttcacaagaataagcagggtggagtggggagccgaggagctgaggmacggaattggactggttgggaaggaggaacacttggcttaatcccccatcaacagcagaactcaaatttaaaattgtagttaatgagaagagcccaccactatcacaaagattaactgacttccctggaagctgctcggtgtgcacctttaaacctggttctatgaatacatgtcacctccatctataaactttgaattaatatttttgaccttttctctctatttaaaggataaaattatattccactgcatttgtacatgctaaaaaatttaaaatacaccgcaatatattctatctttattagacttatttttggtaatttttacatatgccaagagcctcagaaatttgaactgatccaagcctcactccacctgaaaggccctgtttatgccagtcagcctgaaactcttctttagaaatagtcactgcaaatgcctagatgccaccacgagggggcctctgtgtcacagataaaattaaggaaatgttcaagacctcacaaattcctttatgtagtgaaagacctgctctgcaggatacttttttttttttttaattatgaagttattgtagaattagagggaataatttcacctatggccaatatactgtcaatgcaatagtacattattttgtggctaatgtagtgttctaatgttctgaaatgtctaatttccattcactgtgaagaaacaaagtactatctacaagaactggtgcattatagaggtctttacattacagtgtatcttctgtttccttaatcaaagcaactgtaatgatgacatatattattgatcattagaactgactgtaatttctctgaattactgggaaatggaaactgaaaatataaactatggatagtactatgaaataaatgtacttttgattaaattcactctccaataaatgctactgactgacattctaaagaattaccttcttgattttgaaatgttctgaacaagggtgcttctgtggtttgttggtttacaaaaagtggctagcatacattaaaagtgaatatctaaattaggatgatttttaaacaaataattgggtgatattttccagaatatttttagttataattttaaagtaatgtattttgtgagataaattctaaacaaagctgaatattatgactccttccacattacatctctaagcacataaaccaacaatgtggtgtcagtaaaacagcccctgaacataaagcaaaaatgagcagcataattgaaaaccattaactatataaagatgagcactaaaatgagactgattgtattaaaatatttgctgctcttctgtgggggaattatgcattctgccccatggatgttatgcttggtgatatgatttagagtacccatgaaatatgaatgccatatttaagcagaagctttaagagccatggggtggttccaccatgttcctttcctctctgccttgagaggatcagtggtttagggaggggtgtttcattggcctaggtcctgaagcatgggagagatccatagcctacttgtgataagcagcatgcaaatatgtaaaaatgcattttttttattgttgtaaacccctattatcctgaccgatacaactaatttactaagcataaggaagaaaacactgtatggctattaaagatatctgacttcaatgttgatcaaagaagtagcagaaccagtagccctacaagcaagggaaagagaaggaaaatgcaaagattgaaattattgctggtgttagcagcagactgctgcagcaaaccagagacattagaagtccttataaaagtggtaagccacttttatgccactgtagaaagattaatactaggtgccaatttattgaatattaactatgtgccaagatctttttgtgtataatctcactttattctcataagcatccttcagttcagcgctattatttttctttctcaatgatgaaacaggctttgaaatgttaagttcattcatttacatattccttgttcatttgttcactttttcactcataattcaatcaacaaatatttcttaagcacctattataaataaatcaggtggcaaag

SEQ ID NO: 703882 - DNA, 2614 bp, Homo sapiens
cagcagcgtattagaatttgtaggagattcctggagcctttctgagaaattctgattgaattagtcagaggcgtgttctgggaatcagaattacaaagttccccagttgattctaatttgtaggcaaggtgatatatgccaaactgacccaggatacaggataccctggagtggatattcaaattcagtttcacaggaccaaaacaaccttctaactcaaaatctttggctatgtacctgagtattctgtaaggttaatgaagacctcaagtcacactctcaccatggaagattaaagacattgcctatcatattccacttcttgtccaaaacactttctcaatttttatttttacttttcatgattactactgaaccaagggtaacataggagggaaaaaaaggaaacagtgcaagctctgtcctatgctgaatatccattttttcctcttagagtcctcatttgagatgatttatctgttcacaagaataagcagggtggagtggggagccgaggagctgaggcacrgaattggactggttgggaaggaggaacacttggcttaatcccccatcaacagcagaactcaaatttaaaattgtagttaatgagaagagcccaccactatcacaaagattaactgacttccctggaagctgctcggtgtgcacctttaaacctggttctatgaatacatgtcacctccatctataaactttgaattaatatttttgaccttttctctctatttaaaggataaaattatattccactgcatttgtacatgctaaaaaatttaaaatacaccgcaatatattctatctttattagacttatttttggtaatttttacatatgccaagagcctcagaaatttgaactgatccaagcctcactccacctgaaaggccctgtttatgccagtcagcctgaaactcttctttagaaatagtcactgcaaatgcctagatgccaccacgagggggcctctgtgtcacagataaaattaaggaaatgttcaagacctcacaaattcctttatgtagtgaaagacctgctctgcaggatacttttttttttttttaattatgaagttattgtagaattagagggaataatttcacctatggccaatatactgtcaatgcaatagtacattattttgtggctaatgtagtgttctaatgttctgaaatgtctaatttccattcactgtgaagaaacaaagtactatctacaagaactggtgcattatagaggtctttacattacagtgtatcttctgtttccttaatcaaagcaactgtaatgatgacatatattattgatcattagaactgactgtaatttctctgaattactgggaaatggaaactgaaaatataaactatggatagtactatgaaataaatgtacttttgattaaattcactctccaataaatgctactgactgacattctaaagaattaccttcttgattttgaaatgttctgaacaagggtgcttctgtggtttgttggtttacaaaaagtggctagcatacattaaaagtgaatatctaaattaggatgatttttaaacaaataattgggtgatattttccagaatatttttagttataattttaaagtaatgtattttgtgagataaattctaaacaaagctgaatattatgactccttccacattacatctctaagcacataaaccaacaatgtggtgtcagtaaaacagcccctgaacataaagcaaaaatgagcagcataattgaaaaccattaactatataaagatgagcactaaaatgagactgattgtattaaaatatttgctgctcttctgtgggggaattatgcattctgccccatggatgttatgcttggtgatatgatttagagtacccatgaaatatgaatgccatatttaagcagaagctttaagagccatggggtggttccaccatgttcctttcctctctgccttgagaggatcagtggtttagggaggggtgtttcattggcctaggtcctgaagcatgggagagatccatagcctacttgtgataagcagcatgcaaatatgtaaaaatgcattttttttattgttgtaaacccctattatcctgaccgatacaactaatttactaagcataaggaagaaaacactgtatggctattaaagatatctgacttcaatgttgatcaaagaagtagcagaaccagtagccctacaagcaagggaaagagaaggaaaatgcaaagattgaaattattgctggtgttagcagcagactgctgcagcaaaccagagacattagaagtccttataaaagtggtaagccacttttatgccactgtagaaagattaatactaggtgccaatttattgaatattaactatgtgccaagatctttttgtgtataatctcactttattctcataagcatccttcagttcagcgctattatttttctttctcaatgatgaaacaggctttgaaatgttaagttcattcatttacatattccttgttcatttgttcactttttcactcataattcaatcaacaaatatttcttaagcacctattataaataaatcaggtggcaaag

SEQ ID NO: 703883 - DNA, 2614 bp, Homo sapiens
cagcagcgtattagaatttgtaggagattcctggagcctttctgagaaattctgattgaattagtcagaggcgtgttctgggaatcagaattacaaagttccccagttgattctaatttgtaggcaaggtgatatatgccaaactgacccaggatacaggataccctggagtggatattcaaattcagtttcacaggaccaaaacaaccttctaactcaaaatctttggctatgtacctgagtattctgtaaggttaatgaagacctcaagtcacactctcaccatggaagattaaagacattgcctatcatattccacttcttgtccaaaacactttctcaatttttatttttacttttcatgattactactgaaccaagggtaacataggagggaaaaaaaggaaacagtgcaagctctgtcctatgctgaatatccattttttcctcttagagtcctcatttgagatgatttatctgttcacaagaataagcagggtggagtggggagccgaggagctgaggcacggaattggactggttgggaaggaggaacacttggcttaatcccccatcaacagmagaactcaaatttaaaattgtagttaatgagaagagcccaccactatcacaaagattaactgacttccctggaagctgctcggtgtgcacctttaaacctggttctatgaatacatgtcacctccatctataaactttgaattaatatttttgaccttttctctctatttaaaggataaaattatattccactgcatttgtacatgctaaaaaatttaaaatacaccgcaatatattctatctttattagacttatttttggtaatttttacatatgccaagagcctcagaaatttgaactgatccaagcctcactccacctgaaaggccctgtttatgccagtcagcctgaaactcttctttagaaatagtcactgcaaatgcctagatgccaccacgagggggcctctgtgtcacagataaaattaaggaaatgttcaagacctcacaaattcctttatgtagtgaaagacctgctctgcaggatacttttttttttttttaattatgaagttattgtagaattagagggaataatttcacctatggccaatatactgtcaatgcaatagtacattattttgtggctaatgtagtgttctaatgttctgaaatgtctaatttccattcactgtgaagaaacaaagtactatctacaagaactggtgcattatagaggtctttacattacagtgtatcttctgtttccttaatcaaagcaactgtaatgatgacatatattattgatcattagaactgactgtaatttctctgaattactgggaaatggaaactgaaaatataaactatggatagtactatgaaataaatgtacttttgattaaattcactctccaataaatgctactgactgacattctaaagaattaccttcttgattttgaaatgttctgaacaagggtgcttctgtggtttgttggtttacaaaaagtggctagcatacattaaaagtgaatatctaaattaggatgatttttaaacaaataattgggtgatattttccagaatatttttagttataattttaaagtaatgtattttgtgagataaattctaaacaaagctgaatattatgactccttccacattacatctctaagcacataaaccaacaatgtggtgtcagtaaaacagcccctgaacataaagcaaaaatgagcagcataattgaaaaccattaactatataaagatgagcactaaaatgagactgattgtattaaaatatttgctgctcttctgtgggggaattatgcattctgccccatggatgttatgcttggtgatatgatttagagtacccatgaaatatgaatgccatatttaagcagaagctttaagagccatggggtggttccaccatgttcctttcctctctgccttgagaggatcagtggtttagggaggggtgtttcattggcctaggtcctgaagcatgggagagatccatagcctacttgtgataagcagcatgcaaatatgtaaaaatgcattttttttattgttgtaaacccctattatcctgaccgatacaactaatttactaagcataaggaagaaaacactgtatggctattaaagatatctgacttcaatgttgatcaaagaagtagcagaaccagtagccctacaagcaagggaaagagaaggaaaatgcaaagattgaaattattgctggtgttagcagcagactgctgcagcaaaccagagacattagaagtccttataaaagtggtaagccacttttatgccactgtagaaagattaatactaggtgccaatttattgaatattaactatgtgccaagatctttttgtgtataatctcactttattctcataagcatccttcagttcagcgctattatttttctttctcaatgatgaaacaggctttgaaatgttaagttcattcatttacatattccttgttcatttgttcactttttcactcataattcaatcaacaaatatttcttaagcacctattataaataaatcaggtggcaaag

SEQ ID NO: 703884 - DNA, 2614 bp, Homo sapiens
cagcagcgtattagaatttgtaggagattcctggagcctttctgagaaattctgattgaattagtcagaggcgtgttctgggaatcagaattacaaagttccccagttgattctaatttgtaggcaaggtgatatatgccaaactgacccaggatacaggataccctggagtggatattcaaattcagtttcacaggaccaaaacaaccttctaactcaaaatctttggctatgtacctgagtattctgtaaggttaatgaagacctcaagtcacactctcaccatggaagattaaagacattgcctatcatattccacttcttgtccaaaacactttctcaatttttatttttacttttcatgattactactgaaccaagggtaacataggagggaaaaaaaggaaacagtgcaagctctgtcctatgctgaatatccattttttcctcttagagtcctcatttgagatgatttatctgttcacaagaataagcagggtggagtggggagccgaggagctgaggcacggaattggactggttgggaaggaggaacacttggcttaatcccccatcaacagcagaactcaaatttaaaattgtagttaatgagaagagcccaccactatcacaaagattaactgacttccctggaagctgctcggtgtgcacctttaaacctggttctatgaatacatgtcacctccatctataaactttgaattaatatttttgaccttttctctctatttaaaggataaaattatattccactgcatttgtacatgctaaaaaatttaaaatacaccgcaatatattctatctttattagacttatttttggtaatttttacatatgccaagagcctcagaaatttgaactgatccaagcctcactccacctgaaaggccctgtttatgccagtcagcctgaaactcttctttagaaatagtcactgcaaatgcctagatgccaccacgagggggcctctgtgtcacagataaaattaaggaaatgttcaagacctcacaaattcctttatgtagtgaaagacctgctctgcaggatacttttttttttttttaattatgaagttattgtagaattagagggaataatttcacctatggccaatatactgtcaatgcaatagtacattattttgtggctaatgtagtgttctaatgttctgaaatgtctaatttccattcactgtgaagaaacaaagtactatctacaagaactggtgcattatagaggtctttacattacagtgtatcttctgtttccttaatcaaagcaactgtaatgatgacatatattattgatcattagaactgactgtaatttctctgaattacygggaaatggaaactgaaaatataaactatggatagtactatgaaataaatgtacttttgattaaattcactctccaataaatgctactgactgacattctaaagaattaccttcttgattttgaaatgttctgaacaagggtgcttctgtggtttgttggtttacaaaaagtggctagcatacattaaaagtgaatatctaaattaggatgatttttaaacaaataattgggtgatattttccagaatatttttagttataattttaaagtaatgtattttgtgagataaattctaaacaaagctgaatattatgactccttccacattacatctctaagcacataaaccaacaatgtggtgtcagtaaaacagcccctgaacataaagcaaaaatgagcagcataattgaaaaccattaactatataaagatgagcactaaaatgagactgattgtattaaaatatttgctgctcttctgtgggggaattatgcattctgccccatggatgttatgcttggtgatatgatttagagtacccatgaaatatgaatgccatatttaagcagaagctttaagagccatggggtggttccaccatgttcctttcctctctgccttgagaggatcagtggtttagggaggggtgtttcattggcctaggtcctgaagcatgggagagatccatagcctacttgtgataagcagcatgcaaatatgtaaaaatgcattttttttattgttgtaaacccctattatcctgaccgatacaactaatttactaagcataaggaagaaaacactgtatggctattaaagatatctgacttcaatgttgatcaaagaagtagcagaaccagtagccctacaagcaagggaaagagaaggaaaatgcaaagattgaaattattgctggtgttagcagcagactgctgcagcaaaccagagacattagaagtccttataaaagtggtaagccacttttatgccactgtagaaagattaatactaggtgccaatttattgaatattaactatgtgccaagatctttttgtgtataatctcactttattctcataagcatccttcagttcagcgctattatttttctttctcaatgatgaaacaggctttgaaatgttaagttcattcatttacatattccttgttcatttgttcactttttcactcataattcaatcaacaaatatttcttaagcacctattataaataaatcaggtggcaaag

SEQ ID NO: 703885 - DNA, 2614 bp, Homo sapiens
cagcagcgtattagaatttgtaggagattcctggagcctttctgagaaattctgattgaattagtcagaggcgtgttctgggaatcagaattacaaagttccccagttgattctaatttgtaggcaaggtgatatatgccaaactgacccaggatacaggataccctggagtggatattcaaattcagtttcacaggaccaaaacaaccttctaactcaaaatctttggctatgtacctgagtattctgtaaggttaatgaagacctcaagtcacactctcaccatggaagattaaagacattgcctatcatattccacttcttgtccaaaacactttctcaatttttatttttacttttcatgattactactgaaccaagggtaacataggagggaaaaaaaggaaacagtgcaagctctgtcctatgctgaatatccattttttcctcttagagtcctcatttgagatgatttatctgttcacaagaataagcagggtggagtggggagccgaggagctgaggcacggaattggactggttgggaaggaggaacacttggcttaatcccccatcaacagcagaactcaaatttaaaattgtagttaatgagaagagcccaccactatcacaaagattaactgacttccctggaagctgctcggtgtgcacctttaaacctggttctatgaatacatgtcacctccatctataaactttgaattaatatttttgaccttttctctctatttaaaggataaaattatattccactgcatttgtacatgctaaaaaatttaaaatacaccgcaatatattctatctttattagacttatttttggtaatttttacatatgccaagagcctcagaaatttgaactgatccaagcctcactccacctgaaaggccctgtttatgccagtcagcctgaaactcttctttagaaatagtcactgcaaatgcctagatgccaccacgagggggcctctgtgtcacagataaaattaaggaaatgttcaagacctcacaaattcctttatgtagtgaaagacctgctctgcaggatacttttttttttttttaattatgaagttattgtagaattagagggaataatttcacctatggccaatatactgtcaatgcaatagtacattattttgtggctaatgtagtgttctaatgttctgaaatgtctaatttccattcactgtgaagaaacaaagtactatctacaagaactggtgcattatagaggtctttacattacagtgtatcttctgtttccttaatcaaagcaactgtaatgatgacatatattattgatcattagaactgactgtaatttctctgaattactgggaaatggaaactgaaaatataaactatggatagtactatgaaataaatgtacttttgattaaattcactctccaataaatgctactgactgacattctaaagaattaccttcttgattttgaaatgttctgaacaagggtgyttctgtggtttgttggtttacaaaaagtggctagcatacattaaaagtgaatatctaaattaggatgatttttaaacaaataattgggtgatattttccagaatatttttagttataattttaaagtaatgtattttgtgagataaattctaaacaaagctgaatattatgactccttccacattacatctctaagcacataaaccaacaatgtggtgtcagtaaaacagcccctgaacataaagcaaaaatgagcagcataattgaaaaccattaactatataaagatgagcactaaaatgagactgattgtattaaaatatttgctgctcttctgtgggggaattatgcattctgccccatggatgttatgcttggtgatatgatttagagtacccatgaaatatgaatgccatatttaagcagaagctttaagagccatggggtggttccaccatgttcctttcctctctgccttgagaggatcagtggtttagggaggggtgtttcattggcctaggtcctgaagcatgggagagatccatagcctacttgtgataagcagcatgcaaatatgtaaaaatgcattttttttattgttgtaaacccctattatcctgaccgatacaactaatttactaagcataaggaagaaaacactgtatggctattaaagatatctgacttcaatgttgatcaaagaagtagcagaaccagtagccctacaagcaagggaaagagaaggaaaatgcaaagattgaaattattgctggtgttagcagcagactgctgcagcaaaccagagacattagaagtccttataaaagtggtaagccacttttatgccactgtagaaagattaatactaggtgccaatttattgaatattaactatgtgccaagatctttttgtgtataatctcactttattctcataagcatccttcagttcagcgctattatttttctttctcaatgatgaaacaggctttgaaatgttaagttcattcatttacatattccttgttcatttgttcactttttcactcataattcaatcaacaaatatttcttaagcacctattataaataaatcaggtggcaaag

SEQ ID NO: 703886 - DNA, 2614 bp, Homo sapiens
cagcagcgtattagaatttgtaggagattcctggagcctttctgagaaattctgattgaattagtcagaggcgtgttctgggaatcagaattacaaagttccccagttgattctaatttgtaggcaaggtgatatatgccaaactgacccaggatacaggataccctggagtggatattcaaattcagtttcacaggaccaaaacaaccttctaactcaaaatctttggctatgtacctgagtattctgtaaggttaatgaagacctcaagtcacactctcaccatggaagattaaagacattgcctatcatattccacttcttgtccaaaacactttctcaatttttatttttacttttcatgattactactgaaccaagggtaacataggagggaaaaaaaggaaacagtgcaagctctgtcctatgctgaatatccattttttcctcttagagtcctcatttgagatgatttatctgttcacaagaataagcagggtggagtggggagccgaggagctgaggcacggaattggactggttgggaaggaggaacacttggcttaatcccccatcaacagcagaactcaaatttaaaattgtagttaatgagaagagcccaccactatcacaaagattaactgacttccctggaagctgctcggtgtgcacctttaaacctggttctatgaatacatgtcacctccatctataaactttgaattaatatttttgaccttttctctctatttaaaggataaaattatattccactgcatttgtacatgctaaaaaatttaaaatacaccgcaatatattctatctttattagacttatttttggtaatttttacatatgccaagagcctcagaaatttgaactgatccaagcctcactccacctgaaaggccctgtttatgccagtcagcctgaaactcttctttagaaatagtcactgcaaatgcctagatgccaccacgagggggcctctgtgtcacagataaaattaaggaaatgttcaagacctcacaaattcctttatgtagtgaaagacctgctctgcaggatacttttttttttttttaattatgaagttattgtagaattagagggaataatttcacctatggccaatatactgtcaatgcaatagtacattattttgtggctaatgtagtgttctaatgttctgaaatgtctaatttccattcactgtgaagaaacaaagtactatctacaagaactggtgcattatagaggtctttacattacagtgtatcttctgtttccttaatcaaagcaactgtaatgatgacatatattattgatcattagaactgactgtaatttctctgaattactgggaaatggaaactgaaaatataaactatggatagtactatgaaataaatgtacttttgattaaattcactctccaataaatgctactgactgacattctaaagaattaccttcttgattttgaaatgttctgaacaagggtgcttctgtggtttgttggtttacaaaaagtggctagcatacattaaaagtgaatatctaaattaggatgatttttaaacaaataattgggtgatattttccagaatatttttagttataattttaaagtaatgtattttgtgagataaattctaaacaaagctgaatattatgactccttccacattacrtctctaagcacataaaccaacaatgtggtgtcagtaaaacagcccctgaacataaagcaaaaatgagcagcataattgaaaaccattaactatataaagatgagcactaaaatgagactgattgtattaaaatatttgctgctcttctgtgggggaattatgcattctgccccatggatgttatgcttggtgatatgatttagagtacccatgaaatatgaatgccatatttaagcagaagctttaagagccatggggtggttccaccatgttcctttcctctctgccttgagaggatcagtggtttagggaggggtgtttcattggcctaggtcctgaagcatgggagagatccatagcctacttgtgataagcagcatgcaaatatgtaaaaatgcattttttttattgttgtaaacccctattatcctgaccgatacaactaatttactaagcataaggaagaaaacactgtatggctattaaagatatctgacttcaatgttgatcaaagaagtagcagaaccagtagccctacaagcaagggaaagagaaggaaaatgcaaagattgaaattattgctggtgttagcagcagactgctgcagcaaaccagagacattagaagtccttataaaagtggtaagccacttttatgccactgtagaaagattaatactaggtgccaatttattgaatattaactatgtgccaagatctttttgtgtataatctcactttattctcataagcatccttcagttcagcgctattatttttctttctcaatgatgaaacaggctttgaaatgttaagttcattcatttacatattccttgttcatttgttcactttttcactcataattcaatcaacaaatatttcttaagcacctattataaataaatcaggtggcaaag

SEQ ID NO: 703887 - DNA, 589 bp, Homo sapiens
caccttagaggatcagagaaagcttccaggcagaggaaaggaacaatttaaggaggtttttgacagtgaatagaagtttcgcattcaagaaaggagagaaagggtattccaggccaggggaacagaatgtgcaaaggcttagaaagatcaaggaacatggtgtattctggaggcatgacayacttcatgtgattagcatgtatttagtatgtgcatgcaagcacatgtttgttggtgtgtgtatgtgtatgtatgtgtacacacatgtgcaggaaggttgaggtaaaaattcttaaaagacacatttagaaaattcaggttgaggcattcgcagggcggtaccatctgccatgctaaggaatttcccatagtaacgcagttctttaaatagatgtgacacctcttataaacttgtatttttggtttagaacaacgtttgtcttaactctactgaatatcagaatcacttggggagcttttaaaactcctggtcctcagaccacatcccagaccaattgaatcagaatctctgtgagggaatccagacatcagtatttttttttctagttgccttgcccatattaacttc

SEQ ID NO: 703888 - DNA, 746 bp, Homo sapiens
ggggaygcaccaaggcagctgaatatcaaggatataaatgtggtgggcaagagccactttccaaatcgccaaggtggtcaaaaaaacaaaaaaacttagagagggctgagaaagaaggtcagtcaaggaagagcagaagagaagaaattttatttacttttttttctgagacagggtcttgctctgtcacccaggctggagtgcagggtggggccatcatggctcactgcagtcttgacctcccaggctcaagcgatcctcctgcctccgcccccccaagtggctaggactataggcatgtgccaccagccttggttaatttttaaattcttcgtagagatgggggcctcactatgttgcccaggctggtctcaattcctggggtcaagccaccctcccaccttggcctcctaaagtgttggaattacaggtgtgagccactgtgcctggccaggattttaaaatgaatataaatgagcctagtgaaggagttggggaggaggtgatgggagacacttacgtgcttaataaagagctgtgccaatctgtcttgctcctggatacacttttccagttccgccaggaaaaaactaaaaggagaaaggggataagagaaggaagccacattattcagaactgtattatttctcaataataagatgaattacagaagactctcccctaagccctactccttgagtcagatgcaggaagaggactcaagtcctggattcccaggacactgg

SEQ ID NO: 703889 - DNA, 803 bp, Homo sapiens
tgatggagtctccctctgtcacccaggctggagtscagtggcacaatcttggctcactgcagcttctgtcttccaagttcaagcgattctcctgccttagcctcctgagtagctgggatcacaggtgcttaccaccacgcctggctaatttttgtgtttttagtagagacggggtttcaccatgttggccaagctggtctcaaactcctgacctcaggcaatccacccatcttggcctcccaaagtgctgggattataggagtgagtcactgcgcctggccaggaagtagtttcttttgaatatccctgattggcccatacttttcctcccagaggtttgttgttggtgaaatacaacccttgtgtgcactggtcacaagcccttttcattgtactttgaatggaatcctgcagttgactatgagaatgagcgtggaccatagttctcatttatgatttaagtcaaccccatgggaaatttatactcacggaggttgtcacttgtccaagtggctatgttgggatttgaatccctagatctgtctgacttgtgctttttttccactccatcaacttttcccaaccttcctctttccccatcacctgcctctccctgtctattgtgctattcaatgaaacatcatagagaggatagatgtgattcagcatctggcatatacctgctgtagatgctgtagaacagattctctgcaagtgcttgttaatgtaagttctctccgcagaacctcattctcttgagacagcaatgctgagaaagcaaatctgggactggggctgtgata

SEQ ID NO: 703890 - DNA, 1051 bp, Homo sapiens
gctaccactgaaaaagaacaacagatggttaaagacatttaagttaatccaggaaaatagaaacaactccccagcaacttggagccatatggatttcttggttgggtgaactcatctaaatagggttttgcaaagtgtctgtccgtcagttgtatttctgccatagattgggttcaagactcaattatttcagtgtaattggcagcctttagtttttgagattcatggttgattcatgactcatcaatcagagtgggacaagggaggaatctctcctaataatgactgttggtagagctctcacaagacagtgggcttcttggcctcattgctttgctccctcatacataatctttaatcatctttagagccaaatatttcaggtgacatgttcaccaagagttattacagaaaaactatttccactgctagaagyatattcagaaaggaggggggaaaatgtctctaaatcactaacaaaagcagaaagcccttcagagactggattctaacttgtctgacaccacattgcttgcttcttttttttcttttcttggattattattactttttaatgactgggggtttctaccgtaaactagatttactcatttctcctttggggatttaagacttgcaataagaaattattaaaatttttaaatgctaggccgggcgcagtggttgacgcctataatcccagtactttgggaggccgaggcaggcggatcacgaggtcaggagttcgagaccagcctggccaacatggtgaaaccccatctctactaaaaatacaaaaattagaagagtgtggtggcgggcacctgtagtcccagctactcaggagactgaggcaggagaattgtttgaaccggggaggcagaggttgcagtgagctgagatcgtgcctctgcactccagcctggtgatagagcaagactcaatctcaaaaaaaaaaaaatgtaaattttataaaaactcaagaactgtacaggggagtaattgaaagcaaattgggctctgattcaaggtagtcttgaaactctggaaa

SEQ ID NO: 703891 - DNA, 616 bp, Homo sapiens
ctccaacatcttcttttagtagtttcattgtttcaggtcatagatttaagtctttaatccattttgatttgatttttgtatatggcaagagatggggtctaggttcattcttctacatatggctatgcagttttcccagcaccatttattgaagagactgtccttttccctgtgtatgttcttggcacctttgctgaaaactagtccactgtaaatgtttgaatttatttctgggttctctattctgttccactggactatgtgtctgtttttatgccagtaccacgccgttttgtttactacagctctgtagtatcatttgaaaccaggtaatgtgattcctccagttttgctctttttccttaggatagtagagtcatgasttttagatggaattaatctcccttttctccctccaatgggatgcaaatcaagcttccagaataattaatatttttttttggaaaaaataaccaaaggtatgcagaggtaattagcagattttcaaattcacatttcaaactataaacacagatggagagtagatgttggagaagcatctacaattactgcactatgtatattcaggaaacataaaagtaaaataaaagaatgt

SEQ ID NO: 703892 - DNA, 598 bp, Homo sapiens
tgtgtgygtgtgtgtgtgtgtgtgtgtgtgtgtgtgtgtgtgtgtatttggtcaaatgcattaaaaattgctaatggcagtataaactacaactaaatgctaagccccttaattgactgactggacccccctctcaaccaagaggctcaccccagaagagccttaaaagctgtaaaaactgagttcatggccgggcacagtggctcacgcctgtaatcccagcactctgggaggccgaggcgggcagatcacgaggtcaggagatcaagaccatgctggctaacacggtgaaaccccgtctctactaaaaatacaaaaaaattagccgggcgtggtggcaggcgcctgtagtcccagctacttgggaggctgaggcaggagaatggcgtgaacccaggaggcggagctttcagtgagccgagatcacaccactacactccagcctgggtgacaatgcaagactccatctcaaaaaaaaaaaaaaaaactgagttaatggccatgactagatgggaggtcagattcgccgttatatcctctctgttttgcagtttagacacaactgaccagcattgttaaaatggagatcatacggctg

SEQ ID NO: 703893 - DNA, 598 bp, Homo sapiens
tgtgtgtktgtgtgtgtgtgtgtgtgtgtgtgtgtgtgtgtgtgtatttggtcaaatgcattaaaaattgctaatggcagtataaactacaactaaatgctaagccccttaattgactgactggacccccctctcaaccaagaggctcaccccagaagagccttaaaagctgtaaaaactgagttcatggccgggcacagtggctcacgcctgtaatcccagcactctgggaggccgaggcgggcagatcacgaggtcaggagatcaagaccatgctggctaacacggtgaaaccccgtctctactaaaaatacaaaaaaattagccgggcgtggtggcaggcgcctgtagtcccagctacttgggaggctgaggcaggagaatggcgtgaacccaggaggcggagctttcagtgagccgagatcacaccactacactccagcctgggtgacaatgcaagactccatctcaaaaaaaaaaaaaaaaactgagttaatggccatgactagatgggaggtcagattcgccgttatatcctctctgttttgcagtttagacacaactgaccagcattgttaaaatggagatcatacggctg

SEQ ID NO: 703894 - DNA, 598 bp, Homo sapiens
tgtgtgtgtgtrtgtgtgtgtgtgtgtgtgtgtgtgtgtgtgtgtatttggtcaaatgcattaaaaattgctaatggcagtataaactacaactaaatgctaagccccttaattgactgactggacccccctctcaaccaagaggctcaccccagaagagccttaaaagctgtaaaaactgagttcatggccgggcacagtggctcacgcctgtaatcccagcactctgggaggccgaggcgggcagatcacgaggtcaggagatcaagaccatgctggctaacacggtgaaaccccgtctctactaaaaatacaaaaaaattagccgggcgtggtggcaggcgcctgtagtcccagctacttgggaggctgaggcaggagaatggcgtgaacccaggaggcggagctttcagtgagccgagatcacaccactacactccagcctgggtgacaatgcaagactccatctcaaaaaaaaaaaaaaaaactgagttaatggccatgactagatgggaggtcagattcgccgttatatcctctctgttttgcagtttagacacaactgaccagcattgttaaaatggagatcatacggctg

SEQ ID NO: 703895 - DNA, 598 bp, Homo sapiens
tgtgtgtgtgtgtgtgtgtgtgtgtgtgtgtgtgtgtgtgtgtgtatttggtcaaatgcattaaaaattgctaatggcagtataaactacaactaaatgctaagccccttaattgactgactggacccccctctcaaccaagaggctcaccccagaagagccttaaaagctgtaaaaactgagttcatggccgggcacagtggctcacgcctgtaatcccagcactctgggaggccgaggcgggcagatcacgaggtcaggagatcaagaccatgctggctaacacggtgaaaccccgtctctactaaaaatacaaaaaaattagccgggcgtggtggcaggcgcctgtagtcccagctacttgggaggctgaggcaggagaatggcgtgaacycaggaggcggagctttcagtgagccgagatcacaccactacactccagcctgggtgacaatgcaagactccatctcaaaaaaaaaaaaaaaaactgagttaatggccatgactagatgggaggtcagattcgccgttatatcctctctgttttgcagtttagacacaactgaccagcattgttaaaatggagatcatacggctg

SEQ ID NO: 703896 - DNA, 654 bp, Homo sapiens
aataaactatgttctaactgccacaggatatttgtttttctgtagcagctaaacaggcactggctttgagataagcaatgttgaaacaattacagttccaccaaatgctaactgacccccaacttctcttccacaagtgataactgtagctttgattggacaagagattgatatcagtaactttctcctgataagagaccattgaccatgcactggctctgggctggcttacagaagctatgcacttgagtgccttcctatccctgcttcaccttttgacccactgggcccaactgtaatacacttaatattaagcctccaccccaaagtgaacataggtcatatgttacatgcatatttgttcagtatgcatgcatcagaactackttcatgaatattcgtaactcctcctatattagccaccctgtttagcataaagctcccaccccaaccctcctccttcgaagttcgtgtgtctggtcttcgccagagctacacttcccagcctgtgggaatggccacttagcaggctgttaccctcgataagaaataaaatctccttcccagatttataattctgtgatttttcaattaaccgcagttacctttagggaatttgacagctgaaaaggaagactagctttttactttaca

SEQ ID NO: 703897 - DNA, 647 bp, Homo sapiens
aaaaaccctgatcataygcctgttatcctaaaatagcaccttcctccattatgccgaggttcagcgcaaaactgactcatgcagtaccgggatcgctgccagagcgacggagcgcgcgagcagcgcggcatcaacaggcagaaggtgccacggggcggacgggacccactgcccgggtccagactttccatccgagaaagcaaaagctttcagtatccaacttattagaagataacatcttgatagggttctcgggccttcttaaaataaatctgtcagactgtgcttttgaatctgtcctgtgtcaaggttgctcccccagggcagggcagcaatttagcttttgcaagatcctgcacttgctcctcaaacgccaaagcagcaacgcgagcaacttccgagcagctgcttcttccccactcaaagccacatcaccaacttcctcagcagcagccccagcagcaatctgggtgttcaatctatctcgatctcacaatgcccatgcctcctagaggtcttcccagagcttaggagtctttgcccctcctgggaactttctgagggtccatatagtggtccttagcactattgctgttttttttttttttttaattttagttgtaatatacgagtgttagcaatcctca

SEQ ID NO: 703898 - DNA, 1504 bp, Homo sapiens
atctttaaatgaatggctgccttctgcttctaaaaagcagacaatttacagagaaaattcaatttccagggaaaggaaaaatgccctgaaataatttctatgcctattatcaagtaagtttgattctgatgctatcaaaaccaggggcagcatcatagtgtcttttggagaatgttgcactaggaagggggcaggggttctgagccacttagttgcagccctgctgctgggggccaggtgactttagaagtcactgtcccttttttgtattttttttttctgttaaaggatggagttagaaaataaatgtctaccatgagttgacttatgttaaaattttattccctaaaaccccaaatgaagtcattccacatatacatatcctttttctatctgcattttggaagaacctcttctttacaaatatcatgatactgctatgtggttttacatggtttgcatccctcctcggcaatcagaatcactcttctcatctgtgctatcattaccacaggcttcacatttctctatccatctcaacattgtttgtatagctatctattatttccatccctatgagatagtgagtccactgagggcagggttatatttaaacaaaatatgcactcgctaaatgtgcagtgaatagaaatgaatattgtttaattcatttaacaggtggacttaakagtatcttataaaatttgatgaaagttttatttggagagcttggataatacgaaagctaaaagaggttgggtgaatctttattatcagacttgggtagggctctttattactgttttggtgtctttaatactcaagattgttgaaattccagaagggcatgtgggaatcaaacatggtttataacaatcacatggaagtaactatttttcccaatgtcacctaaatgtaagacttcccatttaaaaatgaatatatagtttaaaagtaaaataagagtagcacctcagatttatggcactttggaaatttcttatcatttcctcatgcatcccttcatcctagaggataatgatcatcaatacttgaactccttttggtaccaacattctactgttaggctctgagaagttatgatgttcacttaggtcttctgattctcaaggcatcaagactatatcctgttgcaacttagaaataacatttctagtccctgtgtgtctccttcacattctggatttttgtattttaattaagcttagtaataaatatgttttaaaaatcaaagccaaatttatataactgatttttgttgtaatatgttatttattttgaagaatatgcatatggtacatttttaaagtataaaatggaatgcagtcaaaagtaggtctccctctctgttgtgttctgctacctaatctttctccctcagacgacaactgatgccaatttcttgtgtaccttttcagaaagagtccatgagtttataaacgtgaacgtatgcacattcttattttctagattacacaaattg

SEQ ID NO: 703899 - DNA, 750 bp, Homo sapiens
gtaacagctaattctcccataggactttattccatttagtgagaaatcaaagaaccttaatgagtgaaaggattttcaggttcagctgtagcatgagttttaaatgacatttgagccaattgtcttgggactatcacactggcagaaacaagactctcagacagaaacatcaataagaactgatgcttccacaacctctcattctctcaaacatcgactgaaaacctactgtgtgccatgcactaggcaccacgcacggtgctacacaaggagggagaaaaagtcagtcccaggccaacagagaggccaacgtgtaaacttatatgaaccattctgagggtattctgcccccagaatccatattattwgtcccaatagccacattcagagccacccattgagttttttttttttttttaatttttactcaagctgattctggctccctaaccctacctcacatttgcagcatgatggaaacaactctctagggagcatctgtcataattgtcttcagacgctgccttcctgtcctggctacattttgtttatttactgtcacttcctggccatccttgtcaaaccaataacgtacggtacttaacctataattgactgttttggggcacaaaaaatcagttgaaatgaggtatgaaggcaaaaacgtttctatcaaggcagttacattgacacattaggtggttttaaggaacaacatggtgtaagaacactcccttactccagctcagc

SEQ ID NO: 703900 - DNA, 1423 bp, Homo sapiens
  misc_feature 37: n = A,T,C or G
tgttgccaaatcagagaaaagagtattgcagactaancgaacttttatccatggacatttacagtggctacagggtcacaaacctcctggatgcagttcataatcaatgtgaacgccccactgcacacccccatgcactcagctcaaaatatgcctatttatatttaccctcagtttcttatagctctgcacacacacacacaatatayatatatacacatatcccacctgaaatactttcaataaagtttctgaccaaatacattaaaatagattctccttcatatgaagttctacatttagtactaacctgactttctggttgtggtggtgggaatggcgtatattctttcttaacagtttttttctttggttccttgcgtttattcacatttttgtgtttgaactgtggcaaaaatctctcccaactttgtgatcgtaattcagaatcttttgccaactctctcttaatcattaagctctttagtcatgcaacaaagtaaaaatttttactttccaaagtcacacatttgtcagactcagacattataaatattgcttctataaataataaaagaaacagttcctagtttctttggtgaaattaaaccaattacataagcaaaaaggtaggttatcacaaacatgtataattattagaaaaccattagaaatttaattacaaaatgcagaattgttaaaatgagacaaaaataaaactgaattttcaaccattatttcattaaaacatttaaaatgccacttataaaagcagggagggctcttaattagctgatgttccctgcaagcaggaagttttcagtagcaactgaaatatcacagaaaaagacaaaagtaaactttctcacgattacagaaaaccagtattttcacatttccctattccatttaaatttcagaccatggaacatcagaggatgcaaaccagggatcagacacatagttttgtttttgtctgcaatatcccaatatcccaatgtaactcaaaatcactttcccccaatctaacagtgactttataacttaagttcatcaaatttaagtggattgctcaacaaacccatcataaaatagttctctataccatggttacatttccaagaataatcaaactttgtgcacacagggatataacagatctctctcaaaggagctacaatttgagtgttaaattcataagaaggttttaatgcaacatgagatgttccagattttaatagaaaaaggcagatttctgaaagatcatatccttaaatacatgggttcataatctaagaaaactggattgatatgatctacaacagattctgtgaagcttactttcattgattacaactatataacatattacagtatccccttcagtagttttcacactgtgctccacagagagcttctaaga

SEQ ID NO: 703901 - DNA, 1423 bp, Homo sapiens
  misc_feature 37: n = A,T,C or G
tgttgccaaatcagagaaaagagtattgcagactaancgaacttttatccatggacatttacagtggctacagggtcacaaacctcctggatgcagttcataatcaatgtgaacgccccactgcacacccccatgcactcagctcaaaatatgcctatttatatttaccctcagtttcttatagctctgcacacacacacacaatatacatatatacacatatcccacctgaaatactttcaataaagtttctgaccaaatacattaaaatagattctccttcatatgaagttctacatttagtactaacctgactttctggttgtggtggtgggaatggcgtatattctttcttaacagtttttttctttggttccttgcgtttattcacatttttgtgtttgaactgtggcaaaaatctctcccaactttgtgatcgtaattcagaatcttttgccaactctctcttaatcattaagctctttagtcatgcaacaaagtaaaaatttttactttccaaagtcacacatttgtcagactcagacattataaatattgcttctataaataataaaagaaacagttcctagtttctttggtgaaattaaaccaattacataagcaaaaaggtaggttatcacaaacatgtataattattagaaaaccattagaaatttaattacaaaatgcagaattgttaaaatgagacaaaaataaaactgaattttcaaccattatttcattaaaacatttaaaatgccacttataaaagcagggagggctcttaattagctgatgttccctgcaagcaggaagttttcagtagcaactgaaatatcacagaaaaagacaaaagtaaactttctcacgattacagaaaaccagtattttcacatttccctattccatttaaatttcagaccatggaacatcagaggatgcaaaccagggatcagacacatagttttgtttttgtctgcaatatcccaatatcccaatgtaactcaaaatcactttcccccaatctaacagtgactttataacttaagttcatcaaatttaagtggattgctcaacaaacccatcataaaatagttctmtataccatggttacatttccaagaataatcaaactttgtgcacacagggatataacagatctctctcaaaggagctacaatttgagtgttaaattcataagaaggttttaatgcaacatgagatgttccagattttaatagaaaaaggcagatttctgaaagatcatatccttaaatacatgggttcataatctaagaaaactggattgatatgatctacaacagattctgtgaagcttactttcattgattacaactatataacatattacagtatccccttcagtagttttcacactgtgctccacagagagcttctaaga

SEQ ID NO: 703902 - DNA, 1423 bp, Homo sapiens
  misc_feature 37: n = A,T,C or G
tgttgccaaatcagagaaaagagtattgcagactaancgaacttttatccatggacatttacagtggctacagggtcacaaacctcctggatgcagttcataatcaatgtgaacgccccactgcacacccccatgcactcagctcaaaatatgcctatttatatttaccctcagtttcttatagctctgcacacacacacacaatatacatatatacacatatcccacctgaaatactttcaataaagtttctgaccaaatacattaaaatagattctccttcatatgaagttctacatttagtactaacctgactttctggttgtggtggtgggaatggcgtatattctttcttaacagtttttttctttggttccttgcgtttattcacatttttgtgtttgaactgtggcaaaaatctctcccaactttgtgatcgtaattcagaatcttttgccaactctctcttaatcattaagctctttagtcatgcaacaaagtaaaaatttttactttccaaagtcacacatttgtcagactcagacattataaatattgcttctataaataataaaagaaacagttcctagtttctttggtgaaattaaaccaattacataagcaaaaaggtaggttatcacaaacatgtataattattagaaaaccattagaaatttaattacaaaatgcagaattgttaaaatgagacaaaaataaaactgaattttcaaccattatttcattaaaacatttaaaatgccacttataaaagcagggagggctcttaattagctgatgttccctgcaagcaggaagttttcagtagcaactgaaatatcacagaaaaagacaaaagtaaactttctcacgattacagaaaaccagtattttcacatttccctattccatttaaatttcagaccatggaacatcagaggatgcaaaccagggatcagacacatagttttgtttttgtctgcaatatcccaatatcccaatgtaactcaaaatcactttcccccaatctaacagtgactttataacttaagttcatcaaatttaagtggattgctcaacaaacccatcataaaatagttctctataccatggttacatttccaagaataatcaaactttgtgcacacagggatataacagatctctctcaaaggagctacaatttgagtgttaaattcataaraaggttttaatgcaacatgagatgttccagattttaatagaaaaaggcagatttctgaaagatcatatccttaaatacatgggttcataatctaagaaaactggattgatatgatctacaacagattctgtgaagcttactttcattgattacaactatataacatattacagtatccccttcagtagttttcacactgtgctccacagagagcttctaaga

SEQ ID NO: 703903 - DNA, 929 bp, Homo sapiens
tgagacggagtctcgctctgtcrcccaggctggagtgcagtggcacgatcttggctcactgcaagctctgcctcctgggttcacaccattctcctgcctcagcctcccgagtagctgggactacaggtacccgccaccacgcccagctaattatttgtattttcagtagagacagggtttcactgtgttagccaggatggtctcgatctcatgacctcgtgatctgcccacctcggcctcccaaagtgctgggattacaggcgttagccaccacgcccggccaagccatgagattctgagctgacatttagaagtgtggtggatctccttcctatatctgatagatttagaaactctgaatgaaatcagaattgggtggggaaggagggtgaatgtctcagaaattatccatcccagccacttccctgtccaggtgcagaaacacagtcccagagaggagagggatttgcccaagggcacacagcaaaactgggactttggagagaggagtgtaacaatgtcaagtctttcattccttttttgtctcaaccatgaaagtcttgggggctggggggacctggcctggaggccaggcagccagggggacatgactctggaatgtgttggggaaacaagatgccttctcctccagacctgacaagccaacaggactaggtgtggcaagaaagggctctggttatctgcctcccccctctgtttcgtttggtctgtcaactccagcaacaaagtgccccaaacgtgtgaggcttgataaagatgggaaggtaagagggtgaaggtagtgggacaacagggaccagagcttgagaggtgtcccaggacctctgtctctgctttctccaagagtctgggaagccagcaggatacccctctctccttcacagcctccccctactctgtgattgtgg

SEQ ID NO: 703904 - DNA, 929 bp, Homo sapiens
tgagacggagtctcgctctgtcgcccaggctggagtgcagtggcacgatcttggctcactgcaagctctgcctcctgggttcacaccattctcctgcctcagcctcccgagtagctgggactacaggtrcccgccaccacgcccagctaattatttgtattttcagtagagacagggtttcactgtgttagccaggatggtctcgatctcatgacctcgtgatctgcccacctcggcctcccaaagtgctgggattacaggcgttagccaccacgcccggccaagccatgagattctgagctgacatttagaagtgtggtggatctccttcctatatctgatagatttagaaactctgaatgaaatcagaattgggtggggaaggagggtgaatgtctcagaaattatccatcccagccacttccctgtccaggtgcagaaacacagtcccagagaggagagggatttgcccaagggcacacagcaaaactgggactttggagagaggagtgtaacaatgtcaagtctttcattccttttttgtctcaaccatgaaagtcttgggggctggggggacctggcctggaggccaggcagccagggggacatgactctggaatgtgttggggaaacaagatgccttctcctccagacctgacaagccaacaggactaggtgtggcaagaaagggctctggttatctgcctcccccctctgtttcgtttggtctgtcaactccagcaacaaagtgccccaaacgtgtgaggcttgataaagatgggaaggtaagagggtgaaggtagtgggacaacagggaccagagcttgagaggtgtcccaggacctctgtctctgctttctccaagagtctgggaagccagcaggatacccctctctccttcacagcctccccctactctgtgattgtgg

SEQ ID NO: 703905 - DNA, 579 bp, Homo sapiens
gcaaaggcagtgtgaacttagtgagagctgtagtgcaagtgccctacaggcaacattgaaagtagctgcacatgaagctggggaagaacctgataatattgtggaagactttgtggagggaaaaatggaaataaatgattttctcagtagcttcatggaaaagagaacaatttgccactgtagaagagccaaggaagagaaacttcagcaggcaatagcaatgcatagccaatttcatgctccactatagacatacactgccaaatggaagaaattaaagccgcttcctcaatattaggcaacaaagtttctaagagtgggcagctacaagaatggcgtgtagtgagttatgttataaaaatgtgaaagccattaccactatatcctaagtatttatcattttagcaaggtattccctgttacatacagtatatggcagaaaatgaatatacattccytgtacttaatttgggaactgctcagcaggtaatgctcaaattttatattctaaaagaattacacttgctttattttttacattaacagagtacttttatatcacagttctttagtatattc

SEQ ID NO: 703906 - DNA, 1006 bp, Homo sapiens
tatttgtgtggtttctggtactacagtttaaagaaaatgcttctttacatatgcacacaaacagtatatgcacatatatgtatatggatgtttgcatgttatacaatgctatagttatttcaaaatgaaattaatatacattttctgaacttaatctttttaatatggtttgtaacacttagaaatgtttgtaacatttcagtttgaacgctatattgtcatcagaaataccttctctctatttaaattgtatacaatttatagtgaaaaaacattgtcacatacttaaaatattctaataatatttttctcagaattacatttaaataaaatttaaataaaattaatttaaaattatttactcactcattgttctagccatattacaatgctgcatagccgcaggtgcctagtgactaccatactgacagtgttgttctagacacaccagagattctgtgttctagtagaagttagcaggagagcacctacaaagtaggtggttggcattcaggaaaacttaaccatgacagtgaaccaggaactgataattccagttcattgaagggtcagtgtgattaatcacactttttcttatgtcctgacctctttcttctccaatctttatttcattttctttatttcagaaaaaaatgtagctccttcaatattttcccaactttaaaactctcaatgttctatgacatattgctcaacttattatgattacctatttttcaatgtctatgtgcaacataaacaaaagcagaacactaaaaaattatttgcaaaagaccatgtaccttctattagtttatattcagtagtagaaaataatgcttmtttaataaaataccctaaattaacgcataataagccttaagtttagtgactatgaatttctctcatacatttcctcaaagatgtaatctaaagaacgattacctttcctttcttcaaaaagaaactgtattcaactaaaaattaatacttaaaaagtcataaa

SEQ ID NO: 703907 - DNA, 516 bp, Homo sapiens
taatgattctttggatgttcaggtatcaatgtcaactaaggtattaggtccaacagtccttgaaatctctgggctagtggttctccaagtgtttctagggtctgtaaaacaacaacaacaacaataacaacaacaacaaactatttgcacaataatatgaaggtatttcttgcctaaaggagyagtgtatacctgaaaaatacagctaattttagaatggaataagtgaataatggatgctgagtaagtaaataaaaatatatgctctgatctctgtcctttttgtacatgccgaggaaactttctggaatgatattaacaaaagttattttggggtcatggtatttataaatttttttcttttttctgtgtataatacaattgcaatatttcttcaatttctcatattgcacttacgagaaacagtattttatctctgaagatttgttgggaagaacactgcttttcatatacctgtaagtccaaagagtaataaagccacactatgagagtacc

SEQ ID NO: 703908 - DNA, 646 bp, Homo sapiens
tgctctaaagtttcttctaatttttaatttcgtcttgctaagtgctggccaccttccttggtgtctgccatgcacttaataaaaatgcccccaatccatctgtcaggtcaggcttgccatttacctctcagggatgtggtagaaattaatgagatcactgttccaatgctctctaaagacttgcattttggaagagctaagtcaaaagtcacaaaagatttgaactatgaattgttcatgaaaaataaattttataattcttagtaaatgtgaagaacattagatattcaaaagaatggacccagctgttgaaaaaatgacagtagtcgaggctagaatacccttactgtacagaaaattgcagggctgatgaagaattgaaatcaaaaaatttgaaatgtataaatatctcaaaaacaagttttcactatcacttatgatayctaatgaaaaacaaaaatgagaattgtacaggggtgataatatccagatcaatagtaattttctgtttttgaatatttttataatactacctaagtagtcttagaatattttgaaaatggatattaagatgagaaaattatctataacttacaacacagtttcaccaacattttgtcattttctttgatttttaagctatata

SEQ ID NO: 703909 - DNA, 927 bp, Homo sapiens
ctactatgtgctccctttctctcctgttttaaaaatcggaaaagaccccagtctccagagagacaggaccactgctaggttctgcagagcctgaaaatacagtgctttccttgacttcccgcctaaagaaatatctatttaagaagtactaatggctaaaaatartaagaaataataacaacacagagtatttgctgacatggtggccatcagtgttctcaagcttgtgcaaactcaccccagatgccccacgctaacattcacaggacatgctggggcacatagacgaggctgtacgtggccagtggccttggcatgggggtccagctaccccaggcatctcctttcttcaataaggaattcagtaagtatttgttgaatgaatgaatcatgttcttttccagttaaaagcagactgagagcatcgaatctattggaaacaccagcaagtgccatcaccggacccagaggagaaagtagcagacccctgtgtcatgagtgtcacattctgacctctatagataaaggctccttcatttatagaggtctgaatccaggcttctcccctcttctcctccggcaccaccctaggaactgaagggaccaacaccacacatgtgacctatctgtggcactccaggggtgattcggtttggctctgtgtccccatccaaatctcatctcgaacctgtaatccccacaagtccagggatgggcctggtgggaggtgatcggatcatggaggcagtttcccccatgctgttctcatgatggtgagtgagttctcatgagctctgatggttttatgaagggttcttcccacttcactcaccgctctctctttcctgccgccatgtgaagaaggtgcttacttccccttcaccttccaccatgatggtaagtttcctgaggcctccctgccacaca

SEQ ID NO: 703910 - DNA, 927 bp, Homo sapiens
ctactatgtgctccctttctctcctgttttaaaaatcggaaaagaccccagtctccagagagacaggaccactgctaggttctgcagagcctgaaaatacagtgctttccttgacttcccgcctaaagaaatatctatttaagaagtactaatggctaaaaatagtaagaaataataacaacacagagtatttgctgacatggtggccatcagtgttctcaagcttgtgcaaactcaccccagatgccccacgctaacattcacaggacatgctggggcacatagacraggctgtacgtggccagtggccttggcatgggggtccagctaccccaggcatctcctttcttcaataaggaattcagtaagtatttgttgaatgaatgaatcatgttcttttccagttaaaagcagactgagagcatcgaatctattggaaacaccagcaagtgccatcaccggacccagaggagaaagtagcagacccctgtgtcatgagtgtcacattctgacctctatagataaaggctccttcatttatagaggtctgaatccaggcttctcccctcttctcctccggcaccaccctaggaactgaagggaccaacaccacacatgtgacctatctgtggcactccaggggtgattcggtttggctctgtgtccccatccaaatctcatctcgaacctgtaatccccacaagtccagggatgggcctggtgggaggtgatcggatcatggaggcagtttcccccatgctgttctcatgatggtgagtgagttctcatgagctctgatggttttatgaagggttcttcccacttcactcaccgctctctctttcctgccgccatgtgaagaaggtgcttacttccccttcaccttccaccatgatggtaagtttcctgaggcctccctgccacaca

SEQ ID NO: 703911 - DNA, 743 bp, Homo sapiens
tttcctccctctatgtgtaccctaaagcctgattcagaagacaagttgacaactcttacaagttaatggcaaatatctgcccaataaaatgactgcttgttggtatcactgaagtatttgttggggtagtttcaaactttaagaccatctgacctcatctgacagaagagcttgattatatgagcctgatgcagtgtatactgtactcaatttactatactaatgagttggtgatacaaaatataagtccataaggaatttcattaaatgatgtaaaaaaaaaataaraaaatcagttaaatcaaatgtgtaaacctataattaatgtactacaatttgtaatttagctttgaaatatgcacatcacttgaaaactatcaattcagaaggaaaatggaaaataaggttaaccttaactgaatatgttacaacccagtgagtacactatatgtttatgtagacagcagaatgtggcacttccaagtggggtctgaaatcagattgcttcctttcacaccttacaagatacaagatgttgtgccaattaacattttctacctgtgttaccatctgtaaaatacagacaatatcccctttctcacagaattagttggcacctcaagaaatgtcagccttgcccatgacgggccaagggcaacatagtagcaggactctcccgcaggggctgagaataagggggttatttgcaaagaatttgaaaacaattgtaaaatcaacaaaaa

SEQ ID NO: 703912 - DNA, 1736 bp, Homo sapiens
cttctgggtatgaggcactgaccacctgcaatgagggtcttcaagggaaaagggagagagttacctttctaggttttatgccatgctttggggaagatgagttctagcttctgtaaccagccttggagaaaagaaatactgatttctatgtttcacttccagggagagagagaggtaggagacatgattggagaagatcagaaagacctcacttctgaggtcttccagtctccttcagtttaaaatactcagcatgccaaagtatcatactttggggtagtgggttctgagccctacgttttctaatgtgttctcttgtacaaactgcaaataaacaaacaaattcctgaaagactaagatgaaaaatctgatgtaagagaaaggtatgaaggaaagataaaactaagaaagagatgatgcaaacagaaaaataaagtataatctcagtgtgatcaaacattattaaatgaggaacaatttttaagccagaaagaatattagtctacctattagaaacctatttttgtatgttttaatataaattaaaaacattaatactgtgaatttacaatatctgctttgagtgtttttttttaaattgtttattactgaaragaataaacctcatataacaagaaggaaataggtagggaggtattcagaaaataaataagaggaaaattatttcccctctattgtgccttttttaatcctctcatttatgtgtaaactactcccaagtctttgaggagtaacatcttctcagacacgaaggatgtatatgcccaaaccttgcacctaggcaatcaagggatgaggctccagtaccagcagagaattcctcttcctggacagtacccctaagctagccaacatctgcatgatatatgattatactcttcagccttcttctacttctcaagctccttgttagtgatcttgaactcagtgtctttatatttcaccatcaactaatgcacacttttaacaaaatctgaactcagaacttaatatcttcttaattgatctgccagaaagtagttaaatttagtagataattttctcctctgtctattgaaaaccaaactgtttgacacattttaatgcatttaaggaaaggataaaatacttgcagatactaagggaaactcattactaggcaactatcctagaacagcaaacccatgtattcttgataattattttaaattacctaaactctccaattttaataagatgttattagcatcatccattatttgttcttgtcccttacaatttgttttacattaagaaataggcatattaatattgatatggtttggctgtttctccacccaaatctcatcttgaattgtatgtagctcccataattcccacgtgttgtgggagggaccccatgggagataattgaatcatgggggtggtttcccccatactgttctcctggtagacaataagtctcaccagatctgatggcttgaaaagggatttcctgttttgcttggctgtcattctctcttgcctgccactatgtaagatgtgcctttcaccttctgccatgattgtgaggcctccccagccaagtggaactgtgagtccattaaacctctttttctttataaatttcccagtctcaggtatgtctttatcagcagcgtgaaaatggactaatgcaaatattaaccttatgaacaagcccattttgcaaaacagacctgctgtatgcaatcca

SEQ ID NO: 703913 - DNA, 631 bp, Homo sapiens
aggaaattctattaggaaatatctttggagctagaaaagattcagagggaaagtaaaactgctgacatagtagcaataaccaaaaaatacatagactgtaaagagatttcattaataatattaagaacctaccactgtgtgtagtcatctgagcttgaacaaatcagttaaactttcagggcttcgatttctttgcctgaactgtgagctagctcagaggtcagcaaatgttttctgtaaagtaccaggtaaaaccttgcagaccagcagggtgcagtggctggcactgtaatcccagctactcagcaagctgaggtgacaggcttgcttgagtccaggagttggagcctgcagtgaggtatgattgtcccactccactctagcctgggtaacagaatgagactctgtctctgaaaagaacatttttaaatgaaaaaactttgcaggccatacgttgtttgttgcaacttctcwactctgtcattgtagcatgaaagcagcaattgacaatacatggctgtgttccaacaaaactttattggtggacactgaaatttgaattttgcatagttttcacacattatgaaatactattcttctaatttctttttcaaacacttaaaaatgtaaa

SEQ ID NO: 703914 - DNA, 627 bp, Homo sapiens
taaaaactctaaataaactaggtgttgaaggaacatacctcraaataataaaagccatttatgacaaacccacagccaatatcatactgaaaaggcaaaagctggacgcattccccttgaaaactggcacaaggatgcccgctctcaccactcttattcaacataatattggaagttctggccagggcaatcaggcaagagaaagaaataaagggtattcaaataggaagagaggaagcaaccatcattctttaatggggaaaatttagaagcattcctagtgtgggtttggaaaacagggcctttagctttcattgagtgatcaaatgggttggcaactcaaggactgagagcacatctctgaggataccttgtcaccatagttgaagatgatgatgtgagttgtccttttccctcccctccccttcccttccctgggtcatgagagtcttggcaatcatcaggtccattactgcctttccattcctcattcattagaagataatgtcaatcatcttctgttcaagttttttttaactcctttgtcaagccagtcatttctgctagaaacaacgacagctactttactgctttctgtgtttgtaagacatcttacaaagtagtagg

SEQ ID NO: 703915 - DNA, 895 bp, Homo sapiens
atacataccatgtacatagccacctgtggtaaatcaaggaaattctgaaaaatttgtgaagagtcgagagataatcagactctttgatatcatctttggtttatcctttagtaccagtgaaggtcttcaaagcagctcctatttacctccccaaccttcagatagatggataatggcacagagaactctatatgctggccaaaatagatacagcccctatccctagacccagaatgcttaaattttgggaggactgtatacatcattgagaatctgataaaagctctgctaggaaaaatatacattcacaaatttttgcacayaattttaaatgtctcagaaaattccctaaagccaaactatgttaatattaagtggggaaatgaaggaagatgaatcctggctgaataacttctgctctgatggcaagaaatgaatctctttctaactcacgtggtcacatcaaagaattgcctcttagaacagcagcactaaatccagcaagcttaataacaacaacagcttgaggtgcagctacatctggctgtgcctagaacctgcttctgcagggcctgaaattgtggacaggcctgagattagaagcatgttctatttcatcaattgctatggtttagaataggagtaaccacttggttttcttttttgtgaaaataatgttttaagttaaacagatggtatgttcaatccattctacatgccctgccaggtgggtctttctccatcattgcattgctttagcctgtgttttcttcaagaatattaggcaacccttcactgttcactttctttttctgttgtatatttgccatattctagtgtaagagtgatgctggctttgtagaatgagtcaggaaggagtctctccttgattttt

SEQ ID NO: 703916 - DNA, 1164 bp, Homo sapiens
tgatgaacctatgcaagtccatagtaagaaacgcctaaaacctcttatacctggattaagaaagaaattgaaaagatctaatccattcaatgaaagccaggaaaaaaatcgagagtcctctgatctgcttccatctccaagtgttattactactcaatctgagaatattagcagctcagcaactcaggtatgtgataactactgtattttatagtttgtatgagatgggttggatatgagattcaactagggaaaacatagtaatttgttatttttatttgatgtcagaaattattttagagcaactcccatccttctctccatcgtgttcctccataatggaagaagaaaaggtgttgagtcaggaagttacagttagattagtacagagccattgaactaaccataaatggacacttaatagccattcctttaatctagagacccttctgacttgtggaagcaaaaggaagcagtgctgacacccacaagaatttaaggaactgtaaaactagaatttgttcacatgtttcatttctatgtctcctgaagctgtccaatggcaagtattgggatggaaaactctgtaaacctgtatcaaagactttgtaaaaatattggggtgacttaagatcttgacaaagagaaggctggtgagcatctgttgaacagcatgagcctttggaaggggtacttttgtaaagaacatctttaaactttttaaaaacattttgtattatttgttagaattattttctgagatcaagatatcagtctagcttatcattgccaaagtcgtgggttttgttttttttgtgtgtttgttttgagacagagtctcactcactctgtcacccaggctgtagtgcagtggcgtgatcttggttcactgcaacctccatcccctgggttcaagtgattctcctgtctcagcttctcgattagctgagcttacagatgcatgccacaacacccagctaatttttgtatctttagtagaggcgggatttcgccatgtgggccatgctgktctcaaatgcctggcctcaagccttggcctcccaaagtgttggaattacaggcatgagccactgtgcctggcctgtagtgttcttattatattcagggaaaaaggccctttgtgataaagattgcaattttttt

SEQ ID NO: 703917 - DNA, 3152 bp, Homo sapiens
aatgtttcttttctgacaaatctagcccttgcaaatctatacttagtagagaacagtgtttctccatgttggtcaggctggtctcaaactcccgacctctagtgatccactcacctcagccttccaaagcsctgggattacaggcatgagccaccatgcccggccggcaaatatatacttctaaacaattatactggtttagtataattgttttttatatatttttatactgactaaagatatccttacaataagcctaattgaattgtaaaaaaaaaaaaaaaaaaaatacaggaattgattagatatgagaaagacactttgcctttccaaaacaattttatcttttttttttttccttaaatttttttcttaatagagatggggtattgccatgttgcccaggctggtctcaaacttctgggctcaagctacctgcccaccttggcttcacaaagtgctgggattacaggcatgagccacggcgctagcctcctaaacaattttaaacatgaaagtggtttggaggcgatttagaatttgggtcaaaactagtgagtttcaaacacttatatctgcaatgtaacttataaggcagaaaaggcagacttttccctactcccgccttttttttttcttttatagatgatcttcttggttctaaaaatttgttcagaaagcctgatggttgtttaaatgcttagcaccatgacacacgtgtaataaaaattgcataaatggaccaggcacggtggctcatgcctgtaatcccagcactttggaaggccaaggaggctggatcctctgaggtcaggagttcgagatcattctggccaacatgatgaaaccctgtctctactaaaaaaatacaaaaaattagctgagcatagtggcggacacctgtaatcccagctactcgtgaggctgaggcgggagaattgcttgaacccggaaggtggaggttacagtgagccgagatttcaccatcgcactccagcctgggcaacaagagcaaagctccatctcaaaaaaaaaaaaaaaaattgcataaatatgttaaatcacctggcaaatgattttcttcccctggtgtctatgtgttccatactattgtaggctctttaactggtaaaacagctaccccaattcagagatccagtacttaatgcatcacatttccagagttatgagaaaacagctaaacctgtgagttagactcactttgtttccccacggaggaaataaaaacccacgatttgaaacctttggaaaacataggaaatgcaacatttggaagtataacatagaaacaagagataatcatacaatgcttccaaatgaagtctcacgttggatttgctggtttttaagacagattcccctcttctggacagctgtgatggccaagatagaagttcatttgctatgtttccagggactattctctttgatgtatacaggatttatggggtctaaaaagaacatacaattataaagtgttcatatttgagagaaaactgcaatgatcagaaggattgagccagttttagcataaaaaattaggactacattaatgatgaggttgactatacacagtttggagtgagagagttactctacccagtatcactgacatgttggaatgccagatgaaactgaaacagaaaaattgtcttggggtctaaaagacgtctgatgtgctgatgtctgttcagtcttctgcactcatgggcgtaaactctcaaagagcaccactgggtcttagtccgtggcataaagactattctcaatgtagatattgtcttctgcttggacttccttttcaactgcattttgcaaagctttaatttgaaggctgctaaatgaaacactgtagaaagagttgttgaagaataacatgagtaagaaaaaaagcagaccacttctcacatataagctgcacttttgtttatgatcaggcaatatcaggtattcgagactccaggagccccgttcacacaaagtataaaataaatagtgccttccagagttgtaaaaggtgtggctcttattattaagttgaagaaaagtctgtttaataagcatgtagacaatctaagaagtattcaaaaactcagactggtctctttgaaactcgcataatagaatacaaaaatggaaaatctaaaaatacagagctctgacatcaaactaagtggctgaatcaagatgcatattttcaaatgtggctaagcattggatgactggtgcttttccaactgtagcttgtgatcctttagagagggttgttaaatctacttagccatctacatcctatattcaagataaaaacagaacagagaaacattgaatatagttaaatagtactgtttcacaagtatacactggatcatagtgttaaaaatcttcctgtgctggatgcagtagctcatgcctctaatcccagcattttgggaggccatggcaggaggatcccttgaggccagcgtgagcaacatagcgagaccccgtctctacagattttttttttaattagccaggtgtggtggcttgtgcccataatcctggctacttgggaggctgagacagaagaatcacttgaacccaggaggtagaggttgcagtgagccgagatcacaccactgcactccagcctgggctggagactctgtctcaaaaaaagaaatcagtagaaacagtggaaatacaagtgagggaagaaagtagacttagttttaacttacgtgtagcattttgatgtaactggttatttttatatatttgtatatagtgactatttgttaccaaagcctgcccccaaaatatggaacttgtcttcattcagctgcagatgaaacacatgtccacacatttaaagaactgtgaaaaacaaagctccactatggtccctaaacaggtcagtcatacatgtgtgaagacacttagtttaagtgtcaatgagctcaaatgactcagtgtgatataactgccgagaagataatgtcatgaagaagtgttcataatttgttagtgtgggtttttttttttttggctttttttatactttacacatttctcttccattccagaaatatttatgagcacagattcgtgagattgagtcctttatatgctatgtgatgtgaccttac

SEQ ID NO: 703918 - DNA, 631 bp, Homo sapiens
tttttaaaactgagttactatataaaatttattatatattatttatatatgacactaccttatacatttgtgtttatatatcacaagttttatatggaggatgacaagagggtacaaaaagtgctaaattctcattttcagtaaaaataaatcaaaagaatgaactatagaagctttattcttttttcttttctttttttttttaaacaacagagtaaagtaaaactaggtagccagaagaattgaagtagctgcctctggggattgtgactaggagggctggaaaaactatgagagacaacagrggagaaaaagaaaaatctgggaagaaattaataaatccctcacaaacattgttccttgttttttcaattccataagattaaaattccctaggttggccacagataacaaggctcaccagtccagggttcataacagattgtggacaaaattctatgaaccatcatcagacctcatcctaaatgcctgactctaatttggaccagagacaaggttaacctccagaaaacaagagtctgtcaactttctttagcagacccttatgtctttttacaagagatttttaaaaaagaaaataatcctgtcatatttcctcacctgtacaccc

SEQ ID NO: 703919 - DNA, 642 bp, Homo sapiens
ccttcatggccttccagcaattttttgtattaaatttgcaacagagaaagagcccttacattgtagccttgaaaataataatagtaatacatttaaaaataaagcccagctcatctattagatggaatcggggtttgtccatatacctaatatagtgtttggcaacacttttttttttctctgtcattttttaagaagaaaaaaaataggccgggtgtggtggctcatgcctgtaatcctagaacttcgggaggctgaggagggtggatcatttgagggcaggagttcaagaccagcctggccaacatggtgataccccatctatacaaaaatacaaaaattacctgggcatggtggtgcacacctgtaatcccaggtacttgggaggctgaggcagaagaatcgcttgaatctgggagactraggttgcggtgagccgagatcacgcaccacactctagcctgggcaacaggccaagactccaactcaaaaataaataaacaaacaacaaataaataaataaaacaccaatgtctcactccagcagatgctcctgggatgaacagggataggtgaagtacatcccagccctggagtttcaggagagaggacccctttgcctggtgccagcagacagacttg

SEQ ID NO: 703920 - DNA, 642 bp, Homo sapiens
ccttcatggccttccagcaattttttgtattaaatttgcaacagagaaagagcccttacattgtagccttgaaaataataatagtaatacatttaaaaataaagcccagctcatctattagatggaatcggggtttgtccatatacctaatatagtgtttggcaacacttttttttttctctgtcattttttaagaagaaaaaaaataggccgggtgtggtggctcatgcctgtaatcctagaacttcgggaggctgaggagggtggatcatttgagggcaggagttcaagaccagcctggccaacatggtgataccccatctatacaaaaatacaaaaattacctgggcatggtggtgcacacctgtaatcccaggtacttgggaggctgaggcagaagaatcgcttgaatctgggagactaaggttgcggtgagccgagatcacgcaccacactctagcctgggcaacaggccaagactccaactcaaaaataaayaaacaaacaacaaataaataaataaaacaccaatgtctcactccagcagatgctcctgggatgaacagggataggtgaagtacatcccagccctggagtttcaggagagaggacccctttgcctggtgccagcagacagacttg

SEQ ID NO: 703921 - DNA, 638 bp, Homo sapiens
cagtttctgaatctaaaatcagatcggttgagaacagatacttccaaagcctctgctagctctaaaatcctgtgagttttataatctgcctttcacaaaagttctcccatgaagttttagaaacataaaaatcttttttgatatccacaaactacaagcactatgaggcattttattatgattcaaaacactgctccaatgatgaaggcttctccaacccttccaggtagcatgtatcccaagactttgaggtgcttcatacacaccttttcttccttaaatctcttctaacagctaatgacataattacgtttttctgtttctccaactagaaggtgaatatgaggacagtaatggattcktatttttgtatccccagcacctcgcattgtctatggcaaatattaatagtaggcactccatgaatgtttagtgaatgaatgaatacaaagtgaaataggatcattatttatactgaaagctgagaccatctctcccttcatggatgaatggtgggcagaaggtagagccttcctgctaataatgactcatctgatggaataaaagaaactaaagcttaatgggaacctactaagaaccaagcactcctacacacattcacataatttatgcaatcc

SEQ ID NO: 703922 - DNA, 627 bp, Homo sapiens
tgccttttaagtttgtgmtacttggtagctacaaaaagctgctgacagtagttttatcaatggtaataatgagtaaaaaaaacttatggttttgaacagtctgtaaatcttcttgagccaaagggactcttattatgcatggattacagtcagctagaaaccttgaaggctatggaagtctgttattcaaatacacagtgacatgcacattcttaagcaagtcatgaggtccaggacataccattccaactaatctctaagaagaaatatttgaaataaggcaagatctttcccttcgggtgcttcgctcaccatttactcaatacctccaagattctttataaactctaaaagttcccaatgactcaattctccttcatttctctaaagtgggccttctcactctttcacctctggtggtggcattgtttctgtcctcctgggctcatggtaaatatttacattgataattgaccacagtgcttttttctactgaacctcatcacagcctcagaatctttctcaaacttatactacaagattacactagcatttgatcataatcagcatggcaactgaaatgaaaatccatcttttgccttaaatgaactaacgttgagaacatca

SEQ ID NO: 703923 - DNA, 627 bp, Homo sapiens
tgccttttaagtttgtgatacttggtagctacaaaaagctgctgacagtagttttatcaatggtaataatgagtaaaaaaaacttatggttttgaacagtctgtaaatcttcttgagccaaagggactcttattatgcatggattacagtcagctagaaaccttgaaggctatggaagtctgttattcaaatacacagtgacatgcacattcttaagcaagtcatgaggtccaggacataccattccaactaatctctaagaaraaatatttgaaataaggcaagatctttcccttcgggtgcttcgctcaccatttactcaatacctccaagattctttataaactctaaaagttcccaatgactcaattctccttcatttctctaaagtgggccttctcactctttcacctctggtggtggcattgtttctgtcctcctgggctcatggtaaatatttacattgataattgaccacagtgcttttttctactgaacctcatcacagcctcagaatctttctcaaacttatactacaagattacactagcatttgatcataatcagcatggcaactgaaatgaaaatccatcttttgccttaaatgaactaacgttgagaacatca

SEQ ID NO: 703924 - DNA, 627 bp, Homo sapiens
tgccttttaagtttgtgatacttggtagctacaaaaagctgctgacagtagttttatcaatggtaataatgagtaaaaaaaacttatggttttgaacagtctgtaaatcttcttgagccaaagggactcttattatgcatggattacagtcagctagaaaccttgaaggctatggaagtctgttattcaaatacacagtgacatgcacattcttaagcaagtcatgaggtccaggacataccattccaactaatctctaagaagaaatatttgaaataaggcaagatctttcccttcgggtgcttcgctcaccatttactcaatacctccaagattctttataaactctaaaagttcccaatgactcaattctccttcatttctctaaagtgggccttctcactctttcacctctggtggtggcattgtttctgtcctcctgggctcatggtaaatatttacattgataattgaccacagtgcttttttctactgaacctcatcacrgcctcagaatctttctcaaacttatactacaagattacactagcatttgatcataatcagcatggcaactgaaatgaaaatccatcttttgccttaaatgaactaacgttgagaacatca

SEQ ID NO: 703925 - DNA, 1614 bp, Homo sapiens
tattttaccatgtgagttggattctattttccaaggaaattcattgatccagtccttctctgagccctgggaggtagctaaactcactccggaaggatgaagacacctacttttgcatccttaacctttctttcttgtccaagaaaatcttagtacctgtgctgtttattttctgtatacccctctataaactgacttcagtaatataagaaaatgtgcttggactctaaatactgcactgtagttctgttcctcaaacttcattttactcacactcactgaaaccgtgtcacctctatgtagttatattggtgcccagatcaccaagccacwagttttgcctcaaagctgatcttatgcacaagatggttgggcaatggttgtctaaaggagttggaaaggacatttttggatgtagagatagggcttgtgttgagagtgtcattagaagggaaggtgacaggctgcccaagctgagaaaactgcaatgaaatgtttttctaccccacactgacatttgaaaatttgttgaagtgagatttcagagagaatagaatgttattgctggagagagtagaattcatgtagtccaacggcttcactttatagataagaaaactgagggtcagaaatattaagtgactttcctaaagttaagaaactgcttactacagaaccatgactaaaactccaactccaaatctgtactgagctctttgtgttcactatactgtttaatatgatcttattgtgatcctacactcctggtttataagagtaaacaaaaaaatgtgccaagtttatagcaaaaataatttatattaactaaagaaataaagaattaggaattgatcttatttcatttaaagattgaatgtcagaactaccatggaatgagataaaatctcggtctcatggtcttgctatattgtaagatggcttctgggggactgagttttcagtgatgcaaataagaaaggcaggaagaaaagaaaagatggagggaaaagctagtttatttaaaattaaactttctaagaaatcaaaaaatgtgcatatctaatagtctatattatgttgtctgccaagtagacattgtcactcattcatgatggggcatgctcggtttctttttgagttcagaaagctcctggttcattgaaaatagcttcaaattcaaaataattttcagtcatcctctcacatttaaagaagtgtatacactcagccataagtcttcttttcatttatttaaggtatcttgtccaattgtgaaatatttatacctactttccattataacatacattccaccaaagtctaagaagtattatgcaatgataacattcataggtttgcagtcagacagcccagacacaggttctccctgtgacacttctactaattatgtaactctgggaaaatacaaagcctctctgagcctccgttgcctgtcccagtagtcaaataaagatgagtacctaccttttaaaaatgttgatttaagatttttttaaactgtacaggtcgtaatataatgtctggagtatagtatgtgtacaatataggatagctattactagtaggaataattatttataaccacagtctacc

SEQ ID NO: 703926 - DNA, 1229 bp, Homo sapiens
atgaatgaactggagtcttatgtattaatatttaaaaatcttcacaacataatactgattgaagagaacagagaatggcatttaagtgtgataccatttatgtgaagtctgaagatatgcaagaaaatacattatttacagctatctcttatatacgtgataaacaaaatttagaatatctcttacctttggaaagagagggatcagggaagggtacccagaccttcaaataacattttatttcctttaaaaaaggggcagggtcaaaatgggctaaatggagacaaaccctgcctaaaccactgtttggcagcatcaaaagtattcaccaatttctcattatgtatactttcttccacttatgtaacaaacaaatctttttttttttttttttttttttgacagagttttgttcttgtggcccaggctggagtgcaatggcgcaatctcagctcactgcaacctccacttcccaggttcaagcaattctcctgccttagcttcctaagtacctgggattataggtttgcaccaccatgcctggctaatttttggatatttagtagagacggggtttcaccatgttggccaggctggcctcgacctctttacctcaagtgatctgcctgcctcggcctcccaaagtgctgggattacaagcatgagccactgcgcccacccacaaatcattttaaatacctactctgtgccaggtacagtactagggatataaagaaggagaacatgttggtgagagattcacagacagcactgggggcataaggcacaggtgtttggtctggcctgggacaatgggcagggaggagcttacagaagccttcctagtgaagcagcccccatggtggagcgtccagtaatgagaaatgagttagggaggcaaagggggaagaagtgagcctagaaacttacagaaaagggcaagaaaacagaaatcccagcattagcagacacccagagatggaagtggcctgattactgggcagaaaccacagccagttttgtgttgctgtgacttgaaatgtgaattgagagatagggctggaaatggaygtaagaggggaggataatgagggatgaagctgtaggttggcgaggagcacatcgcataggacctagtgggacatataaagatttttttacctttagtcagtaggcactgggaggaaagtgacatatctcatcagggatgttacctgtacctgataaaa

SEQ ID NO: 703927 - DNA, 1229 bp, Homo sapiens
atgaatgaactggagtcttatgtattaatatttaaaaatcttcacaacataatactgattgaagagaacagagaatggcatttaagtgtgataccatttatgtgaagtctgaagatatgcaagaaaatacattatttacagctatctcttatatacgtgataaacaaaatttagaatatctcttacctttggaaagagagggatcagggaagggtacccagaccttcaaataacattttatttcctttaaaaaaggggcagggtcaaaatgggctaaatggagacaaaccctgcctaaaccactgtttggcagcatcaaaagtattcaccaatttctcattatgtatactttcttccacttatgtaacaaacaaatctttttttttttttttttttttttgacagagttttgttcttgtggcccaggctggagtgcaatggcgcaatctcagctcactgcaacctccacttcccaggttcaagcaattctcctgccttagcttcctaagtacctgggattataggtttgcaccaccatgcctggctaatttttggatatttagtagagacggggtttcaccatgttggccaggctggcctcgacctctttacctcaagtgatctgcctgcctcggcctcccaaagtgctgggattacaagcatgagccactgcgcccacccacaaatcattttaaatacctactctgtgccaggtacagtactagggatataaagaaggagaacatgttggtgagagattcacagacagcactgggggcataaggcacaggtgtttggtctggcctgggacaatgggcagggaggagcttacagaagccttcctagtgaagcagcccccatggtggagcgtccagtaatgagaaatgagttagggaggcaaagggggaagaagtgagcctagaaacttacagaaaagggcaagaaaacagaaatcccagcattagcagacacccagagatggaagtggcctgattactgggcagaaaccacagccagttttgtgttgctgtgacttgaaatgtgaattgagagatagggctggaaatggatgtaagaggggaggataatgagggatgaagctgtaggttggcgaggagcacatcrcataggacctagtgggacatataaagatttttttacctttagtcagtaggcactgggaggaaagtgacatatctcatcagggatgttacctgtacctgataaaa

SEQ ID NO: 703928 - DNA, 655 bp, Homo sapiens
ttgtttcctgaaacaggcagacacctaagttgtcagcccagagtagtgagtgaataaatagcgggatctaccttgcactaatggatgttgcccctaatccattgctgatggcaaagtcgaggtgaattcagggcagcacttcttgacacttgagatttattttgtcattagtgatgaagcatcacacgagggctcctcgatcccaaactgtcagaagcactcttcggcattttaggaaaggtcacccagatattcaggtgctgacctacagtactgaagctgttacttagtagctgattctttttattatgactattaatgatttatgtctagaatgagcagtcagccatccgcttctcagagaaaaacatggtcactttgagagtaagaaraaagtaggaattttaatcaattattatattgtgactcaaaaacaagcaaaaaacaatgctgaatccattttgttttctgctctgaaacctaagataaggcacgttaaaaaccattgtatcctagaatccctaaatggcccctaagcacactgcattctgttcattcattcttatccacgaatcctcattcaattaatcatatatgcaacatgctccttttgcctttcatccaaatcgtgtaccttgaacttcaactccacatt

SEQ ID NO: 703929 - DNA, 619 bp, Homo sapiens
acttaaaattaaacaaattacattaaaaacaaaggtaacaaatcctcagaatgtatcgcctcctgattattttcctacatataccattatgygcgcacttaagattatttacacctattgtatctgtatggtggaaatactatagaatgataggattgcacttctcccaactccacatttggagacatcacactggtagcttgaaattaaccatggtggaagtaattacaccaaggaaatctgcaaacgctacaaatctggagagatcgttgttaaatacttaccagcacaggtctggctatatccctttgcttattgcgaacaaaaatgacctttgggcaactagagctctgaggagtggtttcatgcattaggtattttggggctttctacacagagaggcagttgagggtgatggaggggtgcagatgctggagccttctgcctgggtgccaagctaggctcttcccttgactagctatgtgatgtcaggtgggtgactcactctcactgtgcttcaggttcttctgtaaacagaagtgctcccagctagggttcctgggaggatgaaatgagaaatgttttgtaaagcactagaacagtgcctggctcatattaa

SEQ ID NO: 703930 - DNA, 647 bp, Homo sapiens
gcagcattgaaagaaatattagcaattaagccattttgattttctttaaaactgaaagtagaggccggcaaggtggctcacgcctgtaatcccagcactttgggagaacgaggtggatggatcacaaggtcaggagatcgagaccatcctggctaacatgatgaaaccccgtctctactaaaaatacaaaaaattagccgagcacggtggcgggcgtctgtagtcccagctactcgggaggctgaggaaggagaatggcgtgaacccgggaggcagagcttgcagtgagccgagatcacgccactgcactccagcctgagcgacagagcgagactctgtctcaaaaaaaaaaacaacaaaaaacggaaagtacagaagtgtatatatttaataatcaattatattaatcaatatattatatattaatatatacaaatatattaatctatatatwtatgattcttaatgctgtatttcttatagtctgggtatcccagtgaatgaaatattttcagcagtgttttgggaagtacagagatcttcccttatatgttccaggacccactagtgatacctagaatcgcagatagtaccgtcccctatatatactgttttttcaatatatacatacccatggtaaagttcaa

SEQ ID NO: 703931 - DNA, 596 bp, Homo sapiens
ccctgcacaagttctctttttgcctgccaccatccatgtaagacatgacttgctcatccttgcctttcaccttcccccatgattgtgaggcctccctagccatgtggaactataagtccaataaacctctttcttttgtaaattgcccagtctcgggtttatctttatcagcagcatgaaaatggactaatacatatgcagtgtgccatttccagattctactgccatgttgagttcaaacagcatagtgtgactttcaatgacatttgtcatctggtccctccttataaattcaaatgtatctccccagatttctcaagcaaatgcttcaccccaaattgtccatgctcactttctgctccacacttttgccttcttcaaatttgagccctttagctacctaaaaaaccaggcactgagccacaaggcaacacccaaggtgtgaatcccagagggctgtgacatttaaaaacataacaragggtatttgtccccagccatggaattccagagacgatgcatttcatccccagacttggggatgaaacacaaactagaattcaataccaactgccccttactcatgatgtgactca

SEQ ID NO: 703932 - DNA, 1299 bp, Homo sapiens
ttctcacactgctataatgacctacctgagactgggtaatttatgaagaaaagaggtttaattaactcacagttccacaggcttaacaggaagcatggctgggaggcctcgggaaactcataatcatggcagacggcaaagcggaagcaagcgggttttaccacaacggagcaggagagagtgaagggggaagtgccacccggtgacaccatcgcatctcctgagcgctcactcaccaccaccagaacagcaagggrgaaacccgcccccatgagtcaatcccctgccgcccgcccctctcccaacactggggaccacaatctgaggtaagatttgggtggggacacagagccaaacaatatcaatatgcttaaggaaagtagtttttattattgattcctttataaagttgaaggtgcaggagtctccatgtttttgaatcatatttataacatctgaaagacctgggcaacaatattttaagaattgctgtttattttcaaattctatccaaaatatgtgcatatgatcccagcataggcatagtgtgtattcattagaaagtgagcatttaattgtagaaataatgtccaaccggtcgtgggtgttcactattcaacttaccttgtggaatgtctaacataagcaacgaactaggaactgcctgaaatgctagagatgtctggtctgaagtgactcacacttatttttgtttgtaagcagatctgtgttaaacaaataaaatcacacttgtcggctgggcatggtggctcacgcctgtaatcccagcactttgggaggccgaggcgggcagatcacctgagttcgggagtttgagaccagcctgaccaacatggagaaaccccgtttctactaaaaatacaaaattagctgggcatggtggcacatgcctgctactagggaggctgaggcagcagaatcgcttgaacccgggaggcagaggtttcggtgagctgagatcacaccattgcactccggcctgggcaacaagagtgaaactctgtctaaaaaaaaaaaaaaaaatcacatttgtcctggtgggaacacaggagtggaagacaggaagggagaagaaacacaggcagagagctcagagctccgagtccagcgcccagccaggctggcagcccacagggagctctgcagccaggccagcaaaggaagattcagaatcaggatttctaaggcaggttttgtgacccagggatgagcagcttgctttccgggaacaagcacagcagcgtcctacagccttggcggctgggtattcagactcga

SEQ ID NO: 703933 - DNA, 1299 bp, Homo sapiens
ttctcacactgctataatgacctacctgagactgggtaatttatgaagaaaagaggtttaattaactcacagttccacaggcttaacaggaagcatggctgggaggcctcgggaaactcataatcatggcagacggcaaagcggaagcaagcgggttttaccacaacggagcaggagagagtgaagggggaagtgccacccggtgacaccatcgcatctcctgagcgctcactcaccaccaccagaacagcaagggggaaacccgcccccatgagtcaatcccctgccgcccgcccctcycccaacactggggaccacaatctgaggtaagatttgggtggggacacagagccaaacaatatcaatatgcttaaggaaagtagtttttattattgattcctttataaagttgaaggtgcaggagtctccatgtttttgaatcatatttataacatctgaaagacctgggcaacaatattttaagaattgctgtttattttcaaattctatccaaaatatgtgcatatgatcccagcataggcatagtgtgtattcattagaaagtgagcatttaattgtagaaataatgtccaaccggtcgtgggtgttcactattcaacttaccttgtggaatgtctaacataagcaacgaactaggaactgcctgaaatgctagagatgtctggtctgaagtgactcacacttatttttgtttgtaagcagatctgtgttaaacaaataaaatcacacttgtcggctgggcatggtggctcacgcctgtaatcccagcactttgggaggccgaggcgggcagatcacctgagttcgggagtttgagaccagcctgaccaacatggagaaaccccgtttctactaaaaatacaaaattagctgggcatggtggcacatgcctgctactagggaggctgaggcagcagaatcgcttgaacccgggaggcagaggtttcggtgagctgagatcacaccattgcactccggcctgggcaacaagagtgaaactctgtctaaaaaaaaaaaaaaaaatcacatttgtcctggtgggaacacaggagtggaagacaggaagggagaagaaacacaggcagagagctcagagctccgagtccagcgcccagccaggctggcagcccacagggagctctgcagccaggccagcaaaggaagattcagaatcaggatttctaaggcaggttttgtgacccagggatgagcagcttgctttccgggaacaagcacagcagcgtcctacagccttggcggctgggtattcagactcga

SEQ ID NO: 703934 - DNA, 625 bp, Homo sapiens
ttcaagctcagataaaggcaccgatataagcaaagcttttttatgcctccttgactaggtacccagtactaagttcccagaactgcagtcccatgaacagtagcattcagaggcattgaggagcagagggaaagtgacttgtcactgatcccccattgaaagggctggcatcctggtcaggctgacaggctctcaacccttcttcctctctgtggaacatttctctggcatttttctcagaaatctcatgaatgccctggaatagagaatagagtttattttgaacatggaacatggccaggttttttttttttcctttgaaatgagattcttagctatgaacctatttcttttttaactaccttctgacctagttcataatattaccaccagaagcagaactaacaaagaacatgattcttgcttcaagagattgaacaagtaataggacatagagttttaaaaraaaatcaccattcattctgagatgagataacttgcctcaatttgaacttctctttataaccgttagggatgtaggaaagggaagagacttatatttttctagagaaaaagtgtttacaaattcttgaatatttcccattttaggttcctttataaaaaa

SEQ ID NO: 703935 - DNA, 625 bp, Homo sapiens
ttcaagctcagataaaggcaccgatataagcaaagcttttttatgcctccttgactaggtacccagtactaagttcccagaactgcagtcccatgaacagtagcattcagaggcattgaggagcagagggaaagtgacttgtcactgatcccccattgaaagggctggcatcctggtcaggctgacaggctctcaacccttcttcctctctgtggaacatttctctggcatttttctcagaaatctcatgaatgccctggaatagagaatagagtttattttgaacatggaacatggccaggttttttttttttcctttgaaatgagattcttagctatgaacctatttcttttttaactaccttctgacctagttcataatattaccaccagaagcagaactaacaaagaacatgattcttgcttcaagagattgaacaagtaataggacatagagttttaaaaaaaaatcaccattcattctgagatgagataacttgcctcaatttgaacttctctttrtaaccgttagggatgtaggaaagggaagagacttatatttttctagagaaaaagtgtttacaaattcttgaatatttcccattttaggttcctttataaaaaa

SEQ ID NO: 703936 - DNA, 592 bp, Homo sapiens
tttgagatggcacatccytcactccttcagctcaaaatccagagtctctttatttgcatcaggtctggatctgagtgaggattctcatgtgggcttctcttgatttggaaacatgcaagccaaaaatttgtcttttctttaggccagagccatttaaattcttcccttctacttatatttttattttattttattttatttttggagacagagactcgctgtgttgcccaggttggagtgtagtggtgcgacctcggctctctgcaacctccacctcctgggttcaagcaattctcctgtctcagcctcccgagtagctgggattacaggttcacaccaccatgctcagctaagttttcatatttttagtagagaggaggtttcaccatgctggccaggctggtctcgaattcctgacctcaagtgatccacccgccttggcctcccaaagtgttgggattataggtgtgagccactgtgcctggcccccttctacttattttgaaatggagaatagattattgtaaactgtagtttacttctatagttactatagaagtacttcaaaaacttgtaatctgcctgaagaatt

SEQ ID NO: 703937 - DNA, 622 bp, Homo sapiens
ccttggtgtagtacgttaagactgtcacttgccaagtgactcattcattacccaatactgtcacgcactagtcataagacaattggaagggacagatgaaaagaacagccatctactttaattgctatgttttggaaataatgtataatattaaaaccacaactccaaatcataaagcctaaggtttggaagagaccgaaaatcactcagcctaaccacccaagtgatgcttgtgtgtatttgcaatattctgtatggaaggttcagcctcagttaagtatggtgatactcttatcaactcaagaagcagtttatcttttagatggctcggattctttggaggatctttctaactttagtcaaaattaatatactcacagtttccatctattatgtattttcwtttattaatttactcttgaagtcttatggaataaatgttatgcatctttccattaaaagccctccagatatttgctgactgctagcatgtttcttctggagtcctctctggatattccagtcgagctaaatattactcatcttctccaatgtggatggtctgttctgaatgagctatgatttcttaatatccttttaatgctggtcccaaattgaaccc

SEQ ID NO: 703938 - DNA, 1067 bp, Homo sapiens
ggcacatattgtgtgccagcctctctgctgctcagggcagaggacacagcagtggccttttaagcgtgtctggcttgtcctctcctttgcctcgtgctgccactgccaggagttcccatctgccctagcagtttcgtgcgtctagtctctcctcactaggacatcttccacctttagccaattcgaagcatcagtctccatcataactccttcagcagactcccattgctctcagagtagaagccaaactcttgagctgaccaaaccgttggctctttatcttcatgttccccaacccccaaacttggagcatcttgctgcacttcagtctctttcacaccgtttttttttttttttttttaagagacagggtcttgctctgtcacccaggctggagtgcagtagcgtgatcatggctcactgtaacctcgaaatcctgggctcaggcagtcctcctgccctcagccttcagagtagctgggaccataggtgtgcacccccatgcctggttgatttttttttttttttaaagagatggggttttgctgtgttgcccaggctagtctcaaactccaggcctcaagcaatcctcctgccttggactcctaatgttttgggattacagctatgagccactgtacccagccccttttacctcctytcactctttttttttaaactgctaatggaagctttaatcaccacatggaaaaacaatacattcatatatcaaaattggccccaaattccttatcatcatcatcaacagtctagaaatgaaatgacacataatataaaactttcctgtttataactaaaagatttatgaaactgttttttataaatgccttttttttttttttttttttttaccctgaggatgatatcaccaaagtgaaaaaagaaaagtcggtcattatcagctggaatgtattcagcatagagttttaaaaaccatttgtcattattctggagtgatttccattcattctccccacccacactatgtgatgataacaggaaaagatggcaaatggttgtgccagtcttattatatactggtcata

SEQ ID NO: 703939 - DNA, 1517 bp, Homo sapiens
cagctctcctacctcagtctcccaagtgctgggatttcaggcctgagccacgcttggctctcagttttgggaagcaagtggcattggcatccatggcctctgccaggtgaccgctccctgccatctggtgccagagccccttccctggacatgactgcagaccagagctgggacgcagctgcaggccatggctcacctcttcccccaggccactgcccgccatcctcagaggccttttctgcctgtgttgcttcttgccaggcttttgtgtctgccagtgtctgggctctaaaggatgcactcatccgtccaccgcccacagctccagaaaatgaagagggtccccgggagccagcgattctgtgtgtaggattcacccaccatcctcagtggctctgtgggactcaggtggctggagacacatggatggggtmttgaggggcagacgcacacccgagtctgcatggactctttgcctcgcggacagccaggtcccacttgctttggagaggaggatgtgcagcccaggggattctgcctctgtgcccaggtgaggcacaggtcagcaccagcacctgccatgctaactcagctcctgcacaggcctcccacacctgtgcagaggaaacacagccgtaggagcacatctgtccccatacctgagcacaggtgcacactccactgcgggcaggtacagggtgatgggttgaggggagacatactcagtcatgagttattgcctcccgttagaccgcactaccagcagggccatccctggagcctggggtgtgcgccatgttccccagctgcccctcggtcacctcctcctggagcctggggtgtgcaccactgtttgcagccaccctgccctgagccaggcctgggagaagcacccagcctcacgcctgcggcatgcgctgcctgggtttccctggccacaagacggggctctctgtgcttctcagaaggtcgtgcatctttgggtctgtgcggccacctccgtcttcatgtccagctcacttggaattgggctttcattggctcattcctggcttatcatccagggctcacagatgtgtgtttccagccattttactaattccagcctctgtctttcagaatacagctggtctctaacttaggatggctccacttaggccttttcaactttacaaccagcctgaagcattcagggtgcccgtcaacgaagggcaaggctgtgtctggataacactttgaggttggaatccactttccacctcatattcccagctatgagagggtttaacccttcgtgggttggaatccaccttctacctcatattcccagctatgagagggtttaacccttcgtgggttggcatccgccttctacctcatattcccagctatgagagggtttaacccttcgtgggttggaatccacctacctcatattcccagctgtgagagggtttaacccttcgtgggttggaatccaccttctacctcgtattcccagctatgagaggtttatc

SEQ ID NO: 703940 - DNA, 1517 bp, Homo sapiens
cagctctcctacctcagtctcccaagtgctgggatttcaggcctgagccacgcttggctctcagttttgggaagcaagtggcattggcatccatggcctctgccaggtgaccgctccctgccatctggtgccagagccccttccctggacatgactgcagaccagagctgggacgcagctgcaggccatggctcacctcttcccccaggccactgcccgccatcctcagaggccttttctgcctgtgttgcttcttgccaggcttttgtgtctgccagtgtctgggctctaaaggatgcactcatccgtccaccgcccacagctccagaaaatgaagagggtccccgggagccagcgattctgtgtgtaggattcacccaccatcctcagtggctctgtgggactcaggtggctggagacacatggatggggtattgaggggcagacgcacacccgagtctgcatggactctttgcctcgcggacagccaggtcccacttgctttggagaggaggatgtgcagcccaggggattctgcctctgtgcccaggtgaggcacaggtcagcaccagcacctgccatgctaactcagctcctgcacaggcctcccacacctgtgcagaggaaacacagccgtaggagcacatctgtccccatacctgagcacaggtgcacactccactgcgggcaggtacagggtgatgggttgaggggagacatactcagtcatgagttattgcctcccgttagaccgcactaccagcagggccatccctggagcctggggtgtgcgccatgttccccagctgcccctcggtcacctcctcctggagcctggggtgtgcaccactgtttgcagccaccctgccctgagccaggcctgggagaagcacccagcctcacgcctgcggcatgcgctgcctgggtttccctggccacaagacggggctctctgtgcttctcagaaggtcgtgcatctttgggtctgtgcggccacctccgtcttcatgtccagctcacttggaattgggctttcattggctcattcctggcttatcatccagggctcacagatgtgtgtttccagccattttactaattccagcctctgtctttcagaatacagctggtctctaacttaggatggctccacttaggccttttcaactttacaaccagcctgaagcattcagggtgcccgtcaacgaagggcaaggctgtgtctggataacactttgaggttggaatccactttccacctcatattcccagctatgagagggtttaacccttcgtgggttggaatccaccttctacctcatattcccagctatgagagggtttaacccttcgtgggttggcatccgccttctacctcatattcccagctatgagagggtttaacccttcgtgggttggaatccacctacctcatattcccagctgtgagagggtttaacccttcgtgggttggaatccaccttctacctcrtattcccagctatgagaggtttatc

SEQ ID NO: 703941 - DNA, 675 bp, Homo sapiens
tagaattgtcccttggtatccatggggaattggttccaggactcaaatggacaccaaaatttgttcatgttcaagtccctgatataaaatggtgtagtatttgcatataacctatgtatatcctcccatatactttaaataatatctagaatacttataatatctaatacatgatttacatataaatgtcatgtaaattgtagttataatgtatcttttatattcatattatattttatcattttgctgtttttttaaaattatttttttctctcaaatattttgatccaaagttggttgagtcgaggggtgcagaactcacaggtatggagtgatgactatacttgaattaataggaaaaattccaaacaaaaccagaaaccaaatccttaggccttgctaattctaacaaacctttatccattgcctcaaatatatgaaagtagcacaaggacatttgctgaaggaagtatgtctctcatcattgccccgacttctcacatcagcctagcactctcatgaattttcaaaagatcggtcattacagtatgtttctaaaaccctttarcttctgctttctttacttgaaagggtcagaactgagtggaactgagaggactgtgaagggaggcttttcagtttgtcacatttgcttaattaaatgcattgtttctc

SEQ ID NO: 703942 - DNA, 390 bp, Homo sapiens
tgaaaaaagggagttttgacctttcattttttgcttcattcttttatggtaagtgtaaaaattacttcaaggaaatcctatttctttcatttgtaatcataattttttaacagaaagtgctgttatttaaaaacttttgatgagttttttcctccaagagtcaacttatagtgagaagtacttctgtttccmataataatgaatgagctataatttatttaagttttgatgaggttttttttttttttttttttttacaaaagcaatgattcttaggcaacttgtcaaaagacgtcatttcagttttgaggcaagtaatgggttattatattaaattgtgagaataggttaacttagctatcacaatgagtatttgtattaatacgttct

SEQ ID NO: 703943 - DNA, 390 bp, Homo sapiens
tgaaaaaagggagttttgacctttcattttttgcttcattcttttatggtaagtgtaaaaattacttcaaggaaatcctatttctttcatttgtaatcataattttttaacagaaagtgctgttatttaaaaacttttgatgagttttttcctccaagagtcaacttatagtgagaagtacttctgtttcccataataatgaatgagctataatttatttaarttttgatgaggttttttttttttttttttttttacaaaagcaatgattcttaggcaacttgtcaaaagacgtcatttcagttttgaggcaagtaatgggttattatattaaattgtgagaataggttaacttagctatcacaatgagtatttgtattaatacgttct

SEQ ID NO: 703944 - DNA, 615 bp, Homo sapiens
agtgagaataaagtaaaacatgctgaggatattgaaaatgattgatcctaaaatttcaataacacgyaatcaagagcagacaaatatttttctttttaacattggttcagttgtcataaatagctttataactttatttgcacaaacaaggtattaacaggccattgggttcttttatttttttccctttgaagagtctcggcaaatgtaaataactttagtaagtcatcacacaaacactgagagtttgtgtgcagggaaaaatccctataagccttcataggtggtagtgattctcatgatgaatttctcatcattcaatgtctggttcttcaccttgcggtgtcgaaaacttgacagtcaattcaccaatagtgaatgtatctcaaaggtcagattcacattaaccatgttccaaaactaatacacaatgtcaaaaaagcctgtaaaccagattcctgtgaaactatttactcagcatattttcttcttgaaggtagaagtagacccacatgggaagccaggctgtaatgagaagtttgctgttgaatatggaatcaagattaagcacacaaaacgattgaagttttaatggcatctggcaaaaattaccat

SEQ ID NO: 703945 - DNA, 615 bp, Homo sapiens
agtgagaataaagtaaaacatgctgaggatattgaaaatgattgatcctaaaatttcaataacacgtaatcaagagcagacaaatatttttctttttaacattggttcagttgtcataaatagctttataactttatttgcacaaacaaggtattaacaggccattgggttcttttatttttttccctttgaagagtctcggcaaatgtaaataactttagtaagtcatcacacaaacactgagagtttgtgtgcagggaaaaatccctataagccttcataggtggtagtgattctcatgatgaatttctcatcattcaatgtctggttcttcaccttgcggtgtygaaaacttgacagtcaattcaccaatagtgaatgtatctcaaaggtcagattcacattaaccatgttccaaaactaatacacaatgtcaaaaaagcctgtaaaccagattcctgtgaaactatttactcagcatattttcttcttgaaggtagaagtagacccacatgggaagccaggctgtaatgagaagtttgctgttgaatatggaatcaagattaagcacacaaaacgattgaagttttaatggcatctggcaaaaattaccat

SEQ ID NO: 703946 - DNA, 655 bp, Homo sapiens
agtctgcagagccctagcaacaatccctggagaataccacttttaatcactcacaagttagagaaggcaatattttcccttttttctcatttttaaaagccagtagcagcttaaatgacaaatgcttcttttaatttcataataattgaatttataatatacattcatattaaaccttgaaaccgtagccaaatttgggatctagctaaaaacaaaagagcaatattagatgtcagatacaagagacatatatacagcatatctgacccaaataacttcttgatttctaaaatcacagtaatgatataagttccctgtttctttttcttaatgtataaaataaaatgcatgatatcaactactatggtttgaatatattccctccaaaatccaggtgttgaaacttaatggtcaatgtcatatacatatttaaaggtgargcctttaagaggtgattaggccaagggggcttctcacttgtgaatgggattgaccctcattaaaaaggctggacagtgttgagatctgtcactctcctaccttctgcaatgtgaggtcacagtgttcctcttcggaggaagcatcaacaaggtgccttcttggcaataggaaccctatccctcaccaggcacagaacccactggtgcctaatctt

SEQ ID NO: 703947 - DNA, 519 bp, Homo sapiens
tatatatatatatatatatatatatataaacaaaatgagagagtgagaaaacaaatatgacaaaatgttgatgtttgttgaatccaagtagaaagcatgtagctatccattgcgttattttttccaactttgctgtaagtttgaaaattttcataatacaaaattgagggaaaagcaggtttagaagatttataatgattcattaaatattcattttcagtaccaacaagattttcaccatatggtaaawgttgttctacttgaccacataatgtaatagagttcaaagagctccacaaatctttgaagcattctttgaaagatcacaaaaaaatcataagggtaaaatacactgcaacattaaatggaactgggactagttctacttttatttatctagtaaactaaagtttaatctcaataatccacttttgtctcacaataaaatttcaacaaactggcagctaggaaaaaaattactaacaagtataaaaataagaactttactgttctgaaaaa

SEQ ID NO: 703948 - DNA, 519 bp, Homo sapiens
tatatatatatatatatatatatatataaacaaaatgagagagtgagaaaacaaatatgacaaaatgttgatgtttgttgaatccaagtagaaagcatgtagctatccattgcgttattttttccaactttgctgtaagtttgaaaattttcataatacaaaattgagggaaaagcaggtttagaagatttataatgattcattaaatattcattttcagtaccaacaagattttcaccatatggtaaatgttgttctacttgaccacataatgtaatagagttcaaagagctccacaaatctttgaagcattctttgaaagatcacaaaaaaatcwtaagggtaaaatacactgcaacattaaatggaactgggactagttctacttttatttatctagtaaactaaagtttaatctcaataatccacttttgtctcacaataaaatttcaacaaactggcagctaggaaaaaaattactaacaagtataaaaataagaactttactgttctgaaaaa

SEQ ID NO: 703949 - DNA, 1335 bp, Homo sapiens
tgaaaaaagtaatagcacatttgcttatagttacaatcaatgtaataagatttgacggtggctaactaaaattttgaaaaattatttattagttttctgtttgttattttaataaatgtaccaaaatttcagataaagtgagacactaccagccaccaatgkgtgactcttacttccatgtcccaatcttactatccaagagggtaaacaacaacaacaacaaatagaaccttccatttcaaggtgaaatgtcagttaatgtttctgaaacccctctattgccaaacctctaaaaatgctggataaaacaattcaaagcaaccattcaaaattggcttgctggcaagcaggcagggaaagtctcagagacctaaacaaataagaaaacccaaatccaggggtacgagtgctcaagcaggcagctgtcaatttccagcaagccaagcttcagattttaatgggccatttttggggaatgcgaaaaagccaggaaacaaaaaactttatatcagagaactcctgagtaaaacaaaatactccaaatttgatatgaacaattattattttttgatccactttgtcacaaaagaaaacttgtttaactggaccttgactctgacagggataagatagggaaaaggaaaatttcacttaaaatttcccacccaaatgatgacctcatagaactattaaaaattaatttggaattggaatatttgctattaaattgtatgactagttagtgtgaatttaaacttagttcaaaatatccataagcctcaggttactcatctcttacataagaaaaatgctctttttctcacaaacaatcatttacttccatttataaataaggtatgaaatgtaaaagtcccaaagcttccaaagtttccaaagaaactaagtgaaaaattatgtatgtattcatacatatacctatattttgagtcactgtttttatttttatccatgatatttatgctcacagtttgtataccttttatttttatataatgtttaatttacagaaaattttcaaggctactagtacaaagagctatgatatatcctttattaggattcaccagatactaatattttttatttatttagatttgttctctctctctctctgtctctctctctctcatcccctcatcaatggttgatatggtttggctgtgtccccacccaaatctcattttgaattatagttcccacaatccacatctgtcgtgggaaggaccaggtggagataatttaatcatgggggcggttttccccaccctgttctcatgatagtgaattaggtctcacaagatctgatgattttat

SEQ ID NO: 703950 - DNA, 1666 bp, Homo sapiens
tcacgaagatatcatttattgtgtgaatgcatatggaagattcaccagaaaaaagcaaagccttacattatttcaatgtaggttctatctttcagtgtttgttcttgtccatgtttctcaatgtctctgagcctctgagttctgggctgggcagagttccttctttttctatgaaaggaaagacagtggccaagattggaacagtcctaccaagctactacaatttcctatcaagctatcttaccacactattgtgtatcttattttcattgggagctatgagctctccattgagaattaaatatttcatctgataaatacttcatggttttctgtttttaaatcatggggaagtccactttaaaaaatttgcattttgtctggaaattatcttcatcaaatgaaaggaacctctaattttgagtaacaaaacgatacatgatagggtgtgaattaatagatactatggctaagcatgttttagttctcttgaaactgttctcagttggaaagcctgagtatattcagtaaataaaaggaggaggtcttgctacagaaagaatgctgtcaaatactacagctccattcttaagcatggggtatgatattccttttcggggcttacctaagcctaattcctgacgaagcttaaaaaacccatttgcttttaaaaattaagtgtacatagcggtaatgccacaaaatggagaaaaacaatctatcttattaagaaatgtataaaaatcacatcatcaagtaaaaaaaatgctacagagtgcataattaattgtatagttagtaaaataaaacctaggcataaatgctatggaagacagcataaaagaatcatctctgggaggtgagattaggctagtcagaaataatattagttaaatttctcacaaaaatgtccacagtacacaaaagaaatatagatttcccatgtgagaaaaaaagcaaacaaatgaaacttcaggaaggaacaatgaaaatgattaagggtctaaatgaaatgattaatggacagagattaaaagacagtatccatttaatttggtgaaaagactaatgggaaactcattcacttgaaagcataactagggtaaaaaaggggtgggcgaaaggagaaaattttaggttagtcaagagaaaataaccagaagtaatgggataaaattgagtacaggaaatctgtgagtaactatcatagaaaakgcatccttgttaggtctattaggctgaagaattgtttcctaagggatgtagtaaaaagcccctttgcttgagccatttatgtagaccagacaaagaagtgggtaatggtataggaaacaattctatattcatgaaattatggacattatgatctaatagctcctactctgccagcatgaaaaaagtctttaatgcctatcattcattggcttccagcttttatattttctctttttagagaagagttaatatgacactgaactggaaccctgaaaatggacttcttccatatcttacttcaataagttttgtaattgtattgctcttatttccatattatttaaaatattagttttatgaattaagaagtctttaggaagagatattcaaatttatgatttctatataaacattgttctgtaatatcagaatcataatgacatagttcatt

SEQ ID NO: 703951 - DNA, 1666 bp, Homo sapiens
tcacgaagatatcatttattgtgtgaatgcatatggaagattcaccagaaaaaagcaaagccttacattatttcaatgtaggttctatctttcagtgtttgttcttgtccatgtttctcaatgtctctgagcctctgagttctgggctgggcagagttccttctttttctatgaaaggaaagacagtggccaagattggaacagtcctaccaagctactacaatttcctatcaagctatcttaccacactattgtgtatcttattttcattgggagctatgagctctccattgagaattaaatatttcatctgataaatacttcatggttttctgtttttaaatcatggggaagtccactttaaaaaatttgcattttgtctggaaattatcttcatcaaatgaaaggaacctctaattttgagtaacaaaacgatacatgatagggtgtgaattaatagatactatggctaagcatgttttagttctcttgaaactgttctcagttggaaagcctgagtatattcagtaaataaaaggaggaggtcttgctacagaaagaatgctgtcaaatactacagctccattcttaagcatggggtatgatattccttttcggggcttacctaagcctaattcctgacgaagcttaaaaaacccatttgcttttaaaaattaagtgtacatagcggtaatgccacaaaatggagaaaaacaatctatcttattaagaaatgtataaaaatcacatcatcaagtaaaaaaaatgctacagagtgcataattaattgtatagttagtaaaataaaacctaggcataaatgctatggaagacagcataaaagaatcatctctgggaggtgagattaggctagtcagaaataatattagttaaatttctcacaaaaatgtccacagtacacaaaagaaatatagatttcccatgtgagaaaaaaagcaaacaaatgaaacttcaggaaggaacaatgaaaatgattaagggtctaaatgaaatgattaatggacagagattaaaagacagtatccatttaatttggtgaaaagactaatgggaaactcattcacttgaaagcataactagggtaaaaaaggggtgggcgaaaggagaaaattttaggttagtcaagagaaaataaccagaagtaatgggataaaattgagtacaggaaatctgtgagtaactatcatagaaaaggcatccttgttaggtctattaggctgaagaattgtttcctaagggatgtagtaaaaagcccctttgcttgagccatttatgtagaccagacaaagaagtgggtaatggtataggaaacaattctatattcatgaaattatggacattatgatctaatagctcctactctgccagcatgaaaaaagtctttaatgcctatcattcattggcttccagcttttatattttctctttttagagaagagttaatatgacactgaactggaaccctgaaaatggacttcttccatatcttacttcaataasttttgtaattgtattgctcttatttccatattatttaaaatattagttttatgaattaagaagtctttaggaagagatattcaaatttatgatttctatataaacattgttctgtaatatcagaatcataatgacatagttcatt

SEQ ID NO: 703952 - DNA, 3328 bp, Homo sapiens
atgtacaagaatgtctacagcactattatttttttaatagagggccgaatctgtaaaacaccttgataaacatttagagaagaatagatgaattttgtttatacacatacaatgggatattctacaaaatataaatgaatgaattagacattgttgaatgaacatgaatgtattttaaaaattactttgaggaaaagcaataacagaatatattatgtgtctatatatctaggtatgtatctgctaagtgtatatagtgtgtatatgtgtatctagatatgtatctgtgagatgtatgtagtatatatagcataatttcatttctatgataaccaaatgcataaaactaaatatttttctacatatacatattatttatatatgcatatatgtaaattatttatttaaaataacaaggcaatcatagaaaacaaaactcagtataatgttttgggagggcggttagggaagtagaaaaatttgggattgaaaacccaggagtcttcaaaatgattagcaatgttctctctcttaaggtgatacagtacacaattgctcagtttttattttgttttttcttttatttgtcaattatctagatattttgtactttygtaatttttcataattaaagtagaaagtgaagcaaatgtatacatagcacttcgggaggccgaggtaggaggatcacctgaggtgaggagttcaagatcaacctggtcaacgtggtgaaaccccatctctgctaaaaatacaaaaattagctgggcatggtggtaggcatctgtaatcccacctattcgggaggctgaggcagaagaattgcttgaacccgggagacggaggttacagtgagccgagatcatgccactgcactccagcctgggcaccaagagcaaaactctgtctcaaaggaaaaaaaaaaaaaatcactatctgcactgtgacattatacttactggtgtaatagtattaaataatgctaacttgtacacatttcaaaaacataagaaacatgtaggcaatctacaattcagatacattaaaggctgacaagccagagaagccacactagcagagaaaatgctaagtattaggtaggtacaaaagtaattgcagtctttgccattaaaagtactggcaaaaaccataattacgtggacatgtctctatccgttctgtcattctaatggaaaatgatgatcatataataatccttttcacttttccatttaattttaagaagaaccatatatataaagtagtattttgaatgagagtatcacaatcctaagttacttttgtgtaagagttatttttttccaaaatgttataaataaaaaagattctaagcgtttgaagctcacagggaatacaccaataagttggatccagtagcatcacacgcacctattttataatgcattactttctagaaatcacaccttaggctacactgtcacaaagtggaatgctctacataagtaatgtatctgtttgaagatatttgatactaatgacaaaattatcaaataaatatgtaagtcaactttgatttagttgaccaatgaaaaatattggtttctttgttatggatgcatgcatcttatctgaaagaatggctacttttttaagagaaattctttcacactggagaagctagaacttctgaattctatgtcatttctccaaccaaagtagttgtcattagagtttagaatttttctaagtattccaaaaggatgaagtttagcatatgtttcgatatttctatcgtaaatgcaatataatagttacttatcacagaacagttaaaaataacattaatagcatcaaatgcacatagagtactaatgttacaggcaatattatatatactttaaacataataaatcatttacttcttaaaactataatagataggtgtgattattaacttccttttataaacaaggaaactgaaacagagtagttacaaatatttgtcattattcacacagctggcagaagggatttgaaatgaggaatatgcattacaaagttctcaccctccatcgctgaagtatactgccccaagtgcatatagaaattagcttactgatttggttcaaagctggggtatttgcaagagtaggtaggataaaagatctgattttgtagaaccactggagttgaaccacttaaggtagctctctggtaagtttaacctgtaaacagggttaacacagaggaaaaaatacagatggagagaaggagagcttcagatataagggacaaagtgagactaggtgagtatcattcagtaccgtggaaaagtccctggggacgtacaacttaactttcgtcaatctacggaagcctttcagttccacatgctagggggtgtaaaatgaattttccctcttgtgtcttcagatgccgatctttgtcttttttaagtcattttgaaaaatctcaaactaaagggtaagttgtaagtatgtgacaaagagttctctgcctccaaaaaatttgaaagtaactatcagatggtgcctaattttggtttgtcgcattatggataatgttcacttccatcacttggttaagctgttgccttccgtgcttctcaactgtcaagtttctttttttaccctttgtaattactatgatcttttgggggggtaatttgaaattatgtcaataattacaaatgtacatgggtgtatgtacaaacacgtctctattattctttcactttcttgcttctggaacattaagatgtgttagattaatctttgccattccctgccctagccctaaaatcaggcttttcttcaaaaagtcatagctccactaatgcatgcataaacatgtgtatgtgttcgtgttgtgctctgtgtttaaatgtatgtacacatagaaagagaacaaacctcccatatgtaacacatctcccatcacttctaccactcccctcatcccttcagaagccttccttaccctactggttctctgactcctcacatcgggtcacagtgcaatgcagaagtccttctcattctgccaggacaccaatgctttgtgtctggatgccctaggactgattgtttttaaaaactaaaacatattatcagttctttcaaaaagtcttcacactggaaattaggttgaaaaagcacttcgctcctgacttgagagtccaaaatgttgtacgcaacctcagagggcattttagacttatctagatgtcattatgcatctgcttgttagtgtttttcgattcctagaagaaccaatctttctcttctaggattgtgatcttttcaccttttgtgattcaactttg

SEQ ID NO: 703953 - DNA, 3328 bp, Homo sapiens
atgtacaagaatgtctacagcactattatttttttaatagagggccgaatctgtaaaacaccttgataaacatttagagaagaatagatgaattttgtttatacacatacaatgggatattctacaaaatataaatgaatgaattagacattgttgaatgaacatgaatgtattttaaaaattactttgaggaaaagcaataacagaatatattatgtgtctatatatctaggtatgtatctgctaagtgtatatagtgtgtatatgtgtatctagatatgtatctgtgagatgtatgtagtatatatagcataatttcatttctatgataaccaaatgcataaaactaaatatttttctacatatacatattatttatatatgcatatatgtaaattatttatttaaaataacaaggcaatcatagaaaacaaaactcagtataatgttttgggagggcggttagggaagtagaaaaatttgggattgaaaacccaggagtcttcaaaatgattagcaatgttctctctcttaaggtgatacagtacacaattgctcagtttttattttgttttttcttttatttgtcaattatctagatattttgtacttttgtaatttttcataattaaagtagaaagtgaagcaaatgtatacatagcacttcgggaggccgaggtaggagsatcacctgaggtgaggagttcaagatcaacctggtcaacgtggtgaaaccccatctctgctaaaaatacaaaaattagctgggcatggtggtaggcatctgtaatcccacctattcgggaggctgaggcagaagaattgcttgaacccgggagacggaggttacagtgagccgagatcatgccactgcactccagcctgggcaccaagagcaaaactctgtctcaaaggaaaaaaaaaaaaaatcactatctgcactgtgacattatacttactggtgtaatagtattaaataatgctaacttgtacacatttcaaaaacataagaaacatgtaggcaatctacaattcagatacattaaaggctgacaagccagagaagccacactagcagagaaaatgctaagtattaggtaggtacaaaagtaattgcagtctttgccattaaaagtactggcaaaaaccataattacgtggacatgtctctatccgttctgtcattctaatggaaaatgatgatcatataataatccttttcacttttccatttaattttaagaagaaccatatatataaagtagtattttgaatgagagtatcacaatcctaagttacttttgtgtaagagttatttttttccaaaatgttataaataaaaaagattctaagcgtttgaagctcacagggaatacaccaataagttggatccagtagcatcacacgcacctattttataatgcattactttctagaaatcacaccttaggctacactgtcacaaagtggaatgctctacataagtaatgtatctgtttgaagatatttgatactaatgacaaaattatcaaataaatatgtaagtcaactttgatttagttgaccaatgaaaaatattggtttctttgttatggatgcatgcatcttatctgaaagaatggctacttttttaagagaaattctttcacactggagaagctagaacttctgaattctatgtcatttctccaaccaaagtagttgtcattagagtttagaatttttctaagtattccaaaaggatgaagtttagcatatgtttcgatatttctatcgtaaatgcaatataatagttacttatcacagaacagttaaaaataacattaatagcatcaaatgcacatagagtactaatgttacaggcaatattatatatactttaaacataataaatcatttacttcttaaaactataatagataggtgtgattattaacttccttttataaacaaggaaactgaaacagagtagttacaaatatttgtcattattcacacagctggcagaagggatttgaaatgaggaatatgcattacaaagttctcaccctccatcgctgaagtatactgccccaagtgcatatagaaattagcttactgatttggttcaaagctggggtatttgcaagagtaggtaggataaaagatctgattttgtagaaccactggagttgaaccacttaaggtagctctctggtaagtttaacctgtaaacagggttaacacagaggaaaaaatacagatggagagaaggagagcttcagatataagggacaaagtgagactaggtgagtatcattcagtaccgtggaaaagtccctggggacgtacaacttaactttcgtcaatctacggaagcctttcagttccacatgctagggggtgtaaaatgaattttccctcttgtgtcttcagatgccgatctttgtcttttttaagtcattttgaaaaatctcaaactaaagggtaagttgtaagtatgtgacaaagagttctctgcctccaaaaaatttgaaagtaactatcagatggtgcctaattttggtttgtcgcattatggataatgttcacttccatcacttggttaagctgttgccttccgtgcttctcaactgtcaagtttctttttttaccctttgtaattactatgatcttttgggggggtaatttgaaattatgtcaataattacaaatgtacatgggtgtatgtacaaacacgtctctattattctttcactttcttgcttctggaacattaagatgtgttagattaatctttgccattccctgccctagccctaaaatcaggcttttcttcaaaaagtcatagctccactaatgcatgcataaacatgtgtatgtgttcgtgttgtgctctgtgtttaaatgtatgtacacatagaaagagaacaaacctcccatatgtaacacatctcccatcacttctaccactcccctcatcccttcagaagccttccttaccctactggttctctgactcctcacatcgggtcacagtgcaatgcagaagtccttctcattctgccaggacaccaatgctttgtgtctggatgccctaggactgattgtttttaaaaactaaaacatattatcagttctttcaaaaagtcttcacactggaaattaggttgaaaaagcacttcgctcctgacttgagagtccaaaatgttgtacgcaacctcagagggcattttagacttatctagatgtcattatgcatctgcttgttagtgtttttcgattcctagaagaaccaatctttctcttctaggattgtgatcttttcaccttttgtgattcaactttg

SEQ ID NO: 703954 - DNA, 3328 bp, Homo sapiens
atgtacaagaatgtctacagcactattatttttttaatagagggccgaatctgtaaaacaccttgataaacatttagagaagaatagatgaattttgtttatacacatacaatgggatattctacaaaatataaatgaatgaattagacattgttgaatgaacatgaatgtattttaaaaattactttgaggaaaagcaataacagaatatattatgtgtctatatatctaggtatgtatctgctaagtgtatatagtgtgtatatgtgtatctagatatgtatctgtgagatgtatgtagtatatatagcataatttcatttctatgataaccaaatgcataaaactaaatatttttctacatatacatattatttatatatgcatatatgtaaattatttatttaaaataacaaggcaatcatagaaaacaaaactcagtataatgttttgggagggcggttagggaagtagaaaaatttgggattgaaaacccaggagtcttcaaaatgattagcaatgttctctctcttaaggtgatacagtacacaattgctcagtttttattttgttttttcttttatttgtcaattatctagatattttgtacttttgtaatttttcataattaaagtagaaagtgaagcaaatgtatacatagcacttcgggaggccgaggtaggaggatcacctgaggtgaggagttcaagatcaacctggtcaacgtggtgaaaccccatctctgctaaaaatacaaaaattagctgggcatggtggtaggcatctgtaatcccasctattcgggaggctgaggcagaagaattgcttgaacccgggagacggaggttacagtgagccgagatcatgccactgcactccagcctgggcaccaagagcaaaactctgtctcaaaggaaaaaaaaaaaaaatcactatctgcactgtgacattatacttactggtgtaatagtattaaataatgctaacttgtacacatttcaaaaacataagaaacatgtaggcaatctacaattcagatacattaaaggctgacaagccagagaagccacactagcagagaaaatgctaagtattaggtaggtacaaaagtaattgcagtctttgccattaaaagtactggcaaaaaccataattacgtggacatgtctctatccgttctgtcattctaatggaaaatgatgatcatataataatccttttcacttttccatttaattttaagaagaaccatatatataaagtagtattttgaatgagagtatcacaatcctaagttacttttgtgtaagagttatttttttccaaaatgttataaataaaaaagattctaagcgtttgaagctcacagggaatacaccaataagttggatccagtagcatcacacgcacctattttataatgcattactttctagaaatcacaccttaggctacactgtcacaaagtggaatgctctacataagtaatgtatctgtttgaagatatttgatactaatgacaaaattatcaaataaatatgtaagtcaactttgatttagttgaccaatgaaaaatattggtttctttgttatggatgcatgcatcttatctgaaagaatggctacttttttaagagaaattctttcacactggagaagctagaacttctgaattctatgtcatttctccaaccaaagtagttgtcattagagtttagaatttttctaagtattccaaaaggatgaagtttagcatatgtttcgatatttctatcgtaaatgcaatataatagttacttatcacagaacagttaaaaataacattaatagcatcaaatgcacatagagtactaatgttacaggcaatattatatatactttaaacataataaatcatttacttcttaaaactataatagataggtgtgattattaacttccttttataaacaaggaaactgaaacagagtagttacaaatatttgtcattattcacacagctggcagaagggatttgaaatgaggaatatgcattacaaagttctcaccctccatcgctgaagtatactgccccaagtgcatatagaaattagcttactgatttggttcaaagctggggtatttgcaagagtaggtaggataaaagatctgattttgtagaaccactggagttgaaccacttaaggtagctctctggtaagtttaacctgtaaacagggttaacacagaggaaaaaatacagatggagagaaggagagcttcagatataagggacaaagtgagactaggtgagtatcattcagtaccgtggaaaagtccctggggacgtacaacttaactttcgtcaatctacggaagcctttcagttccacatgctagggggtgtaaaatgaattttccctcttgtgtcttcagatgccgatctttgtcttttttaagtcattttgaaaaatctcaaactaaagggtaagttgtaagtatgtgacaaagagttctctgcctccaaaaaatttgaaagtaactatcagatggtgcctaattttggtttgtcgcattatggataatgttcacttccatcacttggttaagctgttgccttccgtgcttctcaactgtcaagtttctttttttaccctttgtaattactatgatcttttgggggggtaatttgaaattatgtcaataattacaaatgtacatgggtgtatgtacaaacacgtctctattattctttcactttcttgcttctggaacattaagatgtgttagattaatctttgccattccctgccctagccctaaaatcaggcttttcttcaaaaagtcatagctccactaatgcatgcataaacatgtgtatgtgttcgtgttgtgctctgtgtttaaatgtatgtacacatagaaagagaacaaacctcccatatgtaacacatctcccatcacttctaccactcccctcatcccttcagaagccttccttaccctactggttctctgactcctcacatcgggtcacagtgcaatgcagaagtccttctcattctgccaggacaccaatgctttgtgtctggatgccctaggactgattgtttttaaaaactaaaacatattatcagttctttcaaaaagtcttcacactggaaattaggttgaaaaagcacttcgctcctgacttgagagtccaaaatgttgtacgcaacctcagagggcattttagacttatctagatgtcattatgcatctgcttgttagtgtttttcgattcctagaagaaccaatctttctcttctaggattgtgatcttttcaccttttgtgattcaactttg

SEQ ID NO: 703955 - DNA, 2346 bp, Homo sapiens
  misc_feature 2059, 2060, 2061, 2062, 2064, 2065, 2066, 2067, 2070, 2072,2073, 2074, 2076, 2078, 2079, 2080, 2081, 2083, 2085, 2087,2089, 2092, 2094, 2095, 2096, 2098, 2099: n = A,T,C or G
ggaggaaaagaaaaggttgaattcataaatttacctaataatcagttgaagggaccaatccaatagttaaacttctggctaggttgatcaaaaactataagaaacaaaaatttaagcaacaataataggcatggaattgtttttaataaaactggcaaaaaggtagtatattatytgttgaattattcaataaataaatttaataaatatataataaatgaaaattagcaaattaaatattcaataaagtaataaaattgataataattttaaagcagacttctatctcatgtcatataccaaaatatattcagattatttaaatgtttaaacatatattacacaactatgtgaaaatatatttatgaaaccctaaaaattttaagtgaatattcacacagcatactgataagcaagtatctgataaacattacatcagaggtagaaattctaatgtatattttatgaactcaaatatatatgctttttactatattccatgggtcggctcttcacgacaaagataaatgtctcaaatattgatccttaatgataaaacaaagcaaactgaatcaataatcatttcagattattcagcaaattacacttttttctatgggtaggtgacttttctttcctactgatgctaagctttgccacgtgccctctggtgctcagcaggatattgacagaaacaatggtttacaggcaagtcttcaaaggtgtcatgtattcctacttgtccatatgcaatctggtggtcaccatgaaaggaacatgcccagggaacaattagcccaagaagaatgaagtaatgtgcgaagtaggcctgacccagcaagaagcctacagtctgaatcaaagttgtgagcaagaaaaataaagtctaactgttataatccactaagttttaaggtgactaattatgcagcattgttgtgacaatattttactattaatactcttagatgttttgtacttatatgacactatgcagtgatgtcaaagagaggggagtaaacaagttcttgcatactgcaaattaaattcttctgaagaacagtttatacagcaaaaatcgtgaagatgttaaggtgctttcttcctgaaattcctcctaaatattttctaaagaatatatgataaagacaaatacgtgattacaataatagatactgaaactttttttaagtcatagataaacacaaatttttcaccaaattggctgtaaaaattactgtgtatccattcaacagaataccacacagccattgagaggaggttatagaagcatatttccaaaaggggaaatacaattatgtttaattttaaaatcatggcataacattgcatgtgtagcataaaagtgataaagaggaggaatgagaattcagaaatggttattgcaaatattaaaaggggtcatccacatttttctgtcttccaaaatatttgtatttgaaaaaatacattcagcttaaaattttacaatttattggcaattgtaatgtaaaagtaagtaaccgtaatgtgtttttggtggataatttagataattaatgtttcatttaagtaaaaagaagttgattcttgttgatattcttacacttaaaccattttgtggtgatgactgaaacagattctcaatgtccccaaatacttgactgtcactcattaagagtagaattttaaaagcctttaaatctaaattttatgtttattcatacattcatgctggctattccatcatattttcaatccaaggttattcagatttatatatatatatacatatatatatatattttattatactttaagttctagggtacatgtgcacaacatgcaggtttgttacatatgtatacatgtgccatgttggacaaagggctaatatcccgaatctacaaagaactcaaaccaatttacaagaaaaaagcaaacaaccacatcaaaaagtgggcgaaggatatgaacagacacttctcaaaagaagacatttatgtagccaacagacacatgaaaaaatgctcatcgtcgcttaactattacggacgcnnnncnnnnccncnnngngnnnncncncncnccngnnngnntggcgatcactattcagatttgtttgtctgtgcttttagaaaataggcatttcatgcttctaagtataattaacagagttttagatacttattctaagtagaggctttctcaaaatgaatcagaacagaaacttttaatcaaatttagcatgttattgctttcactttaaagctatgcttgaaaacgatttttaaattttcttagtttattcaagtcacacctattgtggtttgaatttaatatgtt

SEQ ID NO: 703956 - DNA, 2346 bp, Homo sapiens
  misc_feature 2059, 2060, 2061, 2062, 2064, 2065, 2066, 2067, 2070, 2072,2073, 2074, 2076, 2078, 2079, 2080, 2081, 2083, 2085, 2087,2089, 2092, 2094, 2095, 2096, 2098, 2099: n = A,T,C or G
ggaggaaaagaaaaggttgaattcataaatttacctaataatcagttgaagggaccaatccaatagttaaacttctggctaggttgatcaaaaactataagaaacaaaaatttaagcaacaataataggcatggaattgtttttaataaaactggcaaaaaggtagtatattatttgttgaattattcaataaataaatttaataaatatataataaatgaaaattagcaaattaaatattcaataaagtaataaaattgataataattttaaagcagacttctatctcatgtcatataccaaaatatattcagattatttaaatgtttaaacatatattacacaactatgtgaaaatatatttatgaaaccctaaaaattttaagtgaatattcacacagcatactgataagcaagtatctgataaacattacwtcagaggtagaaattctaatgtatattttatgaactcaaatatatatgctttttactatattccatgggtcggctcttcacgacaaagataaatgtctcaaatattgatccttaatgataaaacaaagcaaactgaatcaataatcatttcagattattcagcaaattacacttttttctatgggtaggtgacttttctttcctactgatgctaagctttgccacgtgccctctggtgctcagcaggatattgacagaaacaatggtttacaggcaagtcttcaaaggtgtcatgtattcctacttgtccatatgcaatctggtggtcaccatgaaaggaacatgcccagggaacaattagcccaagaagaatgaagtaatgtgcgaagtaggcctgacccagcaagaagcctacagtctgaatcaaagttgtgagcaagaaaaataaagtctaactgttataatccactaagttttaaggtgactaattatgcagcattgttgtgacaatattttactattaatactcttagatgttttgtacttatatgacactatgcagtgatgtcaaagagaggggagtaaacaagttcttgcatactgcaaattaaattcttctgaagaacagtttatacagcaaaaatcgtgaagatgttaaggtgctttcttcctgaaattcctcctaaatattttctaaagaatatatgataaagacaaatacgtgattacaataatagatactgaaactttttttaagtcatagataaacacaaatttttcaccaaattggctgtaaaaattactgtgtatccattcaacagaataccacacagccattgagaggaggttatagaagcatatttccaaaaggggaaatacaattatgtttaattttaaaatcatggcataacattgcatgtgtagcataaaagtgataaagaggaggaatgagaattcagaaatggttattgcaaatattaaaaggggtcatccacatttttctgtcttccaaaatatttgtatttgaaaaaatacattcagcttaaaattttacaatttattggcaattgtaatgtaaaagtaagtaaccgtaatgtgtttttggtggataatttagataattaatgtttcatttaagtaaaaagaagttgattcttgttgatattcttacacttaaaccattttgtggtgatgactgaaacagattctcaatgtccccaaatacttgactgtcactcattaagagtagaattttaaaagcctttaaatctaaattttatgtttattcatacattcatgctggctattccatcatattttcaatccaaggttattcagatttatatatatatatacatatatatatatattttattatactttaagttctagggtacatgtgcacaacatgcaggtttgttacatatgtatacatgtgccatgttggacaaagggctaatatcccgaatctacaaagaactcaaaccaatttacaagaaaaaagcaaacaaccacatcaaaaagtgggcgaaggatatgaacagacacttctcaaaagaagacatttatgtagccaacagacacatgaaaaaatgctcatcgtcgcttaactattacggacgcnnnncnnnnccncnnngngnnnncncncncnccngnnngnntggcgatcactattcagatttgtttgtctgtgcttttagaaaataggcatttcatgcttctaagtataattaacagagttttagatacttattctaagtagaggctttctcaaaatgaatcagaacagaaacttttaatcaaatttagcatgttattgctttcactttaaagctatgcttgaaaacgatttttaaattttcttagtttattcaagtcacacctattgtggtttgaatttaatatgtt

SEQ ID NO: 703957 - DNA, 2346 bp, Homo sapiens
  misc_feature 2059, 2060, 2061, 2062, 2064, 2065, 2066, 2067, 2070, 2072,2073, 2074, 2076, 2078, 2079, 2080, 2081, 2083, 2085, 2087,2089, 2092, 2094, 2095, 2096, 2098, 2099: n = A,T,C or G
ggaggaaaagaaaaggttgaattcataaatttacctaataatcagttgaagggaccaatccaatagttaaacttctggctaggttgatcaaaaactataagaaacaaaaatttaagcaacaataataggcatggaattgtttttaataaaactggcaaaaaggtagtatattatttgttgaattattcaataaataaatttaataaatatataataaatgaaaattagcaaattaaatattcaataaagtaataaaattgataataattttaaagcagacttctatctcatgtcatataccaaaatatattcagattatttaaatgtttaaacatatattacacaactatgtgaaaatatatttatgaaaccctaaaaattttaagtgaatattcacacagcatactgataagcaagtatctgataaacattacatcagaggtagaaattctaatgtatattttatgaactcaaatatatatgctttttactatattccatgggtcggctcttcacgacaaagataaatgtctcaaatattgatccttaatgataaaacaaagcaaactgaatcaataatcatttcagattattcagcaaattacacttttttctatgggtaggtgacttttctttcctactgatgctaagctttgccacgtgccctctggtgctcagcaggatattgacagaaacaatggtttacaggcaagtcttcaaaggtgtcatgtattcctacttgtccatatgcaatctggtggtcaccatgaaaggaacatgcccagggaacaattagcccaagaagaatgaagtaatgtgcgaagtaggcctgacccagcaagaagcctacagtctgaatcaaagttgtgagcaagaaaaataaagtctaactgttataatccactaagttttaaggtgactaattatgcagcattgttgtgacaatattttactattaatactcttagatgttttgtacttatatgacactatgcagtgatgtcaaagagaggggagtaaacaagttcttgcatactgcaaattaaattcttctgaagaacagtttatacagcaaaaatcgtgaagatgttaaggtgctttcttcctgaaattcctcctaaatattttctaaagaatatatgataaagacaaatacgtgattacaataatagatactgaaactttttttaagtcatagataaacacaaatttttcaccaaattggctgtaaaaattactgtgtatccattcaacrgaataccacacagccattgagaggaggttatagaagcatatttccaaaaggggaaatacaattatgtttaattttaaaatcatggcataacattgcatgtgtagcataaaagtgataaagaggaggaatgagaattcagaaatggttattgcaaatattaaaaggggtcatccacatttttctgtcttccaaaatatttgtatttgaaaaaatacattcagcttaaaattttacaatttattggcaattgtaatgtaaaagtaagtaaccgtaatgtgtttttggtggataatttagataattaatgtttcatttaagtaaaaagaagttgattcttgttgatattcttacacttaaaccattttgtggtgatgactgaaacagattctcaatgtccccaaatacttgactgtcactcattaagagtagaattttaaaagcctttaaatctaaattttatgtttattcatacattcatgctggctattccatcatattttcaatccaaggttattcagatttatatatatatatacatatatatatatattttattatactttaagttctagggtacatgtgcacaacatgcaggtttgttacatatgtatacatgtgccatgttggacaaagggctaatatcccgaatctacaaagaactcaaaccaatttacaagaaaaaagcaaacaaccacatcaaaaagtgggcgaaggatatgaacagacacttctcaaaagaagacatttatgtagccaacagacacatgaaaaaatgctcatcgtcgcttaactattacggacgcnnnncnnnnccncnnngngnnnncncncncnccngnnngnntggcgatcactattcagatttgtttgtctgtgcttttagaaaataggcatttcatgcttctaagtataattaacagagttttagatacttattctaagtagaggctttctcaaaatgaatcagaacagaaacttttaatcaaatttagcatgttattgctttcactttaaagctatgcttgaaaacgatttttaaattttcttagtttattcaagtcacacctattgtggtttgaatttaatatgtt

SEQ ID NO: 703958 - DNA, 2346 bp, Homo sapiens
  misc_feature 2059, 2060, 2061, 2062, 2064, 2065, 2066, 2067, 2070, 2072,2073, 2074, 2076, 2078, 2079, 2080, 2081, 2083, 2085, 2087,2089, 2092, 2094, 2095, 2096, 2098, 2099: n = A,T,C or G
ggaggaaaagaaaaggttgaattcataaatttacctaataatcagttgaagggaccaatccaatagttaaacttctggctaggttgatcaaaaactataagaaacaaaaatttaagcaacaataataggcatggaattgtttttaataaaactggcaaaaaggtagtatattatttgttgaattattcaataaataaatttaataaatatataataaatgaaaattagcaaattaaatattcaataaagtaataaaattgataataattttaaagcagacttctatctcatgtcatataccaaaatatattcagattatttaaatgtttaaacatatattacacaactatgtgaaaatatatttatgaaaccctaaaaattttaagtgaatattcacacagcatactgataagcaagtatctgataaacattacatcagaggtagaaattctaatgtatattttatgaactcaaatatatatgctttttactatattccatgggtcggctcttcacgacaaagataaatgtctcaaatattgatccttaatgataaaacaaagcaaactgaatcaataatcatttcagattattcagcaaattacacttttttctatgggtaggtgacttttctttcctactgatgctaagctttgccacgtgccctctggtgctcagcaggatattgacagaaacaatggtttacaggcaagtcttcaaaggtgtcatgtattcctacttgtccatatgcaatctggtggtcaccatgaaaggaacatgcccagggaacaattagcccaagaagaatgaagtaatgtgcgaagtaggcctgacccagcaagaagcctacagtctgaatcaaagttgtgagcaagaaaaataaagtctaactgttataatccactaagttttaaggtgactaattatgcagcattgttgtgacaatattttactattaatactcttagatgttttgtacttatatgacactatgcagtgatgtcaaagagaggggagtaaacaagttcttgcatactgcaaattaaattcttctgaagaacagtttatacagcaaaaatcgtgaagatgttaaggtgctttcttcctgaaattcctcctaaatattttctaaagaatatatgataaagacaaatacgtgattacaataatagatactgaaactttttttaagtcatagataaacacaaatttttcaccaaattggctgtaaaaattactgtgtatccattcaacagaataccacacagccattgagaggaggttatagaagcatatttccaaaaggggaaatacaattatgtttaattttaaaatcatggcataacattgcatgtgtagcataaaagtgataaagaggaggaatgagaattcagaaatggttattgcaaatattaaaaggggtcatccacatttttctgtcttccaaaatatttgtatttgaaaaaatacattcagcttaaaattttacaatttattggcaattgtaatgtaaaagtaagtaaccgtaatgtgtttttggtggataatttagataattaatgtttcatttaagtaaaaagaagttgattcttgttgatattcttacacttaaaccattttgtggtgatgactgaaacagattctcaatgtccccaaatacttgactgtcactcattaagagtagaattttaaaagcctttaaatctaaattttatgtttattcatacattcatgctggctattccatcatattttcaatccaaggttattcagatttatatatatatatacatatatatatatattttattatactttaagttctagrgtacatgtgcacaacatgcaggtttgttacatatgtatacatgtgccatgttggacaaagggctaatatcccgaatctacaaagaactcaaaccaatttacaagaaaaaagcaaacaaccacatcaaaaagtgggcgaaggatatgaacagacacttctcaaaagaagacatttatgtagccaacagacacatgaaaaaatgctcatcgtcgcttaactattacggacgcnnnncnnnnccncnnngngnnnncncncncnccngnnngnntggcgatcactattcagatttgtttgtctgtgcttttagaaaataggcatttcatgcttctaagtataattaacagagttttagatacttattctaagtagaggctttctcaaaatgaatcagaacagaaacttttaatcaaatttagcatgttattgctttcactttaaagctatgcttgaaaacgatttttaaattttcttagtttattcaagtcacacctattgtggtttgaatttaatatgtt

SEQ ID NO: 703959 - DNA, 1029 bp, Homo sapiens
gtgaggtagagatggtgaagccttctactaacatcttgctcagtcactgttgggggctttcctgagggagagcatgctctcacctaacaccactttgcttggtcttttgctggagtcacctcagaaaagcattacctcagctcgaaaaccagggtgggtcctgaagaagctaacagctggaggctttcagatgaacatttcacakctgggtagtcagtactttcctaagaggatttcagtagcacagctccatgtctgccgcagtctaccaatagtactgcattgacccacttctctacgtaggtttgggaagaagctcttccatggttcctgtgagagcccctttcagatgggaaaattaaaagtgggagaaagagggaagaaccactggtccagtccctcccggtcttcacatgttcacaattagtacacatatttttcctctttccctatccaatctaatttctcctcaccctcagctaccccttttgttggtcacagtggtttatctgacagggtgaacttaactctcactcctgaagtgtcctaataaaagccgtagtaaccgttatctttcaggctagaaatgttgcccttgtccatttattgttggaattaggtgaaggaataccataagtcactcacgtgagtaacccaagctccatacacattgctacctgtatccattgtaaaacagcaacactaccttctcttgggatgatcaggttttattgcctctgaaaagctggtaatttattttctcgctgactgattcctaaagtgcccaggtggcatcattagctttgcagtaacttgaatatcgtgctgagtcctggtaagagtgtacctcagttgggtaccaaaaccaggctctctaatcctgcagcatccaaaattgaagggatgggaagcacaaaatatccagaaggtcactgggaataatggtaagcaggcctcttctgcttctatgccttggttcccaaatctgtgtattcttccttttgaggacattgtgccatatagtggtct

SEQ ID NO: 703960 - DNA, 1029 bp, Homo sapiens
gtgaggtagagatggtgaagccttctactaacatcttgctcagtcactgttgggggctttcctgagggagagcatgctctcacctaacaccactttgcttggtcttttgctggagtcacctcagaaaagcattacctcagctcgaaaaccagggtgggtcctgaagaagctaacagctggaggctttcagatgaacatttcacatctgggtagtcagtactttcctaagaggatttcagtagcacagctccatgtctsccgcagtctaccaatagtactgcattgacccacttctctacgtaggtttgggaagaagctcttccatggttcctgtgagagcccctttcagatgggaaaattaaaagtgggagaaagagggaagaaccactggtccagtccctcccggtcttcacatgttcacaattagtacacatatttttcctctttccctatccaatctaatttctcctcaccctcagctaccccttttgttggtcacagtggtttatctgacagggtgaacttaactctcactcctgaagtgtcctaataaaagccgtagtaaccgttatctttcaggctagaaatgttgcccttgtccatttattgttggaattaggtgaaggaataccataagtcactcacgtgagtaacccaagctccatacacattgctacctgtatccattgtaaaacagcaacactaccttctcttgggatgatcaggttttattgcctctgaaaagctggtaatttattttctcgctgactgattcctaaagtgcccaggtggcatcattagctttgcagtaacttgaatatcgtgctgagtcctggtaagagtgtacctcagttgggtaccaaaaccaggctctctaatcctgcagcatccaaaattgaagggatgggaagcacaaaatatccagaaggtcactgggaataatggtaagcaggcctcttctgcttctatgccttggttcccaaatctgtgtattcttccttttgaggacattgtgccatatagtggtct

SEQ ID NO: 703961 - DNA, 1973 bp, Homo sapiens
ctctgcatccacatttatagcttaggcttctctctgactttcaaaccatatatatcctactatatacgcaacctgtctrttagatattgcatacgaatatgaaatgtaatgtgcccaaaacgaagctcataattttactcatatttgacttttccagtattttctatatccatgaaatgacatggccggcaaaccagctacacatactagagacttgcaaatcatctctgacattgtgttttttgttcaccttctccttagtatggtttatcaacaacattttcaggtttcactctattgaagtctttcaaatgtttgtacttcttccatattgctattataaatctaatccttatgaataatctctcttctggccttcagcaacagtctactaactggtctctttttctttgtgaatcaattctccctttcataatgcaaccggtataaacttttctaactaaaatgctagcatgccacatctcagatttctttaagcatccgcacattgatgcatgtaaaatactttattggccccagctctttgggaggccgaggcagatggctcacccgaggtcaggagttcgagaccagcctggccaacatggcaaaaccccatctctacttaaaaaaatgcaaaaattagctgggcgcaatggcagacacctgtagtcccaactgctctggaggctgagcgaggagaattgcttgaacccgggaggcagaggttgccgtgagctgagattgcaccattgcactcaagcctgggagacagaacaagactctgtctcaaaaaataaaactaaaaattcttttattggcttcccatgaacattgaaataaagactccaaccttggcatagtctataaggtggtgcatgagcttaatcctgcaaaatatcttcatttgcatctctcctcattctttctttattcactggcttcaactctgtaagacttagttcagtttatcaaatgtctactgcttccttctactaatttgctactgcatatattgtctcctttgcctaaaatattgttttacttttcattgagataaattattactcattcagttcaaattccactcaaatttcttcatagacgtcttctttaactcccatagtagattgatcattatgacctataccccccacattctctgaacataatttttatactatgtgtcacagtttctatgactgaaattgtcatagcccttgtactatgctgtaagctccatggtggcaaagtgagatgtgtacttcctgtgcccagcacattggcctggtaatagtagatactcaataagtatttctttaactctgaatgaacaaatgaatgaactgaataagaggatgcctgtagcacagcttcagtgtcaagaaaacaaacctcaggtttacttgcagctgggattgtcacaaacattctagaaattatgaaattgttgagatagtttttcaagtatacccatgattattctaacaaagtccttgatatctggtttattaaagatcagcccagtccttgtaatccagtgagaaaactactagagagaaagatctttaaagtgtcatctacaaattgcaaagctctatggattgtatgttgaaattttgcatttatgttagatagatcatagtgtacagggagtacgccaagttattcagaggccagggcacaattccttagttcatagctccaacaaattgtgaaaatgtagaggttaagcaaattattagaaatagaagctgaggaaagtacttttattctgatgctaccctctgtattagatgtataataaataccaattgtataatgttctgtatatggaagtataaaaaaccaaaacatttgaaaagtactgtactgttatagcccctacagggcttatcaattgtagaatatctggactcagacctaccgagaccaatctgttccctactggtcaaaaatgcataaacttacca

SEQ ID NO: 703962 - DNA, 1973 bp, Homo sapiens
ctctgcatccacatttatagcttaggcttctctctgactttcaaaccatatatatcctactatatacgcaacctgtctgttagatattgcatacgaatatgaaatgtaatgtgcccaaaacgaagctcataattttactcatatttgacttttccagtattttctatatccatgaaatgacatggccggcaaaccagctacacatactagagacttgcaaatcatctctgacattgtgttttttgttcaccttctccttagtatggtttatcaacaacattttcaggtttcactctattgaagtctttcaaatgtttgtacttcttccatattgctattataaatctaatccttatgaataatctctcttctggccttcagcaacagtctactaactggtctctttttctttgtgaatcaattctccctttcataatgcaaccggtataaacttttctaactaaaatgctagcatgccayatctcagatttctttaagcatccgcacattgatgcatgtaaaatactttattggccccagctctttgggaggccgaggcagatggctcacccgaggtcaggagttcgagaccagcctggccaacatggcaaaaccccatctctacttaaaaaaatgcaaaaattagctgggcgcaatggcagacacctgtagtcccaactgctctggaggctgagcgaggagaattgcttgaacccgggaggcagaggttgccgtgagctgagattgcaccattgcactcaagcctgggagacagaacaagactctgtctcaaaaaataaaactaaaaattcttttattggcttcccatgaacattgaaataaagactccaaccttggcatagtctataaggtggtgcatgagcttaatcctgcaaaatatcttcatttgcatctctcctcattctttctttattcactggcttcaactctgtaagacttagttcagtttatcaaatgtctactgcttccttctactaatttgctactgcatatattgtctcctttgcctaaaatattgttttacttttcattgagataaattattactcattcagttcaaattccactcaaatttcttcatagacgtcttctttaactcccatagtagattgatcattatgacctataccccccacattctctgaacataatttttatactatgtgtcacagtttctatgactgaaattgtcatagcccttgtactatgctgtaagctccatggtggcaaagtgagatgtgtacttcctgtgcccagcacattggcctggtaatagtagatactcaataagtatttctttaactctgaatgaacaaatgaatgaactgaataagaggatgcctgtagcacagcttcagtgtcaagaaaacaaacctcaggtttacttgcagctgggattgtcacaaacattctagaaattatgaaattgttgagatagtttttcaagtatacccatgattattctaacaaagtccttgatatctggtttattaaagatcagcccagtccttgtaatccagtgagaaaactactagagagaaagatctttaaagtgtcatctacaaattgcaaagctctatggattgtatgttgaaattttgcatttatgttagatagatcatagtgtacagggagtacgccaagttattcagaggccagggcacaattccttagttcatagctccaacaaattgtgaaaatgtagaggttaagcaaattattagaaatagaagctgaggaaagtacttttattctgatgctaccctctgtattagatgtataataaataccaattgtataatgttctgtatatggaagtataaaaaaccaaaacatttgaaaagtactgtactgttatagcccctacagggcttatcaattgtagaatatctggactcagacctaccgagaccaatctgttccctactggtcaaaaatgcataaacttacca

SEQ ID NO: 703963 - DNA, 694 bp, Homo sapiens
ccaggaatttcaatgggatgtttttgagtttaggaagttaggctggctgcattccatgacatgcaagggagaggattttggagtagcacagaaaatggaaaccttggccgggcgtggtggctcacgcctgtaatccgagcacttcgggaggctgaggcggggcggatcacctgaggtcaggagttcgagaccagcctgaccaacatggagaaaccctgtctctactgaaaatacaaaatattagccggtgtggtggtgcatgcttataatcccagctactcaggaggctgaggcaagaaaatcacttgaacccgggaggtaagaggttgtgktgagccgagattccaccattgtactgcagcctgggcaacaagaatgaaattcgtctcaaaaaaaaaaaaaaagaaagaaagaaagaaagaaaagaaagaaaaaggaaaccccgagcatgcttttggcagaggtaggtgcagagaggctggagagcatggtaacccagaggggagggttctgtttttaccaagtcacaccactttccttcctccatacctgctaggctgagcctcagttgaatgtgagaaaaacgctatgggtgtgatatttgccactctctctgccttgggaccttgagtcatagtctcattcttcatctcaaacagtcttctgtctcattctgtccagctactgtttgtcc

SEQ ID NO: 703964 - DNA, 694 bp, Homo sapiens
ccaggaatttcaatgggatgtttttgagtttaggaagttaggctggctgcattccatgacatgcaagggagaggattttggagtagcacagaaaatggaaaccttggccgggcgtggtggctcacgcctgtaatccgagcacttcgggaggctgaggcggggcggatcacctgaggtcaggagttcgagaccagcctgaccaacatggagaaaccctgtctctactgaaaatacaaaatattagccggtgtggtggtgcatgcttataatcccagctactcaggaggctgaggcaagaaaatcacttgaacccgggaggtaagaggttgtggtgagccgagattccaccattgtactgcagcctgggcaacaagaatgaaattcgtctcaaaaaaaaaaaaaaagaaagaaagaaagaaagaaaagaaagaaaaaggaaaccccgagcatgcttttggcagaggtaggtgcagagaggctggagagcatggtaacccagaggggagggttctgtttttaccaagtcacaccactttccttcctccatacctgctaggctgagcctcagttgaatgtgagaaaaacrctatgggtgtgatatttgccactctctctgccttgggaccttgagtcatagtctcattcttcatctcaaacagtcttctgtctcattctgtccagctactgtttgtcc

SEQ ID NO: 703965 - DNA, 1550 bp, Homo sapiens
cccctggccacatctgggtgtgttctttgggctaaggcagtaaatcaccagttcatttaggaaggcattgtcggtgaactcagagggttctcctgggtgccaggctctgtgctgggcactggagggcaaagagggatgatccattctctttctccaaggtatttacaacttggattgatgatcttggcacctgagtttcttagtttgacctttcaataggtgtttggtagtgacctggggcccttttatcattgccagcacatgaatccaaggaggagactcctcggtgtgaccagagctttagttggggaggggagggtgttggggccttggaaagctgggcctttgacactttggctacgtcggggacttccacatcatccacatgaaggcagaggaacccagtggttctaagacgcatttgtatccagctttggkggaagagggaggtctggtcaaggaaaactggcgggggtgggcagatgggaccctgtgtaactgtcaaggtgtgtatttgaaggactgtacccttaatttgtgtaagacttcacctggtgctaccaccaagcctgtctgggttaaagaccctggattccagtccctaggttttcacaggtgtgttgctaatttattcccttccttttcctttgcagcttagtcttgatttggcaggaatgtgtaggaggggaaaatctaagcctttcatgtgactgcctcagttttgttctttgctgtatcttggtctcctggagcaggtttccttgtcttcgcttttgttgatgaggccgaatgagcatactgttcatccttacctgccagatacactctccccacaggctgttcccatttcagctcacaagatatggctgcatcccactctgggggtctggggtgggattctcaaacctcttctgaattctagaggtcagcctttactgtgttggtgttgatgacctggggtgggactggaagcaggttggtaacttgcaaaaaaggaagtattatgtttagagctaattcagctgtgtagatagggtgaactttgccacttactgctctcaggagatttcacttttgcagtaagacctggcaggcagcaggggctcttctctgaagacctgctgatttcctccacagcttcttcactatgaaactccagcacctgggtcattgcaacttggaaataacagactgtatcagccttgagtttgagaacttttgcttgtggtgggtgctgaaaatctgagtgtgtgagaatatataattcttgagggcaaggactttgatgtctttctgtgtgcctagagcctggaacaatgcctggcacgtagaagccattagctatttgttgattagtcaactagatagatgggagagcagcctcttagagcataggctgttgtactacttgagtccttatagtaccttcctaatgggtcatcttagctttggactctgttttcatctagtctgtagtttcttagaaaggtagagctgaaagggggctttgtagctcattcagtccaacccatttgatttacagattggga

SEQ ID NO: 703966 - DNA, 817 bp, Homo sapiens
tgcctggctctgctttatacagcagcccagtctttactggactagggcwctggggatgttcctgtcagggatcagtaacctcagagggggcttctgcagtgtcagtattctctctgtgttcacttgccactgctccttagagagttcatcattccctcccggagaagagctcagcggtccacttggtgcttccttagaaatcagcttgggggcagacaggtgtggcttccatagattcttagatgtgctttctggaattgaaaaggcaactcaatttatgctgtgactctcactacctttcacgtaactctgacaagctgtagggacctggaaaatctctatagatggtggcctagatatagccccagttgggggctgaggctgccctggaccctgttgagggctcacaactgtttgagatgcttgctttgggagcaagaaagccaagttgtgagtatcaccctgtcctttggctttttctcaggacttttctggaatgggatgtctatgtcttgttactgggcaagtttctgctctaggctggggaacaaactcttggacttgctgactgaggcactcttcctcctttttctcctccacgctcaagagtatggctttagggtagcgcagtgagaatgccatccccagaattggggcagtcactgagtggcaggaggatggtgatgccaccaagccaacagggcccttagtagagaagcccgagaatgctgaatggccggccaccttccaggcagtttcatttgaagcaggctagacattgcttagtagggatggaagcattttggacactgagccc

SEQ ID NO: 703967 - DNA, 1736 bp, Homo sapiens
caggaaatccttgtcagataatagagaatgggaggaccacaggattgccagcacccagcatagtcaagggacatcagaaaaacacagccctctctgcccacggcagcagccacactgggtgctcccagggtcctgggcagcaaactgacacattgcagtttctgccaaactagaatgtaccctgcaacaggaggtagggagggggtggggcaacagagctgcctccccactcattagggaggactctcttccactctgggtgttgcatgaggagttaaaaaaaatatgggagcaccttggctgcctcttgggtggctgagtacagctaggggtcagcgctgtgtgggcagaaggtagaggtagctgctcacctggcttctggatctttggagcacttagagaacagggaaagaagagagggggaggatgcaggagaaagggaggggagcgacccaggcaccagtttgggaatatactgcatcggatgtttaggttttgctttggcctcgtggggtggtgggggtggtttccggagtctgcagttaggacagtgccctgtgcgtgttttccctttttatgtccccatagcagcccaatctgaatttctgggacctgactagggaggccagagggaaatacagaggaaaatactctctttctgttagattctggtgggtttccttttccttccctggggacaggcccgagagtttggagctccccacaaggcttcagggggtgtcttattgctgaactcagaatggcagtttcccgtcttgcttaggactgatcagtggctcggacttcctgggagccgtctctctggtcttggcccagcctgtgctctgtggggtgaaggatgactctgaccccgctggatcaggctcctgcaggcatgcaggaatggagctgttgggaggcagagagcctagtgctcatctccatcttgggtcctggtgattggactggagtcctgtctgtcataggtggagggccagttggccccaagacaaacatgtctgtctgtgaacagtggactcgaatgggggttgtggagggtttgctggcctcctgcctacactaggcatgatgcctgaggagctggggtggggtactcccaaacatactgaggtttaccttgctaacttgcagaaaaggagttcggaaagaaagttactgccttgctgcttccagggctgctatttcccgcctgtcccatctcacatctgcccctggaagatgctgctattctacmaggccttatgtttgcattctgagcctgacacttaaaaatgcacccaaggaagcagcttgttaaggaattatgtggagtggcctcggcgcctgagctgcattcctgcagattcccactcccatcagctagcctgggctgagggagcgtttccaggaacttcagtgggatgcaagccggggaccgggccagtcagcctggactgcaaagtcttttgagcctccactctctctggttgcttcccttatttgcccccaggctgggaaacagtaaggagcagagggcacccactgggatggaggttgcagtgggaaacaaaacagccaagaggtgcagcccagggaaggtgccggggctgtcgagaaatggtgtcaaggcttggagggtgggcaacagccagccccttagaggccccagtctgatctgttgccagggagttgggctcttatcctggccctttctgtcctgtgtgagagagggaaaa

SEQ ID NO: 703968 - DNA, 589 bp, Homo sapiens
acctcagccagtctttccagcctcatcttccaacccatctgtgtgtccctgctcatggcagatgaccattcaatgtctgctcattgtgaatcagtgatgaagaccatctgaacaacaccctgtaaaggaacctttcccaactacattatctttccttcagaagcaagtctgttactgaaacagactgggaaggggagacaggaaagcaaaatccagtgacttaccaaagaaattcctctgttttctagcaatctatgctaaatctgaaattcagtctcaccctgctctgcccttcacaaactattccatctaagcaggctgattgggctgaccacagatctcatgaacaccaaggaatgagagtttataaacactgcatacattttcatttcagaatcccgggccttcactactgatagaatccaaacaggatcaaacctttaaaaaaaaagaagtatggrccggacacagtcgtcacgcctgtaatcccagcactttgggaggccaaggtgggcagatcacctgaggtcaggagttcaagaccagcctggccaacatggtgaaaccctctctacaaaaatacaaaaat

SEQ ID NO: 703969 - DNA, 589 bp, Homo sapiens
acctcagccagtctttccagcctcatcttccaacccatctgtgtgtccctgctcatggcagatgaccattcaatgtctgctcattgtgaatcagtgatgaagaccatctgaacaacaccctgtaaaggaacctttcccaactacattatctttccttcagaagcaagtctgttactgaaacagactgggaaggggagacaggaaagcaaaatccagtgacttaccaaagaaattcctctgttttctagcaatctatgctaaatctgaaattcagtctcaccctgctctgcccttcacaaactattccatctaagcaggctgattgggctgaccacagatctcatgaacaccaaggaatgagagtttataaacactgcatacattttcatttcagaatcccgggccttcactactgatagaatccaaacaggatcaaacctttaaaaaaaaagaagtatggaccggacacagtcgtcacgcctgtaatcccarcactttgggaggccaaggtgggcagatcacctgaggtcaggagttcaagaccagcctggccaacatggtgaaaccctctctacaaaaatacaaaaat

SEQ ID NO: 703970 - DNA, 487 bp, Homo sapiens
tgagaattataaaactatagcacttggcatagtgcctcgcacaaagtaagcattcaataagaactaggtgtgttgacttgtgaagtaggcattaagggacagtaatkatatagaggcccttgaaatcataggccacataaggatattaaggttagttgtactttattctctaaatcagtgtttcccaagcggcacttctcagtctttagtgtcatacaaaccaactgaagatcctgttaaaatgtaactctgcttccaggatggggcctaatatttgggttttctaagaagtttccagacaatgcagatactgctggtctagaaattacactttgaaaagcaaaaagctagagagccatagttctgtgagacattggtagttcagtacagaaagaagaaaagggctgcctgatcaaataaatttaggagatgacaaattcagcagaattccacaggtttcttctcttgggaatttctcagttctcta

SEQ ID NO: 703971 - DNA, 487 bp, Homo sapiens
tgagaattataaaactatagcacttggcatagtgcctcgcacaaagtaagcattcaataagaactaggtgtgttgacttgtgaagtaggcattaagggacagtaatgatatagaggcccttgaaatcataggccacataaggatattaaggttagttgtactttattctctaaatcagtgtttcccaagcggcacttctcagtctttagtgtcatacaaaccaactgaagatcctgttaaaatgtaactctgcttccaggatggggcctaatatttgggttttctaagaagtttccagacaatgcagatactgctggtctagaaattacactttgaaaagcaaaaagctagagagcyatagttctgtgagacattggtagttcagtacagaaagaagaaaagggctgcctgatcaaataaatttaggagatgacaaattcagcagaattccacaggtttcttctcttgggaatttctcagttctcta

SEQ ID NO: 703972 - DNA, 897 bp, Homo sapiens
acatcagcattgaatactacaaaggattgtatcagatataaatcaatagtcaataattttattaagaagtaaaaaccatccatttaaactgaattacagtgggaaaatatatttgtaaagaaggcttagaaaataaacaataacaataaactagaatgagattatttcaagcatatattttctaactattcgtaggtaaagttttaaaaattgaatggattctagtcctctaatccctgtcactagaaaatgactgacctacagcatgctttagtatcttttcttcacaataagagaataatattttaataatgacacacaataattgctaaacaggcttgatgggacagtaagcgtagttccacaaagatgccaagcagcctgcgtggcctggggcattatataaaaatgagctagccattcaagtagaatgtacctctgcaaggctgcaatattacttacattaaagggcccatcatcaaggggacaagggctatttccccaagtctaacgtggattggaaaaataaggaatactcatctgaaaccatattgtgtttgtgtttgggcatcactaaacactctgccgaactttggctgggcrtggtggcttacgcctgtaatctcagcactttgggaggacgaagtgggaggatcgccagaggcaggagttcaagaccagcctggccaacatgataaaactccatcgctactaaaaatacaaaaattagccaggtgtggtggtgcacacctgtaatcccagctactcgggaggctgaagcatgagaatcacttgaacctgggaggcggaggttgcagtgagctgagattgtctcactgtagttaagcctgggtgacagagcgacactccacctcaaacaacaacaacactatcaaa

SEQ ID NO: 703973 - DNA, 1553 bp, Homo sapiens
caagctgttctaaatagcttcgtctcagtttccccaaaaggggtacccaggcccctcctctgtgtgccccagctgcatcagccagcttctaggtggctccattgttttctgccacctgacaacatttttcctcaattactgtacaactactgtataaaataaaacaactactgtataaaataaactctctcttttccctggaccctcctactgtattctttcctctgtggcacccataccagcctgccagtcggagagcaagctagctacagtgcctggtgcagaaatggcaattagacccaagactccactataattaacaaggtatttgggggaagatccccttgtaagggctgtgtgctcttctcgcatgattttatctaatattttgctatttttttgtactcatttcaaccggacccaaaaaggaaaaaacctgaactgagtatttttaaaataaataactcaaagcaggggatgaatgaactggccaaatcccccttgcctctgctgcttcaagtcctgttcatgttctttaccatctccccaaagactttttgggttctatcatctatgacctatgtgttaagcatattccccattcaaaagtcagatagaataacatttccaaaaggaaaaaaggcaggaagggagtggagaagggcagtgtgctggtttggaggcaacctcaaaggttagaagtataataaggctaggcatggtggctcacacctgtaatcccagcactttcagaggccgaggcaggaggagcacctgagcccaggagtttgagaccagcctggtcaacacagcaagaccccatctctacaaactatattaaaattagccaggtgttgtggtgtgcacctgtagtcccagctattaggaggctgaggtgggtggatygcttgagcccaggaggtcaaggctgcagtgagccatgatcacaccactgcactccagcctgggcaacaaagcgagaccctcaaaaagtataaaatgcagtatcccctagggacttctagccccacgtgcacactttccaaaggggatgacctcagaggaggggcgtagtttcctcacttacgtcaaacaaacgggaagaagaagttaaagggcagcctggcattgatggctggtggagctctgaagcctgcctctgcaggtgcagacacatccacaaaagtaaccgcagtggaaataagaatcgtcctttcatttcctgagttggcctgtaataaacagagagatgcaaggcccaccctccagtgtgctcccagaatgacaacaatgagacacttttcattctcttcctcacccaactactgtcagttcatgaatctgataggtcctggagcactaattggccattaacttggatgagagaaacaattttaccagggtgtctgattaacacgtgaatatcataattttcatgagaattttaaagatccaatctgaaccagaatgctaatgtaagtagaaccatcgtcagtgtttctaagaatgactgctgaaatattttatgaacccccatggtttaaattataatc

SEQ ID NO: 703974 - DNA, 957 bp, Homo sapiens
tcagcctcccaaagtgttgggattacaggcatgagccaccatgcccagctgaagatgatgtctttaaagtcataattaacttaaatgaagtctttaggatggactttaatccagtgatactggtatccttgtaagaagaagagatttgggcacagacaaacacaaactcagagaagagaccatgtgagaacacaatgagaagatggtcatctgcaactaaagagagagacctcagaagaaaccaaacctgctgacatcttgatcttagacttctagcttccagaagtgtgagaaacaaacttttgttgtttaaactcccaagtctgtaggattttgttatggcagccctagaagactaatacagacaacatgtataacgtttatcatgtaataagatcacaataaatgttcatagttactgattttttattatttcatcaatattattttcaattaatttctaaaatcatttactgagtgtctactcccagattcttcgctatatgcttggggataccaatgtatgtaagacagtgtctaccctgcagtaggagagaaagggaagccagtttagaatayaagatataaaatagcttacttaaaagacaaaatgaggtatgtgccattagagaaatctatctttacaaccttttagttgcagtgtcaatgtctaaaaatggaagggttttttttttcataatttctttgatagcaaaacctgacctaaactgaactcattcaatggcaagatttggccttaagctattgtcttacttgatcccatttagtgtgaatatttttgtttctgtttgattggctgtttctttgctgcccccatgatgtggtggctctgtagtaatccatcactctgtctggcttcccccacttccctgtctcacttccttcactctcaatgcactgaaatttcacctccacaggaaagcatcaaaggttaat

SEQ ID NO: 703975 - DNA, 1274 bp, Homo sapiens
ttatttaaccaataattattattgaattattgaataattattattgaataataataatactttattgaataatttaactatttaattagataatttattagttaaataagttatttaagaaagtagtgttttcatatatactttatagttattgatctgtctttgcaggacatttaacagtacagtgtagcagaaagacactgaattagaaggcgggtcatctggtttcaatcttggctatgctactaatttcttgcttyggtaaaccctcctggtgtctacaggactttgttttctcacatataaaatgaaatgcctagaagtgaacaatccttaagctccctcatagctgtagaattctgtgtgatacctttaaatgttacaattttatttgatcacagacatttatagctgctttatctttgtctttacattattcatttcatcttatttggtactctgttcctgatcaagaattctatccccatcttacattgttcctatgggaaaacatgacctattttacaggaataaattgtataaagaaaaaaagactgtctacttatttattgaaaagtaaaatggaatttgtgattttcaactccattaccatattttcatcaaccatgtaagttaaacttcttactaaacatgagatggtttgattcaaaaatctccatttcaggggcattacatctacagcaggacaaggttctaagatcaatgtgtaaggcaaaatttgcatgcagtcaaaatcaccctggaaatctcttaaattgctgacaaaacagaacagtaagcacaggtcatgtaaatggtagtgtctcttactaaattcatctcatcatactttaaccccagcgttggagcagttttctgtttctgcaactagaagtagttaggagcattcagtgaccacattatatgaaaaagggtaggtctgtgtgtgtggagagagagagagagaaaatgaaagttgtttactccaaatatatcactgaatttgtgtatgttaaatgaacatatggtggaactcgaccttacgaattagcagtaacataagacctcccagaacgctatctacaagtaagtaactagggacattaccctattaaatttgaacacagtggctcattgttagtagactagctatctgctaaactccatttgctccttctctctgcaaatggtgagaccaacttattaaatgaattacacatttccaggtactattagaaaggaaaaatcattgtaggtaagaagtttaaaagatc

SEQ ID NO: 703976 - DNA, 1274 bp, Homo sapiens
ttatttaaccaataattattattgaattattgaataattattattgaataataataatactttattgaataatttaactatttaattagataatttattagttaaataagttatttaagaaagtagtgttttcatatatactttatagttattgatctgtctttgcaggacatttaacagtacagtgtagcagaaagacactgaattagaaggcgggtcatctggtttcaatcttggctatgctactaatttcttgctttggtaaaccctcctggtgtctacaggactttgttttctcacatataaaatgaaatgcctagaagtgaacaatccttaagctccctcatagctgtagaattctgtgtgatacctttaaatgttacaattttatttgatcacagacatttatagctgctttatctttgtctttacattattcatttcatcttatttggtactctgttcctgatcaagaattctatccccatcttacattgttcctatgggaaaacatgacctattttacaggaataaattgtataaagaaaaaaagactgtctacttatttattgaaaagtaaaatggaatttgtgattttcaactccattaccatattttcatcaaccatgtaagttaaacttcttactaaacatgagatggtttgattcaaaaatctccatttcaggggcattacatctacagcaggacaaggttctaagatcaatgtgtaaggcaaaatttgcatgcagtcaaaatcaccctggaaatctcttaaattgctgacaaaacagaacagtaagcacaggtcatgtaaatggtagtgtctcttactaaattcatctcatcatactttaaccccagcgttggagcagttttctgtttctgcaactagaagtagttaggagcattcagtgaccacattatatgaaaaagggtaggtctgtgtgtgtggagagagagagagagaaaatgaaagttgtttactccaaatatatcactgaatttgtgtatgttaaatgaacatatggtggaactcgaccttacgaattagcagtaacataagacctcccagaacgctatctacaagtaagtaactagggacattaccctattaaatttgaacacagtggctcatkgttagtagactagctatctgctaaactccatttgctccttctctctgcaaatggtgagaccaacttattaaatgaattacacatttccaggtactattagaaaggaaaaatcattgtaggtaagaagtttaaaagatc

SEQ ID NO: 703977 - DNA, 1274 bp, Homo sapiens
ttatttaaccaataattattattgaattattgaataattattattgaataataataatactttattgaataatttaactatttaattagataatttattagttaaataagttatttaagaaagtagtgttttcatatatactttatagttattgatctgtctttgcaggacatttaacagtacagtgtagcagaaagacactgaattagaaggcgggtcatctggtttcaatcttggctatgctactaatttcttgctttggtaaaccctcctggtgtctacaggactttgttttctcacatataaaatgaaatgcctagaagtgaacaatccttaagctccctcatagctgtagaattctgtgtgatacctttaaatgttacaattttatttgatcacagacatttatagctgctttatctttgtctttacattattcatttcatcttatttggtactctgttcctgatcaagaattctatccccatcttacattgttcctatgggaaaacatgacctattttacaggaataaattgtataaagaaaaaaagactgtctacttatttattgaaaagtaaaatggaatttgtgattttcaactccattaccatattttcatcaaccatgtaagttaaacttcttactaaacatgagatggtttgattcaaaaatctccatttcaggggcattacatctacagcaggacaaggttctaagatcaatgtgtaaggcaaaatttgcatgcagtcaaaatcaccctggaaatctcttaaattgctgacaaaacagaacagtaagcacaggtcatgtaaatggtagtgtctcttactaaattcatctcatcatactttaaccccagcgttggagcagttttctgtttctgcaactagaagtagttaggagcattcagtgaccacattatatgaaaaagggtaggtctgtgtgtgtggagagagagagagagaaaatgaaagttgtttactccaaatatatcactgaatttgtgtatgttaaatgaacatatggtggaactcgaccttacgaattagcagtaacataagacctcccagaacgctatctacaagtaagtaactagggacattaccctattaaatttgaacacagtggctcattgttagtagactagctatctgctaaactccatttgctccttctctctgcaaatggtgagaccaasttattaaatgaattacacatttccaggtactattagaaaggaaaaatcattgtaggtaagaagtttaaaagatc

SEQ ID NO: 703978 - DNA, 591 bp, Homo sapiens
attttggtacaagcagcacctaacagactgcttgactagatgctcaataaatatttgttgtatgaataaaggcaacaccttgtctkgacaagacaactggattagtaccacttcacaaagtcctctagaacttagtgccttaaaacaacaataatcatatattgtctctcatggattctgcaggaattcagagtggcttagctgggtggttctggctggggaattgcatgaggttacagtcaagaaatcagccagggctgcagccatttgaaggcttgagtggagttggaggaggcatttacacggtgtatcttccacatgcaggctgttgacagaaggtctcagttcctccccatgcaggtgtctctgaaggctatttaagtatcctcacaacatggcagctggcttcccccaaaagtggacaacataaaagagagcaaatggaagtggtgatattttttatgggctatctttagaggtcacagatcatgacttcttgccacatttggtgtgttaaaagtgagtcgctacctctggtggacattgaagtggcagggaattagactccagctttgaaaggagttgtgtcaa

SEQ ID NO: 703979 - DNA, 1374 bp, Homo sapiens
ttcacaatatttccaatagttttgcttcattttgttttgttagtaaataattcttgtttggctgcctgcgtatggctcaatgttggaggaataatttacccatgttgctgggcgagtcagttaatccctctttattccagtggtgctcaataggtctctattgtcccctgatattcaagaccatctgtaatggatccgaaaatgatctgagacatggatttttgaagtgatagctaaggtatttctaatgtttttgaagggtgatatgaaatggcattaagaatactgtactgaaattcaggacattttgggtttagtccttaaatctgacaatatcttaaaatgagatcatctttaatcctgctgtgtctcaagtttatcttttggaaaatgaagtttcctgtcaactaaacattttctggtttcttacatttccagtagtactgtgaaaggaatattttagagactccttctccccatttctctgtcatttcactgtgatacaccttgctatgaatctctttatgaaagttatttttctgggcaatctataggtcatgtaaatttggtgacatatgtcttagaaatcttctcatattatctgagcttcagaattttgatggagctggtcctaagtcatatgccctgaaagtatatggaggttaaatttagagaatcttgtttgtatagaagacaagactaaagtgcagtcttggattggcaatatttggagggaaattggctgaaaatttttctgagttgaaggagacatgagttctttgatagaaagtgcatttcaagtttcaagtaacttaaataaaataaatccacctcagagcaaaacttgcagaatatcaaggataaagagaaaatctcaaggactacctgatcccaaagaaagattaygttccaagaaaatgagatggccaatagacttctcatctaatcatagattccagacgatacgaagtaaatatcttcaaagtcctaaggggaaaatgactgacaaccttcaaatctgatcgctaggtaaatggttattcaagggtgagggtaaactaaagacattttctggcaggcattccacccacaatccctttttcagagaacaaggacaccataaagacaagtatacccagagggacaggagagatgtaaaaaacacggtgagcacagaagttaaaagatgttggtaaatttaaaggaacaattcgactattaaaaataatagcatcttgtgtttaaaaataagaaataaaagctagataggaacaactttatggaggtgggaaatgttcaagtgttccagggtcattgtcttgtctgttaagaggggggataatattaagtgatttagactctgttagaaaaaca

SEQ ID NO: 703980 - DNA, 1374 bp, Homo sapiens
ttcacaatatttccaatagttttgcttcattttgttttgttagtaaataattcttgtttggctgcctgcgtatggctcaatgttggaggaataatttacccatgttgctgggcgagtcagttaatccctctttattccagtggtgctcaataggtctctattgtcccctgatattcaagaccatctgtaatggatccgaaaatgatctgagacatggatttttgaagtgatagctaaggtatttctaatgtttttgaagggtgatatgaaatggcattaagaatactgtactgaaattcaggacattttgggtttagtccttaaatctgacaatatcttaaaatgagatcatctttaatcctgctgtgtctcaagtttatcttttggaaaatgaagtttcctgtcaactaaacattttctggtttcttacatttccagtagtactgtgaaaggaatattttagagactccttctccccatttctctgtcatttcactgtgatacaccttgctatgaatctctttatgaaagttatttttctgggcaatctataggtcatgtaaatttggtgacatatgtcttagaaatcttctcatattatctgagcttcagaattttgatggagctggtcctaagtcatatgccctgaaagtatatggaggttaaatttagagaatcttgtttgtatagaagacaagactaaagtgcagtcttggattggcaatatttggagggaaattggctgaaaatttttctgagttgaaggagacatgagttctttgatagaaagtgcatttcaagtttcaagtaacttaaataaaataaatccacctcagagcaaaacttgcagaatatcaaggataaagagaaaatctcaaggactacctgatcccaaagaaagattacgttccaagaaaatgagatggccaatagacttctcatctaatcatagattccagacgatacgaagtaaatatcttcaaagtcctaaggggaaaatgactgacaaccttcaaatctgatcgctaggtaaatggttattcaagggtgagggtaaactaaagacattttctggcaggcattccacccacaatccctttttcagagarcaaggacaccataaagacaagtatacccagagggacaggagagatgtaaaaaacacggtgagcacagaagttaaaagatgttggtaaatttaaaggaacaattcgactattaaaaataatagcatcttgtgtttaaaaataagaaataaaagctagataggaacaactttatggaggtgggaaatgttcaagtgttccagggtcattgtcttgtctgttaagaggggggataatattaagtgatttagactctgttagaaaaaca

SEQ ID NO: 703981 - DNA, 2179 bp, Homo sapiens
tggagactacatccagtgtagcatataagtgagttttcttcaggaattccctaaaaattwaaaaatttcatacaaaagtatgttgtgaagatcgttgctttcagtctcaacaaccagtcactgctcacgcatcttaaacatgcttgaaacaggacatcttttcctttcatgaatgagccttgttctttcatacctgaaccttcaccatggggggcgtgctcttctcctccatctctgcctatgagaaatctacccagcaatgaggcttagtgacaatacccaccactctctttgtgaagccttccctggtagcctttccctgaaccgtgtaagtcagaggtcagcaaactacagcccacaggccaaatccagcctattgcttagttttataagttttattagaactcagtcacactcattcgtttatgtattgtctgtggctgcttttgggtctacagtagcagagttgagtagctgcaacagagaccatatggcccacaaagcccaaaataaattatgctctggctctttacagaaaaaaacatgctgacccctttctcccctcagagattacatagtctaccttgtgcatctttgacatctccttctgttagagtcacttctgcacaacttttttcctggcaagaacgatctcctcttgtagacatagattctgcctttttcatccttgtttctatccttgggcctagcaggggtagggctcagtagttgttggggacaatagattgcctgtaaaaaaattttttaaactacattttgctcacttggctaagtgacaaaaatcttatataaagcagtgttccctttagggggttagtgcttatcatttgatgtttctggtagtaaaccatttcatgtttcacttcgagaagcgcttttttgactgccaagataagctgcaaaattgagtccaaggatcttaagaaataatattcctaagccatttaagcagctcacttggtgatctcatttaataagtggtccactgaaatttaggattgcagagtatactttttcattatgcatgggtttcaccatgtgaggtagatatctagttcctactcagctatttttgttgactgcctagggtatgataatatttgaccatgctactctcttatgaaaaatgccaaatagttaaatttgttttaggaaaaccagagattcctctcttgctcctaaaggagaaaccaaatgaccctgggtttctttcttttttttttttctttctaaaacccaagaagtattgatgtcatgtcctcctgcgaagtgcattagctgtccttgcctttgctgctttagtactggggaatgcctctgtcagacagtgagctcatgagtgcaaggactctgtcttttaatttctgaatcctcagtgtttggcacagagaaagctcttgacaaatatttattaaatgaataagtcaataaataattgaagatctcagaaagaaccttttccccaaggtattacttttaaactataaacttacaattgcctacttctatctagttcacatccttaaatatcacttgggagaatttcctgttgtgatgatatagagtttatgtctagctgtgggaggtcaagggtgggctacgttgtgcctaagtccacagaacacaaggaaaacccttaaacttttgtgaggtgaccggaaataaatatctgcttcctaagtatttccctgagtgagaatgtaaaggtttaagataaattaagtatcacagggtgagacaaagtgagaaattcaggatttagattggcattcagagcagggagggaaaaaaagatgacccaaattgacacaaaatgagaaaatcttgggaaataaaagtaaacggtagcaaatgtgatgtatttgagaaccttacaaggaggttttcagtatgttccagttgatttataggatgtagaaacattaagtgttaaaatggaaaggggtggattttcaagactctcacagtgagggttcagttaggaatcagaattccaacaaacaaacagattttaataaagatgttacaaaggagaggctgggttatggaaattgacaagagatggtgaagcacccagggtctagcaagggtgaggagcctttataaaacatgcctcaagaggcaagggcaatattggagccgcgcaagagcaggagcc

SEQ ID NO: 703982 - DNA, 609 bp, Homo sapiens
tgggattgctgggttgaatggtagttctgtttttagctctttgaagaatctccacactgctttccacagtgattgaactgacactcccaccagcagtgtctaaacattcccttttctccacaactttgccaacatctgttattttttgactttttagtattaataatagccattctgactggtgtgagatggtatctcattgtggttttaatttacatttctctaatgattagtgatattgagcttttaatatgcttgttggccacatgtatgtcctccctcaamgtgattacactagcaacatggaatctttacctttgagaaatagcatcctaaaattagaagaacaacttgacaaattaaaacagaagaaattccaatgtgtacttgttctctcttcacttggtcaaggacccccatgaatttcatgtttgctggcatctcaaaaagtgctgtctgaataccacagatttggcagcatctctactactaattcaataccagtggtaatgtatgctgctggtacccagaatgatcctcagccaaacggacagtgcctacctctcaccaccttcacagacctcagccaatgactgactgacgtggggg

SEQ ID NO: 703983 - DNA, 651 bp, Homo sapiens
ggcaaacacaaatctaatttctgtctatagatttttctattctggacatcatctcatgtaaatcatacagtgtggggtccttcatcactgacttctttcacttaagagaatgtgtcagcattcattcatgcagcagataaatccatactttccttttcatggctgcataatatttcatygtggggattgaccgtgttttgtttacccattcatcctctctctgatggacacttggattatttcaatttttgggccattgtgaataatactgctatgagcatttgtgtacttcttctgtgtgggacatgtgttttcctctcttttaaggttgatgttttcattccattggatagtaggtttgtttgatgtagagaatagacagttctgtgtggagaatttccaaaatgtcatggaccagtgggaaagatttttttttcctttggaacagattggccatagtagaaaatcatgcttttctacctcagctgagcattttctgcttctgtgggtcattccagtcccatctgattgacaatcccatttcccagtgggtcctcctcccccaggccaagctccacccagcccccctcattcttccctgaagacctggagggtcacctgatggtccttctccactccatatggctccaa

SEQ ID NO: 703984 - DNA, 651 bp, Homo sapiens
ggcaaacacaaatctaatttctgtctatagatttttctattctggacatcatctcatgtaaatcatacagtgtggggtccttcatcactgacttctttcacttaagagaatgtgtcagcattcattcatgcagcagataaatccatactttccttttcatggctgcataatatttcatcgtggggattgaccgtgttttgtttacccattcatcctctctctgatggacacttggattatttcaatttttgggccattgtgaataatrctgctatgagcatttgtgtacttcttctgtgtgggacatgtgttttcctctcttttaaggttgatgttttcattccattggatagtaggtttgtttgatgtagagaatagacagttctgtgtggagaatttccaaaatgtcatggaccagtgggaaagatttttttttcctttggaacagattggccatagtagaaaatcatgcttttctacctcagctgagcattttctgcttctgtgggtcattccagtcccatctgattgacaatcccatttcccagtgggtcctcctcccccaggccaagctccacccagcccccctcattcttccctgaagacctggagggtcacctgatggtccttctccactccatatggctccaa

SEQ ID NO: 703985 - DNA, 588 bp, Homo sapiens
gttaaacttcttacacggcaattggctctgcccagagagagcattctttaagagaaagaaaatggggctggccagggcactccctctgccatgctggtttttttttttttctttctttctttatgagacagggtcttgctcagttgtccagggtacagtgctgtggygtgatcagagctcactgactcctgggttcaagtgatcctgccaactcatcctcctgagtagctgggaccataggtgtgtgccaccatgcctggctaatgtttaattttttttgtagagaagggacctccctatgttgcccaggctggtctcaaactcctggactcaagcgatcccttgcctcagtctccctaagtggtgcaattacaggcatgagccactgcaccaggcagccccaacctcccaggctcagggatcctcccagcttagcctcccaagtagctgtgactacaagcatgtgccactgtacccaactgatttttaaaattttttgtagagatggggtcttgaactcctgggctcaagccatcctccctcctcggcctcccaaagtgctgggattaccaccatgctcttttgaca

SEQ ID NO: 703986 - DNA, 582 bp, Homo sapiens
cataaaacagaagaaaatgcttctaataaactttcattactgtctctcacagattgaaactaggaagtttcgtggctatgggtgaattgcttttacctcatatttatgtagaaacatttttgaaaatgttagtgatctaataataagacacctgagagagtaaaacaagaccatgttgattagattagaggcaaagctaaaaaagtaatagcctcattatttttgtgctaagcatcaccagaataagtgacccttgcatccagcagctgaataaatttttttgttgccattgcaaagtaagacatgttgcatttgttttctacagtttcaraagtgggcctatttttcatgcctgttattttgacataagcctcaattttaatagtatttcaagaaaaatacgttttgggaggattatttttattattgataggattctgacaatgattgatgattgatacttctaacccattcataaatgcttcagtgctttgattgcctttggaagtaaaactaagacccaaggtgaaatattttattcctttgaagcatggcttgggcctataagaacaaaactcaaat

SEQ ID NO: 703987 - DNA, 1330 bp, Homo sapiens
  misc_feature 1229, 1230, 1231, 1232, 1233, 1234, 1235, 1236, 1237, 1238,1239, 1240, 1241, 1242, 1243, 1244, 1245, 1246, 1247, 1248,1249, 1250, 1251, 1252, 1253, 1254, 1255, 1256, 1257, 1258,1259, 1260, 1261, 1262, 1263, 1264, 1265, 1266, 1267: n = A,T,C or G
  misc_feature 1268, 1269, 1270, 1271, 1272, 1273, 1274, 1275, 1276, 1277,1278, 1279, 1280, 1281, 1282, 1283, 1284, 1285, 1286, 1287,1288, 1289, 1290, 1291, 1292, 1293, 1294, 1295, 1296, 1297,1298, 1299, 1300, 1301, 1302, 1303, 1304, 1305, 1306: n = A,T,C or G
  misc_feature 1307, 1308, 1309, 1310, 1311, 1312, 1313, 1314, 1315, 1316,1317, 1318, 1319, 1320, 1321, 1322, 1323, 1324, 1325, 1326,1327, 1328: n = A,T,C or G
ggacaaaattcaacccaatgcaggaaccaggaagtcttaaataagtatttcttgagggcttgctatgtgtctggcactcttagctctccaaatgggcattgtcactgccactcctattcctgtctacctctccctaccaagcaccagagcccctctgccatcttcttggggagcagctagaccactaatacaggggtgcctttcagattccaggggtacgtggggtcaacgggaaacagacaaaactatgtctctctctattttgtaatcggttcagtaaagaaagtacagaagcagtgctgtttgtgcccaagaatcttacagaatctttcataacctagctacttccttttttacctctagtcttcattcacctgagggcataaatgtgattgaatgggtgggacctggggcaaggacaaagttaaatgaaacacttaggatatattcagggatgaaaacaaataaaaaggcagcaacaaaaaagcattctctgaccttgtggttttaaaattggcttgaacttgttttcccagtgtcttctcttgggaaagagcatcaggctctcttttcaatggactcttcttgctctgtgcctgtgttccgtttgtactcactattatgtaattagtaacattcagccttctggacaatcagcttcacctcagactatcagcactatctctcctgtgtgacgtgcccgtggatttcaatattgagcaaatgcctaataccatattttgaaactgcaagtcccaatgaagacagcactcaattttaacataacagcttctaaaaaaggactgaaaatgataatgattattgagagctaactgcttctagacgctatagtgagttatatatatacattatctgattagatcctcatgaaaatatatatatactttatatatatatactttatatatatatatatatagcgttgttatgtccaatgcacagcttagcaaactgatgtaacttccatgaaaaactgatawaacttacatgaaaaaaggcttgataggccggtgcactcacgcctgtaatcccagcactttgggaggccaaggcaggtggatcatgaggtcaggaaattgagaccattctggctaacacggtgaaaaccatctctactacaaatacaaaaaactagccaggcgtggtggcaagtgctcgtagtcccagctacttggcacgctgaggcaggcccaatcacttgcacctgnnnnnnnnnnnnnnnnnnnnnnnnnnnnnnnnnnnnnnnnnnnnnnnnnnnnnnnnnnnnnnnnnnnnnnnnnnnnnnnnnnnnnnnnnnnnnnnnnnnnaa

SEQ ID NO: 703988 - DNA, 1110 bp, Homo sapiens
cagcccactgcaacctctgcctcccagattcaagcaattctctgcctcagccttcaagtagctgggattacaggcacccatcaccacgcccagttaatttttgtatttttagtasagacagggtttcatcatctttgccaacctggtcttgaactcctgacctcatgatacacacctcagcctcccaaagtgctgggattagcagcataagccaccgtgcctggcatctattatttctttttgagatttcttgttgtcaattagacttttaattctccaactcttacatttagttttatattttacatctttttgcctctctgctgcactctgggtattaattatttccattcattagtttgttcattctcttcttaccttaattttttagtaacccattcatttaggttttcctagtaataatccttttttttccttgaagttctatttgattatttttcaaattttcttgttcatttattgtagattcctgttgcttcatcatttttgttatttttatttcatatttttaaattgtacacatttattttatgttttatattttaaatcatttacattctaggccagttgacttatttttctactaggtcaactggcctagaatgtaagcgatttaaaatataaatgctagcttgtttccttgttggtttcataagttttattgtaaatgcaattttgattgattgaagtcatggggatccctgtagcctaagtgatgctctcattcctttacttcttctaggaggtatggggggtgctactgaagaggggacattttagggccctttcagtgtcccaggtttagtgagggaggaggagttctaaatacagttctcccattttgccactgacttgcagcttagtctttagatagtagcatgtattgtataattatcttcaggataatgccacatttgcattcattactgttcctgctcatatatttgccttccaactctttttgaaaggagggttgataatttcctttatttcctgctagtcataatatgtaataagattctgtttcacacagggtctaattccacatttaaaatggaagaagctctaccgtcttatgatgaaaataaa

SEQ ID NO: 703989 - DNA, 1110 bp, Homo sapiens
cagcccactgcaacctctgcctcccagattcaagcaattctctgcctcagccttcaagtagctgggattacaggcacccatcaccacgcccagttaatttttgtatttttagtagagacagggtttcatcatctttgccaacctggtcttgaactcctgacctcatgatacacacctcagcctcccaaagtgctgggattagcagcataagccaccgtgcctggcatctattatttctttttgagatttcttgttgtcaattagacttttaattctccaactcttacatttagttttatattttacatctttttgcctctctgctgcactctgggtattaattatttccattcattagtttgttcattctcttcttaccttaattttttagtaacccattcatttaggttttcctagtaataatccttttttttccwtgaagttctatttgattatttttcaaattttcttgttcatttattgtagattcctgttgcttcatcatttttgttatttttatttcatatttttaaattgtacacatttattttatgttttatattttaaatcatttacattctaggccagttgacttatttttctactaggtcaactggcctagaatgtaagcgatttaaaatataaatgctagcttgtttccttgttggtttcataagttttattgtaaatgcaattttgattgattgaagtcatggggatccctgtagcctaagtgatgctctcattcctttacttcttctaggaggtatggggggtgctactgaagaggggacattttagggccctttcagtgtcccaggtttagtgagggaggaggagttctaaatacagttctcccattttgccactgacttgcagcttagtctttagatagtagcatgtattgtataattatcttcaggataatgccacatttgcattcattactgttcctgctcatatatttgccttccaactctttttgaaaggagggttgataatttcctttatttcctgctagtcataatatgtaataagattctgtttcacacagggtctaattccacatttaaaatggaagaagctctaccgtcttatgatgaaaataaa

SEQ ID NO: 703990 - DNA, 829 bp, Homo sapiens
attttatctaaatctacattcaaggacaataaatcatcttgggtggtgaaatacttgatcaaggctaaacttgtttttctggctctgttaagtatgtgacatgtaatctgtgaccatggctaaatatttgtgcactacaaataaaaacaacacaccaacaatacttgaattgagaaaatacctagttttatagaaattttaggctctcagaattaatgttttctttctttatgaacacttcacaattgttaacccattagtaaatgcgaatgatctgatattaggatggcttccattggtctctcactaatattaggcttttgaattatgatatgaaatgcactgcttttagaattttcctacagaaaaaaaaatcaatttagaatgtctcgatcacacagaaaacatagtgatttattattttgtaagataagattggccacagctatttctaatatgacttcatagatggcattttgttttttcacatccaggatatccaggaaaataaaaaataataacctaattgcctgaattattcaacacggaaataatatttgagtttgaagctttgaaatacttctaaattatttctttatcttaacaaagataaaataaataaaacatttggaatcattagaaaacctaacaaatccatacaaactaagggaatgaattatgagattattcaagagagttgaattattttttcaagggtcakggttgctgtaagtgcttaagccacttacaagttgctaagttgaggtttggctttagatacaataaatatggtatgaaatatttctttgcatacaaataagttatatgt

SEQ ID NO: 703991 - DNA, 1750 bp, Homo sapiens
aaatgaaatgaaacaaacaaaaaaacattttgtttccatgaagcagatccaaaatggtttcacctctaccagaatgtgaagggaaaggagagcccttgggaaaagctgtcctcaggcagagcatcgcaggctcctgaatcaccacctggccagaacccggtgttcagttacatcccagctacaggagagggcaacaggcaggcagtaaaggtgagtcagctgccacctttacttctacaaaggaccatatcattcccttcttgagcatgtggacactctagaattcctctttcatcatctactcttccacatacttatttaaatgtgtgatctcaatttcattttttaaagcacaggaaaagggctagaagatactaaactgagaagactgcttatttctaaatggagaggatcacagattttctagcattttcaaaatttatattataatcacaaaatgttatttcataaaattttaagaatgtctttgctcacagcataagttatctcaagagttagtgtctttagtcctgtaccatgtgactagctctttaatttcaaaaccaaatataggaaatccataagattgagtcaaaatttttataattatactctacctactgaatatcttctgtgttttgcacgtcttttgtgacatacatgttatttcaccaaaatcctattatcccattttgcagacaagcaaactgaaactaacagaagttgtgtgtctggccccctgggtgatgaagatgagaacagacacacagcatgtcttgtaccgagcattcttctatgtgcttcaggtatataaatgcatttagtcctcccaataaccccatgacataggttcttttatcattcccctttacagatgcaaaaattgaggtacaaggcacttcagtaacttacccaaggtcatgcctccattaagtgggaaaggcaggttagaagccaaagggtctgtctytggagtgtctgttctttgtcaccatgtacttcttggcagaaatttaatcctataggcaacaatttctattaggatattcattatataatattcgatacacaccaaataatgtgatgagtatgtatattatgaaggaaacataaaaagaacattatcactacttttgaagctacctgagtatttcttctattgccttgaatttttttatttaccattttcttgctttctgaatggttttattacatacagatgtatatataaatactatatcatttagttttgtatatttacaaacattataagcctgttaaaatgttgtatatagtcttctgaaacttgctttttcccaagatttatccatatcctttgcatatacaactccagtttatttgcactactgtataatgccatcatgtgaatataccataatttacttttatccattcttttagtaaatatttgggatttttgcttgttactaatatgtacaatgcttgtatgaacattcttagaaaattctagtacgtttgcaagaattttgtagagtgcatacctaggaatcaaattgctgagctgtagagtcaaacagttcacatgtgcacgatattgccaaatcgttttccaaagtggttggacattttatagttctaacagtagttgtccacatccttgccaacatttggtatttccagactgtaaatttttgaccaactggtggatgtaaattatatctcattatgatctttacgggtatttcccttattttttatgtagtttagc

SEQ ID NO: 703992 - DNA, 1750 bp, Homo sapiens
aaatgaaatgaaacaaacaaaaaaacattttgtttccatgaagcagatccaaaatggtttcacctctaccagaatgtgaagggaaaggagagcccttgggaaaagctgtcctcaggcagagcatcgcaggctcctgaatcaccacctggccagaacccggtgttcagttacatcccagctacaggagagggcaacaggcaggcagtaaaggtgagtcagctgccacctttacttctacaaaggaccatatcattcccttcttgagcatgtggacactctagaattcctctttcatcatctactcttccacatacttatttaaatgtgtgatctcaatttcattttttaaagcacaggaaaagggctagaagatactaaactgagaagactgcttatttctaaatggagaggatcacagattttctagcattttcaaaatttatattataatcacaaaatgttatttcataaaattttaagaatgtctttgctcacagcataagttatctcaagagttagtgtctttagtcctgtaccatgtgactagctctttaatttcaaaaccaaatataggaaatccataagattgagtcaaaatttttataattatactctacctactgaatatcttctgtgttttgcacgtcttttgtgacatacatgttatttcaccaaaatcctattatcccattttgcagacaagcaaactgaaactaacagaagttgtgtgtctggccccctgggtgatgaagatgagaacagacacacagcatgtcttgtaccgagcattcttctatgtgcttcaggtatataaatgcatttagtcctcccaataaccccatgacataggttcttttatcattcccctttacagatgcaaaaattgaggtacaaggcacttcagtaacttacccaaggtcatgcctccattaagtgggaaaggcaggttagaagccaaagggtctgtctttggagtgtctgttctttgtcaccatgtacttcttggcagaaatttaatcctataggcaacaatttctattaggatattcattatataatattcgatacacaccaaataatgtgatgagtatgtatattatgaaggaaacataaaaagaacattatcactacttttgaagctacctgagtatttcttctattgccttgaatttttttatttaccattttcttgctttctgaatggttttattacatacagatgtatatataaatactatatcatttagttttgtatatttacaaacattataagcctgttaaaatgttgtatatagtcttctgaaacttgctttttcccaagatttatccatatcctttgcatatacaactccagtttatttgcactactgtataatgccatcatgtgaatataccataatttacttttatccattcttttagtaaatatttgggatttttgcttgttactaatatgtacaatgcttgtatgaacattcttagaaaattctagtacgtttgcaagaattttgtagagtgcatacctaggaatcaaattgctgagctgtagagtcaaacagttcacatgtgcacgatattgccaaatcgttttccaaagtggttggacattttatagttctaacagtagttgtccacatccttgccaacatttggtatttccagactgtaaatttttgaccaactggtggatgtaaattatatctcattatgrtctttacgggtatttcccttattttttatgtagtttagc

SEQ ID NO: 703993 - DNA, 1227 bp, Homo sapiens
actgaagaaaatgcacaattttgaaaagaacaatagtggaaaatagagaggggcaagagatagagaaatctaatctggttgtctataaatcatgactcaaattttacttcctccttgatgtatgctctgcctcttcaactgatagtaaataaaagattaataatatatctatatagcaattaaaaacagaagtttctctttaagtgcctgtcctatagctcttacatagcactcgtcattttctgctatgtagtttttttcctttctataatccactggtaactctttaattaattagatttttgtatccctcataagcatctactagagtgtgtaactcattaacacagtgtttcaataactaattgttgtacaacaaaccactctatactaatggagtaaaataacaatcttttgtaattattctctctcatggttctggggataactaagtggttctcacttgggggtctctcctgtggttgcagtcagggaacatctggaggctccttcctgcacatctctggagtgtgatgttggctcctggctgggacctcagccgggactgccctccacaatacacatatgtgacttctccatgcggcttgggcttcctcaggggatggtggctgggttccgagagcaagtgtcctagaaaagagctgggcaggtgttataatcctttttatgatctctgaagtcatgcagtagtattcrgtaacactctatttattagaattaagtcactaaggccagcccatattcaaggggcagggagtttagactccatgtcttgatgagaggagtgtcaagggatttgaagatactacacatataaatgctaattagctgcttgttttaagcatttagtgtattttgaaaaagcctcagaaagaaagagaatgagagtggtacacagtcttacaaggtctgaatagaagtcaggaataatgctaaagagtcaattaaccataaaagatgctacccatggctgcttatttcgcaagtgtttgtgatcttcttttacaatctctttttaggagataaaattgagctattttgtctagaaaggtgtagtaggtcagtgcttctcctactttatgggcacacaaacttctcgggatattgttaaaatgcagattctgattcagtaggtctgaggtgggcatcacattctgcatttctaggaagctacaggggggatactgcagctccatgagccaccca

SEQ ID NO: 703994 - DNA, 992 bp, Homo sapiens
tagagaacaaacttaaaagcctgacagagaaggaaagcctgacattatctttaatactgacatattattacaatcagaaccataaaacaatagaatgacatgtttaaagtggtgaaaggaagaaaacttttaacctatcattctctacacagcaaaaatatcttacataagtgaagatgaaatcaaaatgtttttcagacagagaatttgttgccaatgcacttgaaataaaataaaactaaatgaaattcttcagccagaaataaaatgattataaagagaaacaacaaaattcagtaaagaatgaagagagccagaatcagtaaatatatcaattaaaataattgactattaatcagacaaaaaaccccaccatcttgttgagtttaaagtattcatagaattaaaatgtatgacaataataaggtcaaaggcaggaggacaaatggagtcaaagtgttgtaaggtactactattattgaagaaatggtaatgttgaacagtttgattagactaccaggtccaagttgggtgttctaatgtccaaggtaattgttacgataatggtaaaaatacacctatcaagttgatagcagaaaaaaagatgtaataaaatatttggctgattcaaaagaagaaaaaggaaattcaaacagatgggagatagaaaataggtagtagttgtaaatccagctatatcacttattacattaaatgtaattggaccaagtaccctatttcaaagaaaaaagtcatactaaattaaaaacataacctaaaaatgtgctatttacatgagacattttcagtataaggatataaaaatcactttggaggtggctarcgtaatatttagatttagaaagaaagtaagtaaaagaaataaattaagccttcaactgaaggatactccttttttaattgtataaaacatgtaccctttcccaacaaactgcaaacaagacagcagacttagatggtttttacatttg

SEQ ID NO: 703995 - DNA, 917 bp, Homo sapiens
atatcagtgaataccttgtcttggtggagaaatatctattgttttccccactgtgttcttaaccatcttctaggctttctctggttccccctatttcagatacaagacctcctacaaatcctttaatattttgataagattaatacgttgcaagatttctatttttaatgcccctctgcacactgtacatgatggtggtacagtatcaccttactattctctttttttaagataagctgcacaaaagattagagctatgtatccattacagatttagtttcttggagagaagtactggggtctcctgcaagactcttgcttaaaacatagaagattatcttgcaaagtcttgtttcatctgttctttgttactcctttttagtcctagaggtatttttttccagtgtaaccagttcatacagtatcctggtgtgtccgttgttgctctttgggagtattctaggtatttggatgggacagttctttcattgtgcaggactgatctgtgcatcgcaggatgtttggcatcccttctccttccaaatactggttgccaatagcactgcttagtcattgtgatgctaaaaaaaaaaaaatgccctcaccttttctgaactcctccccgcctgtggaacacagtaccacctcaggttgaggaccaatacaggtaatttgaattatttgcagtctctgcccatacacaaacattttatttgtataattagcctcttactcttgtaattgggatatttcaaatatatatagttgagaatctcttctcacttttctgcatcctgaaatgttgtcccgggctctgtaattctagctctttacattatatgacayggattgtggtaatttttcaattcttctgtttttgtttatcattactcttcatgttgttccactgttgcaat

SEQ ID NO: 703996 - DNA, 646 bp, Homo sapiens
ctattttattctatgggttaaataaataactatagttattaattgggttgctccaattttgcagctttggtcattgggggttctttcatgtcagtgcctatgtcctttgacatgcactcttactttttgaggactttctaactttttagtgccaaagttgctccaggctcatcttgtactatagctaccccagatttgaaatcagctacttcaaagagcatttgaagaactgatatttaaataccaagatatgagtcctaggtgtgctcattgctactgggttgtcattaatttcaagctctctcaccaaacaaagcttggaawtatatgtaccatactgaccaagagctaggcatttaatccatgtatttttactcccccaaacaattcctgcccctgctctgaaactggatgataatctcataggattcatacattgggaagaaatatggaaagaacaagtcaattacataaatgattaaaacagaaagaataaaataagggcttgttatcttttattatgttaaaaactagcagacgtactttacactgagaagaactctgatatactttaaattatactccctgtgtatctgataaaaccttttaaacttgttgcctttactttcttatcgaagaaatgggg

SEQ ID NO: 703997 - DNA, 1937 bp, Homo sapiens
atttaaccatcaaaatatatcaatcattttttaagaagttcctcagtatttctttcacattttaataaactaagttagattctttccccaaccaagaaagtagaaattagagatgactcatctttctatttgaatacccctagtcaccaacaaaatagatactgaaaaagaaaagccataataaatagtagttatcactattgttataacacaagttgagtatccctaatctgaaaatctgaaatgctccaaaatctgaaactttttgagcaccaacatgacaccacaaagtggaaaactccacacttgacctcatgtgatgagtcacagtcaaaaagcagtcaaaacttggctgcatacacaaaagtattaaaaaattacataaaactatcttctggctatatgtataaggtgtatataaaacaaataaattttgtgtttaaacttgagttccatcctcaagatatctcattatgtatgcaaaaatattccaaaactctagaaaatctgaaatttcatataagggacactcaatctgtacagataagggatactcaatgggaaacaataaagaaacacaaaaccaattgattttatcaggcaaattactactttaaaaaaaaagcagaaagcaaaagtgtcaaatctcatcattattatgtagggatttacccctcttttgtactaaaagaaatgaagtgattggctgggcgtggtggcttacgcctgtaatcctagcactttgggaggccgaggtgggtcgatcaccttaggtcaggagttcaagaccaacatggccaaaatggagaaaccctatatctactaaaaatacaaaattagccaggcatagtggtgcacacctgtaaccccagccagtcaggaggctgaggcagaagaatcacttgaacccaggaaggggaggttgcagtgagccgagatcatttgccactgcactccagcctgggcaacagagtgagattctgtgtccaaaaaaaaaaaaagaaaaaagaaatgaagtgatttccctgcttccagttttaccctagttcaatcagtcttccactgaggctccaaaataatttttctaaaacaggaatctaaytgtcacttttctattttaaaaagtgtctatggctgcctcatgttgcctagataatttaaacttatcagaagggcatatcaggcccactccatatcattccaaacttgaaatttgagcttcctttcttcccatggccctcccccttgtttcctactaaatatgattaaaaacaaaaacagctgacagtcccaaaaggcccaggacctttaatcccaaggtttcctcaagcttcaatacattttcagaatgaaaatccctctaagccagaataaggggtcagtttatggatgagtttgttataatggttacaaacgctaactttagtgtcagaatctgaattaactcctagatctgccatttaccagatgtgtaacaaccttctttgtacaagttaattattcttcaagaatcataaatccctcttctgtaaaggggggaaataacagtaactatccaagcgttactatgagcatgaaatgataatgcaaagagcttagtggccggcacaacaggtgagcattcagaaaatgtgagctattattaccagctcccttcccctaaactctataagcctagagttaaattcttactgcagagaaaattatatttgcttacatggggcctccgcagctacagtctccattcttcaaggagagggaccaggttttattcatccttggtatagcaaactgtatgttctttttttttttttttttagacagtctcgctctgttactcaggctggagtgcgatagcgcaatcttggctcactgcaaccttcgccccccaggttcaagcgattctctcacctcaagcttcccaagtagctaggact

SEQ ID NO: 703998 - DNA, 1937 bp, Homo sapiens
atttaaccatcaaaatatatcaatcattttttaagaagttcctcagtatttctttcacattttaataaactaagttagattctttccccaaccaagaaagtagaaattagagatgactcatctttctatttgaatacccctagtcaccaacaaaatagatactgaaaaagaaaagccataataaatagtagttatcactattgttataacacaagttgagtatccctaatctgaaaatctgaaatgctccaaaatctgaaactttttgagcaccaacatgacaccacaaagtggaaaactccacacttgacctcatgtgatgagtcacagtcaaaaagcagtcaaaacttggctgcatacacaaaagtattaaaaaattacataaaactatcttctggctatatgtataaggtgtatataaaacaaataaattttgtgtttaaacttgagttccatcctcaagatatctcattatgtatgcaaaaatattccaaaactctagaaaatctgaaatttcatataagggacactcaatctgtacagataagggatactcaatgggaaacaataaagaaacacaaaaccaattgattttatcaggcaaattactactttaaaaaaaaagcagaaagcaaaagtgtcaaatctcatcattattatgtagggatttacccctcttttgtactaaaagaaatgaagtgattggctgggcgtggtggcttacgcctgtaatcctagcactttgggaggccgaggtgggtcgatcaccttaggtcaggagttcaagaccaacatggccaaaatggagaaaccctatatctactaaaaatacaaaattagccaggcatagtggtgcacacctgtaaccccagccagtcaggaggctgaggcagaagaatcacttgaacccaggaaggggaggttgcagtgagccgagatcatttgccactgcactccagcctgggcaacagagtgagattctgtgtccaaaaaaaaaaaaagaaaaaagaaatgaagtgatttccctgcttccagttttaccctagttcaatcagtcttccactgaggctccaaaataatttttctaaaacaggaatctaattgtcacttttctattttaaaaagtgtctatggctgcctcatgttgcctagataatttaaacttatcagaagggcatatcaggcccactccatatcattccaaacttgaaatttgagcttcctttcttcccatggccctcccccttgtttcctactaaatatgattaaaaacaaaaacagctgacagtcccaaaaggcccaggacctttaatcccaaggtttcctcaagcttcaatacattttcagaatgaaaatccctctaagccagaataaggggtcagtttatggatgagtttgttataatggttacaaacgctaactttagtgtcagaatctgaattaactcctagatctgccatttaccagatgtgtaacaaccttctttgtacaagttaattattcttcaagaatcataaatccctcttctgtaaaggggggaaataacagtaactatccaagcgttactatgagcatgaaatgataatgcaaagagcttagtggccggcacaacaggtgagcattcagaaaatgtgagctattattaccagctcccttcccctaaactctataagcctagagttaaattcttactgcakagaaaattatatttgcttacatggggcctccgcagctacagtctccattcttcaaggagagggaccaggttttattcatccttggtatagcaaactgtatgttctttttttttttttttttagacagtctcgctctgttactcaggctggagtgcgatagcgcaatcttggctcactgcaaccttcgccccccaggttcaagcgattctctcacctcaagcttcccaagtagctaggact

SEQ ID NO: 703999 - DNA, 627 bp, Homo sapiens
ggtggagaaggtttgtaccacaaaagtacttgggtgggaaaagtaggatgcagctacacttcagaaagattaggaggatggataaagagaaggacaagagattggcaatactttaggatgaatatgtagcagcgggttctgtggaatggggttaatagcagtgcttatccctaaggatcacygtcaaagttaaatgagatacaccatcataaagcacttaacggaactgcttgtccaccacactacgagttatcagtgttagctgctaccaaggttacgattctgcaaggagaataatttaaacagatcaagtgctgacagaccctcacggagacttgggggaaacaaccacacttcagggacaaaaccaaacagaagagcagcagacagcagggaagcaggagaactaggctaatttggtgtcaagaggtccaaaaaaggtaagaatttcggtaagtagggagcggacagacaagagatagatcaacagaaggcggcctgggcaaagttaaaaggaccgacgggttgggaagtcacggagatgtcagcgcgcgccgttcccaggaagggagagactgggagagcaaacgcggagtgaaaggaaagaacagaacaagtcagaacggg

SEQ ID NO: 704000 - DNA, 733 bp, Homo sapiens
cgtgagccaccgcgcccagccttttactgtattgttttatttgatatcggttaatttttatttaaaattatttaggaaaacaaaataatacattagtaattttctatctgtttttatattaaagaaaagaactgtgactcaagatttacagataaaayatggttgacctttaaacaatgtagtgattagaggcactgactccctgcccagccgaaaatcctcaggtaacattttactccccctaaacttaactactaatagctgactgttaactgaaagcacattaattatatatactgttgattaacacatttttaatgttatatgtactatatgctgtgttcttacaatcaagtaagctagaacaaagaaatgttattaggaaaatcatgaggaagaaaatgtgtttattgttcattaagtggaaatgaaccatcataaggatactcatctgcctggtcttcacattgaacaggctgaggaggaggaggaagagaaaaggttgttctttctttctcagggatggcagatatataagaggtggaggaagtgtaaagggagtaatgagagacaggcacacttggtgtatctttgtgtaaatacttcacaatttctgtttgacatttttgctttttcatgtctctaaaaatgtttctatatggtaccaatcctcattccattgtttgctttagtttcggtgcccgtatcatagaaagatccattcactaaagaa

SEQ ID NO: 704001 - DNA, 733 bp, Homo sapiens
cgtgagccaccgcgcccagccttttactgtattgttttatttgatatcggttaatttttatttaaaattatttaggaaaacaaaataatacattagtaattttctatctgtttttatattaaagaaaagaactgtgactcaagatttacagataaaatatggttgacctttaaacaatgtagtgattagaggcactgactccctgcccagccgaaaatcctcaggtaacattttactccccctaaacttaactactaatagctgactgttaactgraagcacattaattatatatactgttgattaacacatttttaatgttatatgtactatatgctgtgttcttacaatcaagtaagctagaacaaagaaatgttattaggaaaatcatgaggaagaaaatgtgtttattgttcattaagtggaaatgaaccatcataaggatactcatctgcctggtcttcacattgaacaggctgaggaggaggaggaagagaaaaggttgttctttctttctcagggatggcagatatataagaggtggaggaagtgtaaagggagtaatgagagacaggcacacttggtgtatctttgtgtaaatacttcacaatttctgtttgacatttttgctttttcatgtctctaaaaatgtttctatatggtaccaatcctcattccattgtttgctttagtttcggtgcccgtatcatagaaagatccattcactaaagaa

SEQ ID NO: 704002 - DNA, 672 bp, Homo sapiens
atagggtttaaagtgaatagtacaagaaggctgtatggtttgtatcatacagcaatagatatttccacttaaaaatgtctaaatagaaatcataaaccaagtgggatccggcaaagcacagaaacatttgaacaagcaatatcaaatgaacatatctatagtaataggaagcctctatgttttaaatagccttgaggattccaactgtacaggatgatgatattttccctgtgctaaaatgagaactggaacagacaataaaggagaccgtctggagatattgcctttactactgaatttattatatcaataatcagcaaaccaaaacagcttacttcatacaagaaataaaatgctcccaaagaacttattcaactgatttaaagaaataaaaagttttctgatagcattaaccattctgctacctctgccgaagggttatatggatattcagcattaagtacygacaaaggaacctgaacactgcattctgaaatgttttcttctctctagaatactgatgatattgtatgaaggtgcagtctagctacctggaagcaaggaaatatttttttaaatggatgtagttgaatatgaaacttaaatcataatgagaaatcttattattcataaaatgggaaagttacaatatttttactttcctggtaaata

SEQ ID NO: 704003 - DNA, 2580 bp, Homo sapiens
ttgggcatggcatagtcatttggacctaaaaattgatcaagttttgcagaaacctggtatttttcatgttaagtatgttcaagaaaatatccaagaatatcttagttttaataaatagaatatactttgttgaagatttaaatatatataatatgttctactttgaagtatatttaatgttgtacttatagtcttggattgactcaatacaattttgatataggtaaagttaaagctttcccaacattctaattgaatgaagggccaaaaactcagttattttgtgaatttaagtaaatatgttatctgtatcatgattatttgctctgataatctcataacaatgtgtcattatgtcatctgtcaaaactttgaagcattaaaaggggaaggaattccccagaaaccttacaacattccaatatagtatattgatgtaaaatgggctgtggaattaatataattgactgaaacataagcaagttggataaccattctgttaatgtatccacctgcaaacgtatctaacttccaccttgttgagaagtatacatagaagtaccgtgttgcgatttccttggcattgctagggtgaagaggtgcttgcattacacttcaaatacttttgtctcatctgtccactcctctctttgcccaaactctttaaagtcagttagtatttcgcaattctcattaatgactaattattgaatgcaaactttaactgtatttcttcatgtctgagatttatagaattgttggaattttattttaattgtaaaaagctatgaatacatgtcttccctaatgataataaagacgttttgaacaattcatgtctttgagtcaattgtttttaatgtgctcttaatgtttaaatgaataacgacattatctaaatatagcaatatttaatcaatagggttatgatttattagattttattagacaatattttaatattaaaaatccctttttaaaaagcttagtgcaaaaatacaaagcaaatgtatatgcaagtctcactatgtcacatgtgtcatgtaaataaaaacttttaaagatcaaaccaattatacacacttcaaatgtctcctagcatatttcttcataaccacatcattctcccatgtcttcctacccagttataataataaaatgcattaattttcaaatttctatttaaacaaccaaacaaagctttcatgaagtgcaaaattttcctgtaaaaaagaaaggaatattgtgmaactgtaaacctggcacgttgtcttcagtttcagtttttgttttttaccatatcctttataaaaaatgaatgtacatatctttggagtacctttcaggagcttcagtattcttttttgaaattttggatttgctatccatttttctagacaaaatggacgaataataggttttcatcagttagataacaatggaataaatctgcgaggacactgacatgttgatattgtgcccaaattgagttcaactcaaaaatcttactgtactaattctgaatgactcatgactctatttttcatactggtaaaaagcaaataaaatagtattttgtcttctactctaattggacatagaatggatacttaatttttcaagtactttaagttaaagtaaataaaaaaacaaagttaataatagtagcttatattgattctgatataaatatgacgtgtcttcatgctaaccaaccatatctaccttcttacaagattaatctctatataactggttattgttattgctcatatttttttaattcctaatcaaattttaaaaattgtcttgtgtagtatgcatttgattatctttttctggaattcagtacttttttagttctccagaagccaatttaatgttaagatatttcccatgaaattggtaatttttttggaaaatgtatctgagatgagtgaagagaaaagcagaaaagcatttttatgaagcaaaattttgaaagagtttaaatatacggttcaaaggcaaaccatagagtaaaaggtagatggcaaccataatagtgctgctaatttaaccaatttttcctaccattgtcaccaaaacttaagctcatcacatctattacttttaacccctcacttgttctgtcctgagaagcatggtgacattgtacttcctgaacaaatgaaactcatggaaagctcttagcctttgtctttccttgttctcccttccctacctggaacatccttctatttttaaactaatctggaagttttttggttttaagcaacgtaatgctaatttgaaccagctaagaaaaatggaagttcaaaaaaaattaaaccaaagaaagttgaaggattgaactagatttcaggaattaacaaataatcttgaaaaaaaaaaagatctgttttttctttccattgcatatctgcttctccttttatgtcgtcttatgtcctttccattatttttgactgacattgtccctggattttgaaataagtctctcagcagatttttgacgaatatttgttagctttgcttttgacatagactcagtattatctgcaatatcaagtttaagat

SEQ ID NO: 704004 - DNA, 2108 bp, Homo sapiens
ccttcatttggaaagttaaaatttaatataaatgcaaagcgttcaatgtaaagattagtctcgcaaaagaaargagttttgtagaagctgtcagtgagtctatgtatgaaaaacacttttactcagaataatgcttttaaagttagaataattgacagattattgtttgctgattaatttaaataacccaaattatctaatttttactgtgtaaaaaaatccttttaggccgggtgtggtggctcatgcctataatctcagcactttgggaggctggggtgggtggatcatctgaggtcaggagttcaaaagcagcctggccaacatggtgaaactccatctgtactaaaaatacaaaaaattagccaggcgtggtagcgggtgcctgtaatcccagctgctgaggcaggagaattacttgaacctgggaggcggaggttgtagtgaacagagatggtgccattacactccaatctgggtgagagagcgagattctgtctcaaaaaaacaacaaaaaaagtgtgtatatatatatatatatagctttattttgaaatgcacatggcaattttaactgttttaatatagaaaatgccatcctaacgctttcaagatgcttggacttacctgtattttcacaagctgtgaagtgtatttacagagttagttttgagctgtttgggagatattcctttatcttggtgtcaaattattttgtttgtatttttgtgttttacttaagatccttcaggtcttgctttaagtaaaaacttcttgtcctatagggcaattgaattttgtcatgggtatttcatagctaatgattgtacattggatattgtttgaagcaagaaaaatgaagaactatttaatgaataaaggctctatttgtttttattctaaaagcttactgtggtatgtagggaaagggtcatattttaattaaggccattagtagctattgattaactttcattggtatttcaagagtatgtttaactttttgtatttgtgtgcttcttattaagaagcttaactcaatgaacatgtttttatttagaatatagccagttataaaccctccatttgctattcatacaaacattgtggtcagaagttcgaatcttctatcacttgcaattaaggcattagttactgtttgatggaaagaagcaaactgaccaatccaaatctttgcttattgtatatttaacattcctatgtgtacaccttctctgaagtgccaaggaggaccctgaaaaacatctctggacatagttcagggttgtagggaaactcgttcctagcatttacagcaatagtgagcaaattgccaatacttgggcagaagaacatagagaagtcctataaaatttaaaatttaaactttaagtaaaagcttattattattgtttttactcaaattataaaatacaatacttttctattttaaaagtacataataaagatacttaacactttttgaacaactatatcaagaattttaagtatgaatgtattctcattatcttcatcctatagctgagcaaattgaggcttaggaagataagacagctgggtattggtttattctttagggaatgagaatacatagaaagtctttaaaaaacaactaaccaaccaaccaataaacaaatacaccagaggatagcatgattagagctaatatagagagagacctctgagggcattgtgtaagaatcttgtttgaaagaaagtacagagactattgggtggcccaaacagtaggaggtaattcagatctgtatagcggcagtagtacagaaaattgagaagaaagtgtagatacaagaaacatcaaagttcagcttgacgtaattgatttcctttgtgttgagagcaaaagaggatgaaatctacttaactttatagtagactctttgaagttttttcctgtttactctgacgtctactcaaagggccagggaactcaataaatataaatacattgaaatgaagctgcttttaacaccttaaaaatttaatgtgatttttccccttagatagatctataattaacaaatgtgggttgatttaatatgaaatggataacattatttgtctcc

SEQ ID NO: 704005 - DNA, 2108 bp, Homo sapiens
ccttcatttggaaagttaaaatttaatataaatgcaaagcgttcaatgtaaagattagtctcgcaaaagaaaggagttttgtagaagctgtcagtgagtctatgtatgaaaaacacttttactcagaataatgcttttaaagttagaataattgacagattattgtttgctgattaatttaaataacccaaattatctaatttttactgtgtaaaaaaatccttttaggccgggtgtggtggctcatgcctataatctcagcactttgggaggctggggtgggtggatcatctgaggtcaggagttcaaaagcagcctggccaacatggtgaaactccatctgtactaaaaatacaaaaaattagccaggcgtggtagcgggtgcctgtaatcccagctgctgaggcaggagaattacttgaacctgggaggcggaggttgtagtgaacagagatggtgccattacactccaatctgggtgagagagcgagattctgtctcaaaaaaacaacaaaaaaagtgtgtatatatatatatatatagctttattttgaaatgcacatggcaattttaactgttttaatatagaaaatgccatcctaacgctttcaagatgcttggacttacctgtattttcacaagctgtgaagtgtatttacagagttagttttgagctgtttgggagatattcctttatcttggtgtcaaattattttgtttgtatttttgtgttttacttaagatccttcaggtcttgctttaagtaaaaacttcttgtcctatagggcaattgaattttgtcatgggtatttcatagctaatgattgtacattggatattgtttgaagcaagaaaaatgaagaactatttaatgaataaaggctctatttgtttttattctaaaagcttactgtggtatgtagggaaagggtcatattttaattaaggccattagtagctattgattaactttcattggtatttcaagagtatgtttaactttttgtatttgtgtgcttcttattaagaagcttaactcaatgaacatgtttttatttagaatatagccagttataaaccctccatttgctattcatacaaacattgtggtcagaagttcgaatcttctatcacttgcaattaaggcattagttactgtttgatggaaagaagcaaactgaccaatccaaatctttgcttattgtatatttaacattcctatgtgtacaccttctctgaagtgccaaggaggaccctgaaaaacatctctggacatagttcagggttgtagggaaactcgttcctagcatttacagcaatagtgagcaaattgccaatacttgggcagaagaacatagagaagtcctataaaatttaaaatttaaactttaagtaaaagcttattattattgtttttactcaaattataaaatacaatacttttctattttaaaagtacataataaagatacttaacactttttgaacaactatatcaagaattttaagtatgaatgtattctcattatcttcatcctatagctgagcaaattgaggcttaggaagataagacagctgggtattggtttattctttagggaatgagaatacatagaaagtctttaaaaaacaactaaccaaccaaccaataaacaaatacaccagaggatagcatgattagagctaatatagagagagacctctgagggcattgtgtaagaatcttgtttgaaagaaagtacagagactattgggtggcccaaacagtaggaggtaattcagatctgtatagcggcagtagtacagaaaattgagaagaaagtgtagatacaagaaacatcaaagttcagcttgacrtaattgatttcctttgtgttgagagcaaaagaggatgaaatctacttaactttatagtagactctttgaagttttttcctgtttactctgacgtctactcaaagggccagggaactcaataaatataaatacattgaaatgaagctgcttttaacaccttaaaaatttaatgtgatttttccccttagatagatctataattaacaaatgtgggttgatttaatatgaaatggataacattatttgtctcc

SEQ ID NO: 704006 - DNA, 1227 bp, Homo sapiens
tatttttatacaatattctatttctcaaacttattttgacatgaaaaacactataattagaaaatgtaatggtagacaactcatatttattatttaattaataaaacrggtagcttcatttgtttttctaagtgcataaaattgtgatacagaaagaattttagtggacatagtagagctgatcctggcttcatcaatgtcaacatttgaaacagctaaatgcttgtagattattgcatatgtaaaaatcaccaaatttaaaatttaagcagtgtctaaatcacgctcttaattttgaaagtgtactatgtatgcaagaaaataaatgtgctttaagaatctgcatgctactttgctgtctgcaacttgttacttttattatctttgagtcatatctaaaattatctacatgtattgaaaattgaggaacaagtagaccacatatatagaagtatagtcaactgtaataaatttaaaatattttgacaggttgaaaaccatttacaaaattattaagataataaaatgcatcttaaattctaaactattactgattccatacatgatgtagaatttccaaggttgaattttacttctgaaagggaaaaacaaacaaacaaacaacaacaacaactatgtactagaataaaatttgactactaagccgggtgggtgcggtggctcacgcctttaatctcagcagcttgggaggccaaggcgggcagattgcttgatgccaggaatttgagaccagcctggccagtatggcgaaaccccatctctactaaaattacaaaaattagttggctgtggtggcgcaggcttgtaatctcagctactcgggaggctgaggcatgagaatcatttgaaaccaggagtcagaggttgcagtgagatgggatcgtgtcaccacactctagcctgggagacagtgagaaggtctcaaaaaaaaagtctattaaataactatggttagacatttcttaacatatatggtgtaacaatacgtgaaaatctaaataatccttaccttcctatccttctataagtatcactgcagcacattatataacgtacataaaaaattaaataaagcaaaataactcaaacatgtaaaaagaataactcatgaaaatgatgaccaatattcatattaacacgataaagtaaaagacagccaacttgaaatattaaacttatatttggcaagtatgcataattatgaaa

SEQ ID NO: 704007 - DNA, 593 bp, Homo sapiens
tctctctgatagtttttcacatgatgtgaaaagggatggagaaagcaattgagctccaacagcctgagaacaaagctctggccctctcctctgcccttggctcccctgggtacccacaggctctggggctccattattcctgctccagaaagtacattagcttcatggagaaaccacttggtccctctcagtggctccctgtgggttgctggtcatttgggacagacattagtggcaagattttgccagtccatctaggctgttcaatsaatgctaactatcatcagaagactttattagagagttcctggtttttgtttcattgtaagtctttctacatgaaaattataaaaagaaaacagatttaagagatttactgtaaaaaaatattaaaaaatgaatgtaaatagaacccacaatcacacctttaattcataaatactacatcatagtatatatcttattatgaggactttaaaaaaacatatggtcttggaactaagagaaaacctggaatggtaccatattgctttaaatgaaaaatgctggccaggcacagtggctcatgattgtcctcccaataatttgcagca

SEQ ID NO: 704008 - DNA, 593 bp, Homo sapiens
tctctctgatagtttttcacatgatgtgaaaagggatggagaaagcaattgagctccaacagcctgagaacaaagctctggccctctcctctgcccttggctcccctgggtacccacaggctctggggctccattattcctgctccagaaagtacattagcttcatggagaaaccacttggtccctctcagtggctccctgtgggttgctggtcatttgggacagacattagtggcaagattttgccagtccatctaggctgttcaatgaatgctaactatcatcagaagactttattagagagttcctggtttttgtttcattgtaagtctttctacatgaaaattataaaaagaaaacagatttaagagatttaytgtaaaaaaatattaaaaaatgaatgtaaatagaacccacaatcacacctttaattcataaatactacatcatagtatatatcttattatgaggactttaaaaaaacatatggtcttggaactaagagaaaacctggaatggtaccatattgctttaaatgaaaaatgctggccaggcacagtggctcatgattgtcctcccaataatttgcagca

SEQ ID NO: 704009 - DNA, 828 bp, Homo sapiens
ttgtttaatctatgattattttgaaataaacatcaactccataattctctagggcagaagcacaaagagatagttgactttaattttgttttccttcaatatgtatggagcacacaccactgttaatccatcataagtgaatgtttaggattacttytaaaggataggggaaattttctaccaggttatagttttgaagttgaatctatttgatgtcaatgtgctgaaaagtcttgaaaactctaaaaagaaatcatgtcccttgcagaaacatggatgcagctggaggccattatcctaagcaaattaacgcagaaacagaaaaccaaatactgcacgttttaacttataagtgggagctaaagaagagtacacatggacatatagaagggcacaacagacattggggactactagttgggagatagtgggaatggggcaaggactgacaaaatacctattgggtactatgctcattacctgagtgacaggattattcgtacaccaaacctcagtaacatgcaatttacccatgtaacaaacctgtacatataacccctgaacctaaaagttgaagactaaaaaattaaaaataatgaattttcatggtcacaaaaataatgatttttcttctctgcagggaaaatcaccagaaaatgggcctcatggattcaatatgtcttttattctaaaaaaacacccactttactgaggagtagcattgctattttagtctgtattcacatgcaaagagacacatggactagctacaatttcttttaaaatcaggcatcaattgtctacaatgttttaggatgtttgaaataa

SEQ ID NO: 704010 - DNA, 828 bp, Homo sapiens
ttgtttaatctatgattattttgaaataaacatcaactccataattctctagggcagaagcacaaagagatagttgactttaattttgttttccttcaatatgtatggagcacacaccactgttaatccatcataagtgaatgtttaggattacttttaaaggataggggaaattttctaccaggttatagttttgaagttgaatctatttgatgtcaatgtgctgaaaagtcttgaaaactctaaaaagaaatcatgtcccttgcagaaacatggatgcagctggaggccattatcctaagcaaattaacgcagaaacagaaaaccaaatactgcacgttttaacttataagtgggagctaaagaagagtacacatggacatatagaagggcacaacagacattggggactactagttgggagatagtgggaatggggcaaggactgacaaaatacctattgggtactatgctcattacctgagtgacaggattattcgtacaccaaacctcagtaacatgcaatttrcccatgtaacaaacctgtacatataacccctgaacctaaaagttgaagactaaaaaattaaaaataatgaattttcatggtcacaaaaataatgatttttcttctctgcagggaaaatcaccagaaaatgggcctcatggattcaatatgtcttttattctaaaaaaacacccactttactgaggagtagcattgctattttagtctgtattcacatgcaaagagacacatggactagctacaatttcttttaaaatcaggcatcaattgtctacaatgttttaggatgtttgaaataa

SEQ ID NO: 704011 - DNA, 613 bp, Homo sapiens
taattactcctctctttgcttggaggcttaccagcatgaagaatctgaaatgaccaaaagacagtccatagctttaggttcagtgaaaccattgtagtgccctttggtaaaaacatttcatcccttggtgcaataccttatccattaccttggcgtggtggaatatcctggaatgccctagaccattggactacgaaaaatgttattgatgtgacagacatattaatcrttgtaaggttaatctctaactttctggcatgcatgtttatttccaaggtgctatagattgaatttgtcctcccaaaattcatgtgttgaagtcttaacccctaatgtgatggtatttggagacagggcctttgggagataattcggtttagatgagttcatgagggtagggttctcatggtggaactggtgcccttataaaaagagacacagagggcttacttcctctttctcttcctccctctccctgccatgtgaggacacagtgaggtttgccatctgtaagtcaggaagagagccctcaccagggaaccagattggctagcatcttgatcttcaacttcccagcccccagaactgtaagaaagacattccttttgttgaa

SEQ ID NO: 704012 - DNA, 613 bp, Homo sapiens
taattactcctctctttgcttggaggcttaccagcatgaagaatctgaaatgaccaaaagacagtccatagctttaggttcagtgaaaccattgtagtgccctttggtaaaaacatttcatcccttggtgcaataccttatccattaccttggcgtggtggaatatcctggaatgccctagaccattggactacgaaaaatgttattgatgtgacagacatattaatcattgtaaggttaatctctaactttctggcatgcatgtttatttccaaggygctatagattgaatttgtcctcccaaaattcatgtgttgaagtcttaacccctaatgtgatggtatttggagacagggcctttgggagataattcggtttagatgagttcatgagggtagggttctcatggtggaactggtgcccttataaaaagagacacagagggcttacttcctctttctcttcctccctctccctgccatgtgaggacacagtgaggtttgccatctgtaagtcaggaagagagccctcaccagggaaccagattggctagcatcttgatcttcaacttcccagcccccagaactgtaagaaagacattccttttgttgaa

SEQ ID NO: 704013 - DNA, 1452 bp, Homo sapiens
tctaacgtttccatactgagaaacccaccaaggaccaaatgttcccatatccctactgctattcaactgacattaatgatttctagatatgcaaactccttgagcgcaggaggtttttttggctttggttttgatgtctgtacccacctactggacataacctgacacagaacctctcaataaaggcttgcagaataaaagaattaggttacttttttccagccaagttcttctcttcccaacattgagttattgagtttcaagcatagagtctctcagtgaaacaactctgcagcccagagtgcaactaccctaactcacccataaataaaacatattgtctatcaaatgagcctcttcaatgtaacctgttaaatagcatttataggaaaaacccgggattcagcgtttgtgggaatggctaaaatcacatggagagtgatgggacacagactaaagctcaattctcttaacctccaattcaatgatgtttccctatcccaaggcaactgtcttatctactgtaacttcacaggacttccatatgtcaacagaactcaagatatttctccagaaaaagccatggtagagtttctgtgattcagaaagcagccatgttagaagcttctttgtgacttcttgattttattaagttctcaagtcatagcattaatactttaccagtttagcaatataaggccatataaaataacactgccaataatttgcttgtaaaaatttatttttcttttgatatttcttttgataaaatttagaggccaggcacagtggctcacacctgtaatcctagcactttaaaaggccaaggcaggcagttcacttgaggtcagcagttcaagaccagcctggccaacatggtgaaactctgtctctactaaaaatgtgaaaattggctgggcatggtggcgcacatctgtaatcccagctactcaggagggtgagacatgagaatcgcttgaggccagggggcagaggcagcaatgagctgagattgcaccactgcactctagcctgggtgatagagcaagactgtgcctcaaaaaaaaaataataaaaataataaaatttagaaccagaaaattgcaattgaccactaataatgcagcaaatactgatctctttttcttctatgtttgaygattagccaaagtatcttagagctatcacgtaatgtacctcatttagtaaatgacagaactatagcgcaaagaggttagatggttcattcaaggttagtgagctaatcagaggccagtccaccagttaagcttaattcaaaataatataatttggcaatactgttcatctgaccaattttttgagcacttagtgtatactaggagctgaactgaagatatcagaattaataggagccatcctaacccctcaataagcacacagctaagtgaggaagaccaaacccataccaac

SEQ ID NO: 704014 - DNA, 1452 bp, Homo sapiens
tctaacgtttccatactgagaaacccaccaaggaccaaatgttcccatatccctactgctattcaactgacattaatgatttctagatatgcaaactccttgagcgcaggaggtttttttggctttggttttgatgtctgtacccacctactggacataacctgacacagaacctctcaataaaggcttgcagaataaaagaattaggttacttttttccagccaagttcttctcttcccaacattgagttattgagtttcaagcatagagtctctcagtgaaacaactctgcagcccagagtgcaactaccctaactcacccataaataaaacatattgtctatcaaatgagcctcttcaatgtaacctgttaaatagcatttataggaaaaacccgggattcagcgtttgtgggaatggctaaaatcacatggagagtgatgggacacagactaaagctcaattctcttaacctccaattcaatgatgtttccctatcccaaggcaactgtcttatctactgtaacttcacaggacttccatatgtcaacagaactcaagatatttctccagaaaaagccatggtagagtttctgtgattcagaaagcagccatgttagaagcttctttgtgacttcttgattttattaagttctcaagtcatagcattaatactttaccagtttagcaatataaggccatataaaataacactgccaataatttgcttgtaaaaatttatttttcttttgatatttcttttgataaaatttagaggccaggcacagtggctcacacctgtaatcctagcactttaaaaggccaaggcaggcagttcacttgaggtcagcagttcaagaccagcctggccaacatggtgaaactctgtctctactaaaaatgtgaaaattggctgggcatggtggcgcacatctgtaatcccagctactcaggagggtgagacatgagaatcgcttgaggccagggggcagaggcagcaatgagctgagattgcaccactgcactctagcctgggtgatagagcaagactgtgcctcaaaaaaaaaataataaaaataataaaatttagaaccagaaaattgcaattgaccactaataatgcagcaaatactgatctctttttcttctatgtttgatgattagccaaagtatcttagagctatcacgtaatktacctcatttagtaaatgacagaactatagcgcaaagaggttagatggttcattcaaggttagtgagctaatcagaggccagtccaccagttaagcttaattcaaaataatataatttggcaatactgttcatctgaccaattttttgagcacttagtgtatactaggagctgaactgaagatatcagaattaataggagccatcctaacccctcaataagcacacagctaagtgaggaagaccaaacccataccaac

SEQ ID NO: 704015 - DNA, 1452 bp, Homo sapiens
tctaacgtttccatactgagaaacccaccaaggaccaaatgttcccatatccctactgctattcaactgacattaatgatttctagatatgcaaactccttgagcgcaggaggtttttttggctttggttttgatgtctgtacccacctactggacataacctgacacagaacctctcaataaaggcttgcagaataaaagaattaggttacttttttccagccaagttcttctcttcccaacattgagttattgagtttcaagcatagagtctctcagtgaaacaactctgcagcccagagtgcaactaccctaactcacccataaataaaacatattgtctatcaaatgagcctcttcaatgtaacctgttaaatagcatttataggaaaaacccgggattcagcgtttgtgggaatggctaaaatcacatggagagtgatgggacacagactaaagctcaattctcttaacctccaattcaatgatgtttccctatcccaaggcaactgtcttatctactgtaacttcacaggacttccatatgtcaacagaactcaagatatttctccagaaaaagccatggtagagtttctgtgattcagaaagcagccatgttagaagcttctttgtgacttcttgattttattaagttctcaagtcatagcattaatactttaccagtttagcaatataaggccatataaaataacactgccaataatttgcttgtaaaaatttatttttcttttgatatttcttttgataaaatttagaggccaggcacagtggctcacacctgtaatcctagcactttaaaaggccaaggcaggcagttcacttgaggtcagcagttcaagaccagcctggccaacatggtgaaactctgtctctactaaaaatgtgaaaattggctgggcatggtggcgcacatctgtaatcccagctactcaggagggtgagacatgagaatcgcttgaggccagggggcagaggcagcaatgagctgagattgcaccactgcactctagcctgggtgatagagcaagactgtgcctcaaaaaaaaaataataaaaataataaaatttagaaccagaaaattgcaattgaccactaataatgcagcaaatactgatctctttttcttctatgtttgatgattagccaaagtatcttagagctatcacgtaatgkacctcatttagtaaatgacagaactatagcgcaaagaggttagatggttcattcaaggttagtgagctaatcagaggccagtccaccagttaagcttaattcaaaataatataatttggcaatactgttcatctgaccaattttttgagcacttagtgtatactaggagctgaactgaagatatcagaattaataggagccatcctaacccctcaataagcacacagctaagtgaggaagaccaaacccataccaac

SEQ ID NO: 704016 - DNA, 1146 bp, Homo sapiens
ctaaatctatgcctttaatttttaaaattattatcagaaaatagctgcatgctgttacaatctacttacttagtttrcatatgcatattgagcatttttgctaaattagagcaaacttttaaactaacatgtctgtgttccatgaaattctaaggtaggaagttattttatttgaatgaaaatttttcgacatccttattaataattggttacaggttacatttgtttttactttacaactaaaaaaaaaatgccacataagagccatttactccaaggcagaggaaaataattatctacttattacaaaatcaaaatcaaatccctaaaatgtacctttattatttcacaaaattatttactctactaactgtcaaatccatctttgtgctacgtcctcacatttcagaataaacattctcttttctaccatgttctgcctctattttctattatgccagaaatggctctgtaatgaaaataaagtggaaaacatgtctactgatatttactttaactgaatattattggccagcaaatataatattttttaatttgtagatgtaatgcactatgggaaaatcactctattcaaatattgtatatgatatcatttaaaaatataatatttttcttataggcttgaataggaaatgtcttgatcatgaatagttatcctcctgaggcatcttccagagagtttatcatgaaataaatagtttttcaatacaaaatatgatttgagtcagtatagattgttgcattaactacataaaatgaaattaaagaaaatttctagttaacaccaagtgaaatacagagaaaacaattaggatggaatgtattaaaagtgtttaatatacttcttttattaaaaaccatgttttaagttctaatctctgctgggactcaaattcacattatgcattttcacatttattggttttctatagctgagtaacaaatcactacaagcttagtggattaaacaacacatatttattacctcacatttccatgggtcaggagactaaccaggtctgtgatcaatgtctcaaaggctgtaatcaacatctgaggtgtgtaggtcttcttctaagctcactggtatcaattaaaaagaaaaccagatatagattaacttta

SEQ ID NO: 704017 - DNA, 928 bp, Homo sapiens
tgcatagattttgcttcatggaccaaaatttgaaaaccactgcactagtaggataaaatcaataaaacttccattttgttagactacaacttttgccaatctgctatgaatggattacagcttgccatgagatattgatctctgaccatggggtagctgggcaggcctggggctgctggagtcccatagccttcgacttggagctgcctcatccagagtgcagtggtctgatagtatgctctcagtccccacaggctgacgatgtgtcttcactcattttcactctgccccaccatgatgtgcatagyactgacaaggaggtactgctatcacctggatctccttcagcagccaatgttaacatgatgttgttgggagagtatagcactagctccaggtggggttgggcccatgtgggtacagctccctgtgataaccccaatctctgccttcacatgtatccgatatttctgtccatttctggcagagtgcctttttagtggcgacttagctagcttcagaatggcctttctaagagcatatgctcattctgaaaatgagagaattaccattattttgagatacttaatatgaaaaaaattcgatggattcaaaatccattcacattatcacaagaaatttcaatattacattaatagataaaaggaagagctgttagtttctttaagtataatttaaatgtgtccattttggaataattgtaaaaatactttactctcttttatcacctacatgtgcaaagtttctcacgatggtgcttataaagaatttgaaaatatcatcatggaaaattcttcatcaggaattttgtgtagttatttcaagcataaaatctgacatgaataaaagagttgtggaagcaagctcaaatttttcatcaaacatcttgagaatactttaattagag

SEQ ID NO: 704018 - DNA, 1547 bp, Homo sapiens
ggcacatccttaaccttggcaaaataaactttctaaattgattgagaactgtctcatctatttatgggttcacactttctattagtctcctatgcctttcaagtaggccatgacaaaaaaaagaagaggtagtttatttttaattctagttccattcttcctctgcctgatgcaggaaaaacactatttgctattgatggattacctttctattaactttacctttgcttgggtccagatgtttgttttactgatatattctagctgattctgccttataggtctcttggagtgagagatacagtttttgaatgctgagtatgaaaaaacattcaactttttcaaaacataccttgcctacaactgaggtacagtttgggtaattctgctaaaaggtaatcaacgacctgtccagaattccaaacagctggatataatttattgttttcatgctttaactttagcatctcatctttcgagtccccgcttgtagtctgatgttctcttctagcacaagaatgacctacttttcgacttaatgttattttttaatcaagaaaatcaacaaatacttgaatttcatactgatattctcaaatctttatttctaaaatatttctaaatcttacctaatgaataacaaaattttttgaataaagaacactgttagagtatataattccatatacttttctgtctcacagccttcctatggaaggcttccaaattttatttttattttattttgctaacatcttgactttctcttgctatgagaaatctttttgaatcctaatcaaaaaaggaaggagcttcaactttgctagtttgacttttaaaatagttatatacgggcatgttatctttcttccttcctattttgtagatttctatttaagaccttcacttttcctaagcaaatctcttttcttctctagctaaatcaacatggctttttttgcttttctttcattctaaacacagttccagttctgactaaaaaaatgaaaaacttctttttaaactctttcattcttcaccctgtctctgtgcaatcttaagttcaactgacaaaatgttacaagcaaactatttttaatttatcactttgcccttgggtttataataattacaatgatttcttctctctgtctcagcctagttgtatgataaaatcaatctcatgctatgaaatctctagtccatattatctgttcactgaagagaccagccctactgtgatgttgatttacccacaaactgtcagtttctgcaatccacaattataatctgggtgaatgtcrgagtcagtttgaaaacatgggctgggagaatgactacaggagattctggcaatgccacgataatgaaagcagtcactttttcaacaatttcttcctggccttgaatgctgttcaaacaagacacagaggaaacaatgtggagtaggccaagctccatggtgctactgatcaatgtcttaaactttatatatccccaaagtcatgtactagtactctgctttaaaaaaaaaaaaggtttctttc

SEQ ID NO: 704019 - DNA, 1397 bp, Homo sapiens
  misc_feature 252: n = A,T,C or G
ctttttccatattcaggttctttaaatagctctctcccagcccccaaagcttcctcttttgtgacctttccctgtggggctgcgggaaagcaattctccagagcaaggaaaaatgatgctaagagccacaggccgggctggaaaggccagtgcaagccggagggtccccagggatggaagaaagctgcgtctctctgccggctgggctcctctgccgcatcctcctccgcccccctcttcctccttttctancctttttcccttccatttaccttctggtgcccaaggaaccagtgggtggggggcgctgggaaggggcgcaggtcccgcagcagccgctgcctccgcaggtacagcttaatggcctgcagcagccccagggccaggcagaacacgaacgccaggtaaaagggccgcgcccagcgcgtctccagccaggagaattccatggctctgcgcagcgccgaacgccggcggtttcatggggcgcgggagagggtgggctttctcccgcccggagctggcgtagggtcgcccacccccaccgcctctctgggccctcgcgaagcttctgactcgcgggaagaaggaaaggcagtgggaggggcagctcaggcctggggagaggaggcaggcgcgcgtgcgggatttctagccggttaccaaagcgcgcacgcttcgttcggcccaactgcttttgcgctcctggagcgtcctcttttaagtccaacagttttcagtcacgggatctgaatttatattgtaaaataatgctaaagctgaggtcattgtttttcttccttatcacaaattataaatggctatgcaagagattttcttttccattctggcattctaccaaaattcccaggtggtagaggtagggggaggtgtaccatcattattcctttatcctgtggcctgcctagtggtgttccrgtaaatggtttacaactgattcccaccctgattcccagcgtgtaccatgagctagttcaagctgccgatacgagggcactgaacactgaacggggaagatatgcacagtagcgtaccatcatatagtaattccactatacaggtacagtcagggcctgctatataatttatgaatctcagtgcaaaatgaaaatgcgggataaaaactttattaacaattctaagatgacagaccattaaaccgagcatatgctcttctgggttcagagcctcgtgtggctgcttgggtctcatgcccatgaagggctgactctagatgccagaaacataaataaactcgagtacagataacaggaaaatgtagtaaaaataatttgaaagtgatggttttagtatttgtaacgtatcaggtggtgaactaggatctaacaagcctgacttcccaagctggtgtctcc

SEQ ID NO: 704020 - DNA, 1252 bp, Homo sapiens
ttttacaatgtcaatatccagtatctgttttccttattaaatataaatgggccaactcaaaattattaaatttaaaagtacattgagggccaggtggggtggctcacacctgtaatcccagcactttcggaggccgaggtgggcagatcacctgaggtcaggagtttgagaccagcctggccaacttggcgaaacactatctctactaaaaataaaaaaattagccagacatggtggtggatacctgtaatcccagctgtaatcccagctacttgggaggctgaggcaggagaattgcttgaacccaggaggcatagattgcagtgaactgagatcrtgccactgcattccagcctgggtgacagagcaagactccatctcaaaaaaaaaaaaaaaaaaaaagagtatattgaggtcaactaaagtcatttaaacttcaccttccccatctgatgaaagagtttatttgcttaacatcaaattaaataaattgctattttggataataagttaaacaattaacttactcaatagtaagtcaaatgccttaagcaattctcatatttgtccaacttgggtgtatttcaaaaataataatattgtttgaacatcacataagtaatgtaacttatggtgtaactgacacatcagcttctgccaagttagactcttatctggaataataataatatcaaataacactgaactcttactatgtgccaggaatcttacatgtgctatctctgttgtcccaagtaggcctcactatttccgctttacaaatgagcaagttgaagcctgagaaacgaaataacttgaccttggtcatatgtggctcccaaagtctgtcttctgtatcacactgtgcctccaatgcatcctaagacctctcccctaccactttttgacattacgcagacatatatagtgagtcataaatttgccaaaatttatggcaaccagcagctcttggggctgctttgcctattgagtagccattctttattcctttaccttcccaataaacttgctttcactttaaaagcaaacaccaccaccaacaaactcggaatgaaccagccacaacagcctaccatcgagaaaacggtatggtgacctttcccctagagtgaagctgaaagctggtaactacttatttatgtgctgatacagaaaaacaacaacaacaaaacgtaggaaaaaaaatgtttaaatgtatagaaataagtaggaagactaagtaaaggacttt

SEQ ID NO: 704021 - DNA, 643 bp, Homo sapiens
tctccaaagttgacgctggagtgagaagaccaatcgctcagcaacaggtcctgagcacttgcccwgggccacgaagattctgtggaggtgctggagacacatggagaagaaaacttgccttcaacagatgtgaacctgtctgatggggtggtgtccacagatcctcaacttagcacatggtccatccgagggaaaggggtcctcctggggtgacaacctttactaaccagtcatgacttatcttatgacagttttacccagtaaaggagtttgaggtgtatcataagctgatggaaaaatacccatgtgctgttcccttgtgggttggaccctttacgatgttcttcagtgtccatgacccagactatgccaagattctcctgaaaagacaaggtaaaaaccaagaggggctcacagtacagagcagcaacaaagagggtctcagggtgtctgtggcactagggaaggacaggttgaagcatttttaagggaaatccatcatttgatatgttgaagggaagattccatgtcctcctcaacatcatagtcaggactctattgagggctgttgtagaggattctctgatccattttcaagcaatcttctctccctacatggcaaattttttctgatgcttccatc

SEQ ID NO: 704022 - DNA, 2500 bp, Homo sapiens
catttcattttcctcagtgtttttgacttcactcttggtgaacccatacacccagaaaacaattaaaagtaaactctgcggtgttgttattcattagattgagaagctgctgattttttttttttcttttttggtctttctttgagctccgtttagtgtcattaactaaagccagaaaacagttttctactgtttaacaatgattgtgaagagcccaaataaattttcaagcattcatgacaactctactcaagtaaggaatgattcagatatttatgactgacaaaaatagattactattcaacttttgaatgacttgtgaatttaaaaaactggtaagaaaatagatcactgtcaaataaacatcactgcaactaatgaaattcagaatctaaattactgctgatgacgcacttgagttaagtgcagaatttttctcgttaacattcccactctgggcccattatcctcttaattgtacctccaaattccccaagctatgctagaacaagttgtctaagtttctctttaaaaaacatggcttatattggggtcatttcaactattaaaataaacacttaacaggatctttctaaaaccatacaaataataacaacaacaacctttgcatcaaagatttttctaagagattaaatatccttattattttgctttttcaataaccattcccacagggtttgacattaaaattacccattaattaataatgtattgtatgttacaacaagcaaaataaagctatttaagtaaattttctttctaayattcaattatattagaacagtaacttattaatgtgggtcttggctttggttactgaatttgtaggcaaagcaaagatagaatccagtataaaaaaattaagcaaatcttaatattttaaaaagtaaaatatgcaacacagaacttgagaaattatacatgctctagatttgtttgctatacaactatgggtgttttatgtgttgatcggtgctttctattaaataaaataacatgtacatatctatatagatacacaggcaaacacacacacacacacacacacacacacacaaacacacacacccctctagaaattatctgtctgcattgatcgccattagaggacagcagaaatatatatatatagaatttcatacaattttgaatttcattctaaattcatatatatgtatgtatggagagagagattatctgctaaataatatgtatgtggtactaaatatatattaatagtatacaaatatatatttctaaacttaattgcctttggattctctcatttttctctaatataacaatctggttaaaataaataatgtaatgggcacatatattcccagtaatcttggtctaggtattgcacagactgatctcatatctaaattcttccttcaataaaatgtaagaaatgactaatgatgtaacaagctcagttaatagtctccccacaaaaataccatattgaacattttgttgatcaagataaatcttcaacaatctaaaatgttcaaaaggaggaactaagaaataaaaactcttccagtcttggtctgaggcagtactttctgtgtagtgccatttactttcgcttttgggatccatctagcatccctagtaaaatgctagaacacttgctttgtcaagttgtagtaaaattaagaagacttacagagaaactggaatcacctgcccaattaaccttgagttttgtgacattaaatcagatatccaaaggcagaaagactttaaaccagctttatgactaacctaatgctttttaaactagagctttctatttttgatgtctagtatctcataaaacgtctctaccaagaagaaatgtttgaattgcctctcttggcagccttttatttgacaagttttaaataaaatgttgacatgtgcttcaattatttgacggtgggagaggcaaattcaaaataagttgtaaatacaatacaatacaatacagaacaaaactaaactaaaaacaaacacccaacagacacacgcatgcacgcacacgcacacacacacccgtctagaaatgatcaatctgcgcttatcgccattagaaggcagcagaaatgcaaaaagagaattttacatataaagtagtaataatgtgttccagttatttattgttgcataactaaccatgatacatttagtggtctaaaataatgattttaatattattatcatatacatggtttctgtgggtcagaaatttaggtagtgtaccatgaatacagcttgcatctctgctccaggattttttgggccatagataggaagacttgagtagctgatcactcaaatggctaaggactggaataatttggtgaattctttgctcgcatgtgtaaagcctgcactaagatgactcaaaggctggactaaagtaggactgcccactggcacctatacatggcctttcgatgtaattttggctttcttcacagtaagcagc

SEQ ID NO: 704023 - DNA, 625 bp, Homo sapiens
caactctaggagatcagtactatcatctgcctcagtttcataaggaaactgaggcacagttgggaaacttactcatgtccccacagctattgaggagctgagcaaggactgaaccagggtatcaggctccagggtctgtgcctccaacctgtcagcygtcttgtttctcatcctgtcaatgctgcggtctccaaagcacaaagattctgatgccctaatccatggaaactgtgactatgtcagattacaagaccaaggggaatgaagactgcggatggaattaagattactggtcatctgactttgagaaggcaaagattatcctggattatccatgtgagcccacagtaatcacaaaggtcctttaaatgtggaagagtatggccagagtcagagaaagatgtgcagatgcagcaacgctgccagatctgaagatggaagaagaggccatgagccaagcaatgcaggtggcctccacaagctggaaacggcaaagacatggatatttccctagaacccccaaaaggaggcagccctgacaacaccttgactgtagcccagtgggacgcatcccgtgcttctgacctccagaactgcaggataatgaatctgtgctgtgttgggc

SEQ ID NO: 704024 - DNA, 958 bp, Homo sapiens
caattttttgccatgtggcagttgttttgaatttacctaggtttttttttctttttctgtatgtggagggagaagaggaaaggtattgaagggaagtaactgtattctatkattttatttcaggtaactttgttggaagggtgtttgatatagtaggtaacagttacttgcccagtaaaaaatgcattcaatactcttctgtgaaatagatgtgcagctgagaattttgcagatgagaaaacaggcacaaatatatttatttaatacatgtttgaaaagaattaaaaccaaagttttctctccaagaccagtgatttgaacacatcaaagcatccactacacttcctaccgttaataatctcagtgatccttgacaaattgcattaaatggctaagttctttacaactacaagaagaaaggcttgaactaattcacctttaacatttttgctggctccaaacgcttaccgtcatatacagttataagtgtaatgacttaggttcagtaggttaatttttattaataataacaagcaaagtgatttgacattgcttttctcagcccattgacatatttatatgctaatgttaagtgccctttgaatgcttggtaaagaattcttgaaaatcatgatactttaattttttttcatcttttgctttctttttcaattatgtatgtatataaaatattcaaagaaatgcatatggatatattatataatgtattattatattaaaatgatctaagaatttatattaataacttataactatgcctagatatagaggaacccaagaaaagttgttcaatgtataatgatcaaataaattaggccttgaacagatgtgtgtgtgtttctgtgcacgtctgtatttgaaaggaaggaaaaagtgaaaaatctttgtctctctaactccagaaaaatatccccacttttgttgatagccaacatag

SEQ ID NO: 704025 - DNA, 1288 bp, Homo sapiens
ttgtatttgtaaaaacattatattagaagaaatggcttctttgaaggcctgtctggggctgtgagaaaagactaataacaattccatggagggggtaaagccagaactaaaatgctgggttagatattttgatttctcttctaaaaggaatagaaaattactataggttttgacacattccataagtttataacaagtagagaaacacatggaagagaaggaaaaaagctagggagttggttgsagtaataaggtgagtcataatgctggaagcttgaaataaatggaagatcttgtttatgaattggaaatagcaagtgatgaaggtgtcaacaggactcctagttttctgtcttacacacttgaaatgaaatcattccagcacttgtgttcccatatatgtttttgtttatattatagagtttcaatttctatcgcaatctattttgatgagcttaattttcattctttgattacatttctaatattatttaacttagctgatgcaaatttgatttacattcttaagactatatggtattttcattcttttaaagaatatttcctctgacagtgatattttggcacttcagtttacaaacaaccagcaaattaacagtttgatgtgtctgtttttgagtaacagctaaccaacagcagctgaatttctaacattgtattacatcacaacagtgttgaagtaaactaacaattagccttttaaacagaaaacatgataatttatttcaccatgctcataaaatagtatactgtagagttaacaacctttagtgacagaaatagttatcagttcattaatcagatcacactgaagaccaaaagtggtagaagagagcaaagcattgttgattatactatgttgatgctaaaaggaactttcagagactctgttatgaatacttactattttataaatgacacaatcagacgaaacaaagaaataaatatagttgaggttagaggaattaacctcaggactatttagggattgtgtcagttcagttgtttttaaaccctgaccacatattagaatcatctgaaggagctcttgaaacatactaatggtgaactctcattacagaacaatcaaactggaattgtagtgagatggacacagagtattttttgaggttccctacatgctttcagtgtgcagattgagaaatgctctctactgttacaaccaaattagttcacatatttcagtgcttgcatcgtttttgcacttcattttcctttatctcatagtaggaataatgctttcata

SEQ ID NO: 704026 - DNA, 1288 bp, Homo sapiens
ttgtatttgtaaaaacattatattagaagaaatggcttctttgaaggcctgtctggggctgtgagaaaagactaataacaattccatggagggggtaaagccagaactaaaatgctgggttagatattttgatttctcttctaaaaggaatagaaaattactataggttttgacacattccataagtttataacaagtagagaaacacatggaagagaaggaaaaaagctagggagttggttggagtaataakgtgagtcataatgctggaagcttgaaataaatggaagatcttgtttatgaattggaaatagcaagtgatgaaggtgtcaacaggactcctagttttctgtcttacacacttgaaatgaaatcattccagcacttgtgttcccatatatgtttttgtttatattatagagtttcaatttctatcgcaatctattttgatgagcttaattttcattctttgattacatttctaatattatttaacttagctgatgcaaatttgatttacattcttaagactatatggtattttcattcttttaaagaatatttcctctgacagtgatattttggcacttcagtttacaaacaaccagcaaattaacagtttgatgtgtctgtttttgagtaacagctaaccaacagcagctgaatttctaacattgtattacatcacaacagtgttgaagtaaactaacaattagccttttaaacagaaaacatgataatttatttcaccatgctcataaaatagtatactgtagagttaacaacctttagtgacagaaatagttatcagttcattaatcagatcacactgaagaccaaaagtggtagaagagagcaaagcattgttgattatactatgttgatgctaaaaggaactttcagagactctgttatgaatacttactattttataaatgacacaatcagacgaaacaaagaaataaatatagttgaggttagaggaattaacctcaggactatttagggattgtgtcagttcagttgtttttaaaccctgaccacatattagaatcatctgaaggagctcttgaaacatactaatggtgaactctcattacagaacaatcaaactggaattgtagtgagatggacacagagtattttttgaggttccctacatgctttcagtgtgcagattgagaaatgctctctactgttacaaccaaattagttcacatatttcagtgcttgcatcgtttttgcacttcattttcctttatctcatagtaggaataatgctttcata

SEQ ID NO: 704027 - DNA, 1288 bp, Homo sapiens
ttgtatttgtaaaaacattatattagaagaaatggcttctttgaaggcctgtctggggctgtgagaaaagactaataacaattccatggagggggtaaagccagaactaaaatgctgggttagatattttgatttctcttctaaaaggaatagaaaattactataggttttgacacattccataagtttataacaagtagagaaacacatggaagagaaggaaaaaagctagggagttggttggagtaataaggtgagtcataatgctggaagcttgaaataaatggaagatcttgwttatgaattggaaatagcaagtgatgaaggtgtcaacaggactcctagttttctgtcttacacacttgaaatgaaatcattccagcacttgtgttcccatatatgtttttgtttatattatagagtttcaatttctatcgcaatctattttgatgagcttaattttcattctttgattacatttctaatattatttaacttagctgatgcaaatttgatttacattcttaagactatatggtattttcattcttttaaagaatatttcctctgacagtgatattttggcacttcagtttacaaacaaccagcaaattaacagtttgatgtgtctgtttttgagtaacagctaaccaacagcagctgaatttctaacattgtattacatcacaacagtgttgaagtaaactaacaattagccttttaaacagaaaacatgataatttatttcaccatgctcataaaatagtatactgtagagttaacaacctttagtgacagaaatagttatcagttcattaatcagatcacactgaagaccaaaagtggtagaagagagcaaagcattgttgattatactatgttgatgctaaaaggaactttcagagactctgttatgaatacttactattttataaatgacacaatcagacgaaacaaagaaataaatatagttgaggttagaggaattaacctcaggactatttagggattgtgtcagttcagttgtttttaaaccctgaccacatattagaatcatctgaaggagctcttgaaacatactaatggtgaactctcattacagaacaatcaaactggaattgtagtgagatggacacagagtattttttgaggttccctacatgctttcagtgtgcagattgagaaatgctctctactgttacaaccaaattagttcacatatttcagtgcttgcatcgtttttgcacttcattttcctttatctcatagtaggaataatgctttcata

SEQ ID NO: 704028 - DNA, 1288 bp, Homo sapiens
ttgtatttgtaaaaacattatattagaagaaatggcttctttgaaggcctgtctggggctgtgagaaaagactaataacaattccatggagggggtaaagccagaactaaaatgctgggttagatattttgatttctcttctaaaaggaatagaaaattactataggttttgacacattccataagtttataacaagtagagaaacacatggaagagaaggaaaaaagctagggagttggttggagtaataaggtgagtcataatgctggaagcttgaaataaatggaagatcttgtttatgaattggaaatagcaagtgatgaaggtgtcaacaggactcctagttttctgtcttacacacttgaaatgaaatcattccagcacttgtgttcccatatatgtttttgtttatattatagagtttcaatttctatcgcaatctattttgatgagcttaattttcattctttgattacatttctaatattatttaacttagctgatgcaaatttgatttacattcttaagactatatggtattttcattcttttaaagaatatttcctctgacagtgatattttggcacttcagtttacaaacaaccagcaaattaacagtttgatgtgtctgtttttgagtaacagctaaccaacagcagctgaatttctaacattgtattacatcacaacagtgttgaagtaaactaacaattagccttttaaacagaaaacatgataatttatttcaccatgctcataaaatagtatactgtagagttaacaacctttagtgacagaaatarttatcagttcattaatcagatcacactgaagaccaaaagtggtagaagagagcaaagcattgttgattatactatgttgatgctaaaaggaactttcagagactctgttatgaatacttactattttataaatgacacaatcagacgaaacaaagaaataaatatagttgaggttagaggaattaacctcaggactatttagggattgtgtcagttcagttgtttttaaaccctgaccacatattagaatcatctgaaggagctcttgaaacatactaatggtgaactctcattacagaacaatcaaactggaattgtagtgagatggacacagagtattttttgaggttccctacatgctttcagtgtgcagattgagaaatgctctctactgttacaaccaaattagttcacatatttcagtgcttgcatcgtttttgcacttcattttcctttatctcatagtaggaataatgctttcata

SEQ ID NO: 704029 - DNA, 582 bp, Homo sapiens
tttcaacatataataaaattatattttcttattaattttgaaaaatgatttttaaaatagcaatcacatatttgcatgaggaatgtattaattaatggaatgcttccacttggtcactcaataattttcaacaggaaagcttaatcttttggagttaattatctcaaaagctgggctgctatatttttctttgcttgaaatcaatagtcacatttataaggctaatttttttwaattatattttaagttttagggtacatgtgcacaatgtacaggttagttacgtatgtatacatgtgccatgctggtgcgctgcacccactaactcatcatctagcattaggtatatctcccaatgctatccctcccccgtccccccaccccacaacagtccccagagtgtgatgttccccttcctgtgtccatgtgttctcattgttcaattcccacctatgagtgagaacatgtggtgtttggttttttgttcttgccatagtttactgagaatgatgatttccaatttcatccatgtctctacaaaggacatgaactcatcattttttatggctgcatagtattcca

SEQ ID NO: 704030 - DNA, 582 bp, Homo sapiens
tttcaacatataataaaattatattttcttattaattttgaaaaatgatttttaaaatagcaatcacatatttgcatgaggaatgtattaattaatggaatgcttccacttggtcactcaataattttcaacaggaaagcttaatcttttggagttaattatctcaaaagctgggctgctatatttttctttgcttgaaatcaatagtcacatttataaggctaatttttttaaattatattttaagttttagggtacatgtgcacaatgtacaggttagttacrtatgtatacatgtgccatgctggtgcgctgcacccactaactcatcatctagcattaggtatatctcccaatgctatccctcccccgtccccccaccccacaacagtccccagagtgtgatgttccccttcctgtgtccatgtgttctcattgttcaattcccacctatgagtgagaacatgtggtgtttggttttttgttcttgccatagtttactgagaatgatgatttccaatttcatccatgtctctacaaaggacatgaactcatcattttttatggctgcatagtattcca

SEQ ID NO: 704031 - DNA, 582 bp, Homo sapiens
tttcaacatataataaaattatattttcttattaattttgaaaaatgatttttaaaatagcaatcacatatttgcatgaggaatgtattaattaatggaatgcttccacttggtcactcaataattttcaacaggaaagcttaatcttttggagttaattatctcaaaagctgggctgctatatttttctttgcttgaaatcaatagtcacatttataaggctaatttttttaaattatattttaagttttagggtacatgtgcacaatgtacaggttagttacgtatgtatacatgtgccatgctggtgcgctgcacccactaactcatcatctagcattaggtatatctcccaatgctatccctcccccgtccccccaccccacaacagtccccagagtgtgatgttccccttcctgtgtccatgtgytctcattgttcaattcccacctatgagtgagaacatgtggtgtttggttttttgttcttgccatagtttactgagaatgatgatttccaatttcatccatgtctctacaaaggacatgaactcatcattttttatggctgcatagtattcca

SEQ ID NO: 704032 - DNA, 641 bp, Homo sapiens
ggaatagattggatctcataagctaatagatagaagtcagtagtcttctggatgacaggaaccagagctgaaactgagactcacactttctttttttttttcttgtttctatatgtaagttattacttctccagacaaacttctctggaaggttgccataagtagcttcaagctcatatctatgcaattctataaacagggagaaaaataatcttctccactaaggtcagaaccgaaactcccgagaaagagccgtcttgggtcaaaagtctactgcaaggcaggctggagctgtttgtgttgggaggtacatgctaggtgcgtccaattgcctcacatcttggtctttttgaagyggcactgttgtctggggtaaatacttgaggtttgttagtctcatgccaaggaaatggagtgcatggacacacaagaagtgggtttaggagaggaggtttaataggcaaaagaagaagaaaggagaatagctctctcccctgagagagagggggatgcccgagtgggacttccagcctgctctagtgcacagggttttatagacaggcttgaggaggcagtgtctgatttatacagggcccaaagattggttggaccaggtgtgacgtttacatagcatgtgaaga

SEQ ID NO: 704033 - DNA, 601 bp, Homo sapiens
aaaagtgtaattcatcactttatgatttatctaaaatatgtgtatggtatacataagtgttattagtgttgttttcatatcataacttcaggtgtagcaaagatttagagtgtgtaaaataatattctgaatgatttgctttgaaaaattgtgccataatatttaataaataacattgctaattacaccttaaggacaaactttaaacatctaaaagctttctggttttttgtttttgatgatttttatttgtttacggccttactaaactcaaagcatctaattgaattttgatcaattttaacattctaaatattaaaaatgtggattattatctggatactaaaaatttccagagtccttgaaacgaaactctgatgtctcttatttccagtgcacttttaacttcagctgctgcgtggttgaaacactagtgattttctctaagattaaagttgactttttccagcaggtttttgtaatggctgaattcattttctagtatcgcatctgatacattaatgsaaagcttgaaatcaaggtaactctcacaaatgttaccagaatatttcctagttctgaacattacgcataactccaa

SEQ ID NO: 704034 - DNA, 546 bp, Homo sapiens
agcaaacatatccttagctaatccaatactttttgaccattttctgtcaggttgttagaacttgtttgattgattggtagaagtcttttatattctggatagaaatcttttctatgttacacaagtagcaaatattttctctgggtttgtcactcaactttgaactttctttacggtgtctttgttttacagacattcacaattcttatctagtcaaatctgtcagtattttttaacatattatagactctgttatatgctaagaagggttttctctataccaagattataaaagatactctccaaagtttccttctagttcttctattttccagctacaattattcttatatattttatagatatttttgttataagcaccttttctcctagttgcctaactaggtaatgttaatatataggaaggttactattctgtattcagcaccttaagtacaaattcttaaaagtcaatcttcttagatagttcarccaaacaattttatcatcctcaaataattataactttggctctttccctccaat

SEQ ID NO: 704035 - DNA, 619 bp, Homo sapiens
gcttcctagctcacccctgtggacactggagtgaggcctcagtttctcatgagctattggtcagaggccaccctcagttccttgccacgtaggcctctccatagagcatctcacaacagggcagcaagcttcatcagagcaagtgagagggcaagagacagagaaygctgttgagataaaaggcagtcttttgtagcccaatcagcagtgacatcccatcacttttgccatttctgttctcagaagcaagtctctaggtccacaccacattcaagagctaggctgtgactgccaggagtcatggttcttattgagaaccacatcagcagcctcatgccatgctcctgcacccacccatccccaagggcaagctccatgacagcaggaacctcatctgtcttgttctccacactaccccagtacctcactcctggtagatgtttgatatctattttttaaggaataaacaaagtaaccaaactataagctccaggagctcccagtattgcaccctggaatacatgcctgtattttttttcaaattttatttttaattgacaagtaattgtatatatatatgggatacaatctgatgttttgatatatgtacacaatatgg

SEQ ID NO: 704036 - DNA, 619 bp, Homo sapiens
gcttcctagctcacccctgtggacactggagtgaggcctcagtttctcatgagctattggtcagaggccaccctcagttccttgccacgtaggcctctccatagagcatctcacaacagggcagcaagcttcatcagagcaagtgagagggcaagagacagagaatgctgttgagataaaaggcagtcttttgtagcccaatcagcagtgacatcccatcacttttgccatttctgttctcagaagcaagtctctaggtccacaccacattcaagagctaggctgtgactgccaggagtcatgkttcttattgagaaccacatcagcagcctcatgccatgctcctgcacccacccatccccaagggcaagctccatgacagcaggaacctcatctgtcttgttctccacactaccccagtacctcactcctggtagatgtttgatatctattttttaaggaataaacaaagtaaccaaactataagctccaggagctcccagtattgcaccctggaatacatgcctgtattttttttcaaattttatttttaattgacaagtaattgtatatatatatgggatacaatctgatgttttgatatatgtacacaatatgg

SEQ ID NO: 704037 - DNA, 550 bp, Homo sapiens
taaacatacactaccattgacacagccactcccatcccaggcatcgaactaaatgcccaagtgaaatatgaacccaatttccacaaaaactcctgcgctcagtatttacagtagttcattcatcattgccagaacctggaaacagctccagtgctttcagcaaatgaatccatagaaacaccggctcgttcctgtactggaacatgggcacgttcctatactggaacagactctgtgtgatcctatgctgcaacgtgcaccacgcgatcctatgctggaacacacaccacgygttcctatactggaacatgcaccacaagatcctagactggaacaaaccctggcatgttcctatactggaacacacatcacacgatcctatagcagaacagacactgcacattcctatactggaacatgcaccacaagattctatactggaacagacacggcacatcctatactggaacaggcaccgcacattcctatactggaacaggcacctcacgatcctatgctggaacaggcacctcacgatcctatgctggaa

SEQ ID NO: 704038 - DNA, 550 bp, Homo sapiens
taaacatacactaccattgacacagccactcccatcccaggcatcgaactaaatgcccaagtgaaatatgaacccaatttccacaaaaactcctgcgctcagtatttacagtagttcattcatcattgccagaacctggaaacagctccagtgctttcagcaaatgaatccatagaaacaccggctcgttcctgtactggaacatgggcacgttcctatactggaacagactctgtgtgatcctatgctgcaacgtgcaccacgcgatcctatgctggaacacacaccacgcgttcctatactggaacatgcaccacaagatcctagactggaacaaaccctggcatgttcctatactggaacacacatcacaygatcctatagcagaacagacactgcacattcctatactggaacatgcaccacaagattctatactggaacagacacggcacatcctatactggaacaggcaccgcacattcctatactggaacaggcacctcacgatcctatgctggaacaggcacctcacgatcctatgctggaa

SEQ ID NO: 704039 - DNA, 550 bp, Homo sapiens
taaacatacactaccattgacacagccactcccatcccaggcatcgaactaaatgcccaagtgaaatatgaacccaatttccacaaaaactcctgcgctcagtatttacagtagttcattcatcattgccagaacctggaaacagctccagtgctttcagcaaatgaatccatagaaacaccggctcgttcctgtactggaacatgggcacgttcctatactggaacagactctgtgtgatcctatgctgcaacgtgcaccacgcgatcctatgctggaacacacaccacgcgttcctatactggaacatgcaccacaagatcctagactggaacaaaccctggcatgttcctatactggaacacacatcacacgatcctatascagaacagacactgcacattcctatactggaacatgcaccacaagattctatactggaacagacacggcacatcctatactggaacaggcaccgcacattcctatactggaacaggcacctcacgatcctatgctggaacaggcacctcacgatcctatgctggaa

SEQ ID NO: 704040 - DNA, 550 bp, Homo sapiens
taaacatacactaccattgacacagccactcccatcccaggcatcgaactaaatgcccaagtgaaatatgaacccaatttccacaaaaactcctgcgctcagtatttacagtagttcattcatcattgccagaacctggaaacagctccagtgctttcagcaaatgaatccatagaaacaccggctcgttcctgtactggaacatgggcacgttcctatactggaacagactctgtgtgatcctatgctgcaacgtgcaccacgcgatcctatgctggaacacacaccacgcgttcctatactggaacatgcaccacaagatcctagactggaacaaaccctggcatgttcctatactggaacacacatcacacgatcctatagcrgaacagacactgcacattcctatactggaacatgcaccacaagattctatactggaacagacacggcacatcctatactggaacaggcaccgcacattcctatactggaacaggcacctcacgatcctatgctggaacaggcacctcacgatcctatgctggaa

SEQ ID NO: 704041 - DNA, 550 bp, Homo sapiens
taaacatacactaccattgacacagccactcccatcccaggcatcgaactaaatgcccaagtgaaatatgaacccaatttccacaaaaactcctgcgctcagtatttacagtagttcattcatcattgccagaacctggaaacagctccagtgctttcagcaaatgaatccatagaaacaccggctcgttcctgtactggaacatgggcacgttcctatactggaacagactctgtgtgatcctatgctgcaacgtgcaccacgcgatcctatgctggaacacacaccacgcgttcctatactggaacatgcaccacaagatcctagactggaacaaaccctggcatgttcctatactggaacacacatcacacgatcctatagcagaacagacactgcacattcctatactggaacatgcaccacaagattctatactggaacagacayggcacatcctatactggaacaggcaccgcacattcctatactggaacaggcacctcacgatcctatgctggaacaggcacctcacgatcctatgctggaa

SEQ ID NO: 704042 - DNA, 691 bp, Homo sapiens
ttaaaaaattaaataaaaagcaaatgttacatgtataatattggtgagagggcagataggtacatttgcctagaactatattaaaactttacaatgaagatctttaaaaatctccacatcttttgaaatattttaagtccaaagagctattccaaggaaataattaagtactcaaatagaggtaatttatccaagcattatttatatcactggagaattgaacattgttgtcaataacaagagactggtacataaactgaggtgtgcgcatgtaatggggaacctcatggctatgaacacattttgaatatttgattgacaaggaaagcaccataatatactgcagttattataataggcacaagatatcaattttcgttaatataaattatgaacctatatgtgactacgaacatagaaaatatggaaagtaaaccaaaatgtcmataacaaccatctctgaacctttcaacttttcttcattttgtttgttaatttttctatggtaagacatatggcttacatagtttgaaaaaagaaataactgacaaaataatttatagttttcacgatttctagaagcaaagctctgaataagattgaaggtcctttttacctttatgatgtgtatacttacttttaaataataaacttatttcctaacttgttgaactaaaaaaacttagaattc

SEQ ID NO: 704043 - DNA, 1273 bp, Homo sapiens
  misc_feature 177, 178, 179, 180, 181, 182, 183, 184, 185, 186, 187, 188,189, 190, 191, 192, 193, 194, 195, 196, 197, 198, 199, 200,201, 202, 203, 204, 205, 206, 207, 208, 209, 210, 211, 212,213, 214, 215, 216, 217, 218, 219, 220, 221, 222, 223: n = A,T,C or G
  misc_feature 224, 225, 226, 227, 228, 229, 230, 231, 232, 233, 234, 235,236, 237, 238, 239, 240, 241, 242, 243, 244, 245, 246, 247,248, 249, 250, 251, 252, 253, 254, 255, 256, 257, 258, 259,260, 261, 262, 263, 264, 265, 266, 267, 268, 269, 270: n = A,T,C or G
  misc_feature 271, 272, 273, 274, 275, 276: n = A,T,C or G
atggtaacattgattaagtaattcccatgtgccatttactattctaccttcttttcatttaatcttctcaataagactatcagataggtattactgttccccactttatagaagaagaaactagatattcacatagtacgtgaatctctcacccaggtcaaaagtccatggaattcnnnnnnnnnnnnnnnnnnnnnnnnnnnnnnnnnnnnnnnnnnnnnnnnnnnnnnnnnnnnnnnnnnnnnnnnnnnnnnnnnnnnnnnnnnnnnnnnnnnngtgcaaacaactgtggcccctctcccgcctccttcaccgccccacagctctgctggccttcttttctaccttgaacatgccaagctctgttaccatctatgatttttttcatattctacaacatctaccgtcttcatatttgcctttatctctgtctaggatgccccttctagatgttcatggctcactccctgccatgttgtcaggtatttgagctctctgttcccactcagagtagatgagcagaagaggaaatgagggccttcccagagcaactcccccaggtaactacatgattccgcattaatctatttgtaacacatatcgcctcctgaaacgttgttatttttaatttgtttagtcttttatttcacagttcttccccctaagatataagattcatgaggacagagaaatttgtctctcatgttcatccctgtatgttccacaacaagatagtctgaaacataatggctcctacatgtttgttcaatgagttacatttcattcttttaacatggcttttgttccccaacctataagtattctaatggtataagctctgcttactcaccagttctcccacttcattcttaacagagggccaggtactcagaaacggggggagaggagggagcaggtagctgcagaccagcagtgcaaggaggacttgctaaagaagartttgtttaggaatgtaacagttaaaggtctttggatctcttaaacagagttctccaaaagctccatgtggccaaacgttcatgctaaaattgctgtatagaggctatatattaaataaacaaaaatatgtaaacacataatattcccatatttagtcaagtacaatacacgttaggtcttagtactactacttgaaaaggttgtcaatgtatttctctgttttgatgtgaatgagtacatattttaatgcaactattgtacaggatgtgtacatatataaatctatagatagaattatgtacttttgagtaca

SEQ ID NO: 704044 - DNA, 2140 bp, Homo sapiens
ataacagcatcttgggaagggttaagaaacaaattataattaatttttttctgtttctacatataaaccaatttttaaatatatagtttaaactgaaagagaaaaaacacagtatcttatttggatcaagaacttcctcattttatttcattttctgggaaacataataagctcctaattcttaataaaatgagataagataaaatacaatcagaagaatattttttaaaaggcaattactttcattgtgttgttgattacttgataattgtataaaacacatgaacaagtaacttacaaggtgatttctttcctgttaattatgatattgtgggttaacctaaaaactgaaaagttttaagcacgtatttcggtgtaagttaagggtatcaaattaccctttagtttaggaaggagtcatccaagtgtcctaaaggaacagaaattgaaggaagaagatctgcatttccaagaatagaaacgatttctgaagaatggaaagataccaacatggtacccagccataaggaaagacctccataattacagatcacggagccaggaaactgacagagtataattaaggacagaataatctaacacttgtataaagtacaaattaataggaccatgtctccraaacacagctaagattgaaaaccccagagaaggtcagtggagacagttatagaaatttccaaggagaagtttcatttaacttgaaaacaacccatggagactggtgaaaagattaaaatttgcattttattaaatggaaattgtcaaatcactccccaatcaatgaacaaaaaccaaatcaaaataccaaacctttaatgttagtattatctaacattattctatatttaaataatgtgcatttaaatatagaataatgttatttcatgcacttgcttatagagttacatggaaaagtacctgtaatactagaaatccctcatgatgaaagatgaaagcagctctttgttataaggacgatattatcaacaaattttcgtaacgtcacaatttcagtataacaaatttaggacatgaatcatataaatgaaatcctttatatgacaggtgtctggccactgtgttcttacagtagttcctgaatctgacctatagatcttgacatagatttaacctgattgatgagatcaggcactcatcagatcctgccaaactaatcagacaagaagccattcagatcacattaaagtttctgtttttctcagacctagaagatatgttatttaaaataatttttacttagctggtaaaagaatctatttgttcatatttaggtaatgttttattcaaaatagtatttttgatttggacttatgaatattggattgttataaaagggaaattgttttccgtccataagctgtaaaaaagataacaaaaaaagaattctgcctattcttaagacaactaaaaaagcccatcacaaatggcttccatttcgagcagtaaaagtattaatataatggttttactgatggaaaatgtcaaagaaaatagtttgtggtagtatcctgtatccttgaatgaagggtgttcttttatggtactaaaatttcattatcattatatagctgacattggaccttcttcaaatcatttgagaaatgactggtgaagctatcataggacttggcatgtcttccaattcatcaaggtatcagacaaacccctcaaaccttagacaggaatgtttaggatatcatgggagtcttttgttgtgtgctacacccttgattatatcttctgtaaacatggcctggattgttttcatcaaaattattaaaaggatagtgtgagggtgagaatgctttatctccaaggaaatatgactcaagtaaattttaagtggaaaataatatgatttcatctttgaaaagtagacaagagtagttttagagaaaactagagaagagagttgcagaatctttaaagtgacccaaattctgaagctgatctcagtgttgtttggggaaaacactgagtaacatgaacctaaaccaaacaaatgaaaactcaagtaatgataataacttatatttagttgaaatcatcatttataccaatgaaaatctgaaaaacttgaaaagcttctttccaaatc

SEQ ID NO: 704045 - DNA, 855 bp, Homo sapiens
ctgtttgatttactttcctaaacccttgttttcagaccaaagctttcctgtgagctttgagtctctaaatctattcgtcatgtggatatctcaaagaaaatccaaagcaggcatgtatggacacaggacccctcaaatctgggtcgattcaggtgttttctctgtcactgacctcaaacctgttgtttgagccagaaccctagcagttcttcattacctcttcccacctgtgcacctaccagaccccagccagctgtctgaatgtcctcacccacccagagctcaccacccttggttgttcatccaggagccaaagcgacattcttcaaaagcacctctgctcaccatgctgcctgctttctgctgtccccactgaaaagtgctggctgccctcagggtgaatgcccaggtcctgtccatggtcccaagggcacctctgtgcttcttgcctcccccaacccagccttccacacatttcttctgcgtgccacgtcttcctggaccacgctgctctccctctttccttctttcccgcagcctcatccttcagatctcagcagactcctccaggtgcgcttctccagggtcacttcctgcccccagcccatagagctctgtgcttttccttccaggcacacatctcactgagcagccacacatcctgagggtggttattttgctttacatcgatgttttatttaactgtcaggagcgggacactgctttgtctatttgtctgtacacttaacatgctttaagtgtgstccctaccaagggaaggcattggtctagttggtagctacataagaacaaacacaaataatgcccttaaaggctcacacacagtgagagata

SEQ ID NO: 704046 - DNA, 540 bp, Homo sapiens
taatggcaaaaacagactttaattttggaaaggaatatagctgagctctagattagaagcccataaactatggaccaaatctctcttctgcctgtctctgttagtaaagtttcattacaacacagccatgcccattcatttacatattgcctatgcttcttttaggataacaacagtggagctgaataggtgrgaaaaagaccacgctggccacaatgccaaaaaatagttatatttggccctttatagaaaatgtttgctgactcttgctctacagccaaactccttgatattaaatactggttctatcacttattagctgtggtactttcagaaagtttctcaaggtaatcatcgtgaagaaatgaacactatctaccacttagggttgataggaagattgagtaagtttaaatatccaaagtgcctagaccagcatctagcatatattcaggattcaataactattagccattattattataaacagcaagtacaaatatccttctccccatacgcattgttggctctcatgccaaa

SEQ ID NO: 704047 - DNA, 646 bp, Homo sapiens
ttccagcactttgggaggccaaggcaggcagatcacaagatcaagagatcgagaccatcctggccaacacggtgaaacctcatctgtactaaaaatacaaaaaaataaaattagctgggcatggtggcgcacacctgtagtcccagctactcgggaggctgaggcaggagaatcactggaacccaggaggcagaggttgcagtgagccgagattgcgccagtgcactccagcctggtgagacagtgagaytccatctcaaaaaaaaaaaaaaaaaagtagatggcatggcaaggccttctcccaccccaaaagtgacaaatgaccatacaactaataatacggtaaaccaaaaagaagaaattgcataaggcaggtttatatgtgtgtgaccttcaggcaataaatgtgaattttaaaggatcagtgaaaaatattactgaagtaggttcagagctgttgaatatatgaatttgaatgaatacaccaacacatggaataatttaaaagttatactatacactacaggcagagattatataaacatttacctaggagagattagaaaaaatatatagaaagttgtctctggatggttatcattttcaaaaacaataaagctagtaactaaagccatatgtcataata

SEQ ID NO: 704048 - DNA, 646 bp, Homo sapiens
ttccagcactttgggaggccaaggcaggcagatcacaagatcaagagatcgagaccatcctggccaacacggtgaaacctcatctgtactaaaaatacaaaaaaataaaattagctgggcatggtggcgcacacctgtagtcccagctactcgggaggctgaggcaggagaatcactggaacccaggaggcagaggttgcagtgagccgagattgcgccagtgcactccagcctggtgagacagtgagattccatctcaaaaaaaaaaaaaaaaaagtagatggcatggcaaggccttctcccaccccaaaagtgacaaatgaccatacaactaataatacggtaaamcaaaaagaagaaattgcataaggcaggtttatatgtgtgtgaccttcaggcaataaatgtgaattttaaaggatcagtgaaaaatattactgaagtaggttcagagctgttgaatatatgaatttgaatgaatacaccaacacatggaataatttaaaagttatactatacactacaggcagagattatataaacatttacctaggagagattagaaaaaatatatagaaagttgtctctggatggttatcattttcaaaaacaataaagctagtaactaaagccatatgtcataata

SEQ ID NO: 704049 - DNA, 646 bp, Homo sapiens
ttccagcactttgggaggccaaggcaggcagatcacaagatcaagagatcgagaccatcctggccaacacggtgaaacctcatctgtactaaaaatacaaaaaaataaaattagctgggcatggtggcgcacacctgtagtcccagctactcgggaggctgaggcaggagaatcactggaacccaggaggcagaggttgcagtgagccgagattgcgccagtgcactccagcctggtgagacagtgagattccatctcaaaaaaaaaaaaaaaaaagtagatggcatggcaaggccttctcccaccccaaaagtgacaaatgaccatacaactaataatacggtaaaccaaaaagaagaaattgcataaggcaggtttatatgtgtgtgaccttcaggcaataaatgtgaattttaaaggatcagtgaaaaatattactgaagtaggttcagagctgttgaatatatgaatttgaatgaatacaccaacacatggaataatttaaaagttatactatacactayaggcagagattatataaacatttacctaggagagattagaaaaaatatatagaaagttgtctctggatggttatcattttcaaaaacaataaagctagtaactaaagccatatgtcataata

SEQ ID NO: 704050 - DNA, 593 bp, Homo sapiens
ctaatgtagctggcttttgggtagatcccaatgagatatcttcgtycataatcctgttatctctgaataaaggcagttttgcttttgttattaaacgttcaagtcaattaatcttgattggatatatgtatccatcatgtgagataaaatagaaaacactttcatcaccatagtgggttttattttgtaaccttctagccaaccccaacccacaaaggaattcattgttgagatttgtatcactagatttgtttgacctgcttttataattcatctaggtgaaatgatacagtatttacttttttgaatctgttgtcttttctttacatttttgaggttcatcgatattgttgcatgttccagtaactcacttcttttgtattgctgagtagtatttgattgtatgaggacagcagtttgttcatttatcctgcctttgtgttcatgtgtgctcagtgttttactcctgcttataggtgagaacatgcagtatttggttttctgttcctgcattaattcactcaggataatggcctccagctgcatccatgttgctgcaaaggacatgatttcattttttttaaacagctgtg

SEQ ID NO: 704051 - DNA, 929 bp, Homo sapiens
cacataaaatcccaaatctggtaaactctaacttacctactctacattgttgagcaaacacttgaccaggatacaaatttgtcaaatgttctcaccttaaactcagaccattagggtcaggcactgtgattcactgctgtaatcccagcagcactttgagaggctgaggcaggaggatggcttgaagcgcaggaattccaaaccagtctgggaaacatagtgaggtcttgcctgtattagttcattcttgcactgctataaagaaatacctgagattaggtaatttataagggaaaatggttttattggctcatggttctgcaggctgtgcagaaggcatggcagcatcggtttctggggagacctcagggagcttttactcatggtggaaagcaaagtggaagtaggcatcttcacatgtctggagcaggatggtgttaaaccatgagaaactgcccccagtatccaatcacctcccaccaggttatacctctaacatggggtactaaaattagacatgaaatttgggcagggacacagatccaaaacatatcaccatctctacaataaataaataaatgaataaataaaaaaaagagttaggacattctccctaaattgacatgaaaactactttaaaccaatgcttctcaatcccttatatggagagaaataagctgaaaaatttgctaatgaaacttcgatttaataagtttgagatgggtttgggtttcttcatttctaagaggtacacagccgttgctaatgctgctgatacttctgtaaagagaattaaaataccactcccctttgctgattataattatcattttatggtatgttkgttttcacattttttaatacatgacttaaaacttacacaatgcaccaacttcgtattcaccaggagagtttcagagagatccacc

SEQ ID NO: 704052 - DNA, 635 bp, Homo sapiens
tgcaatatactcatataacaaacatgcacatgcaccccctaaatctaaaatttttcaaaagttaaacaatcttctagaatgatttaattttgacattttggaaacaacgaaaatcaatataaaatagtgtactccaacccaaaggttttttttttttttttyttttctttgagatggggtctcaccctctctgtcccccaggctggagtgcagtggctcaatctcgactcacctcaacctccacctctcaggttcaagtgattccccagcctcagcctccccagtagctgggattacaggcacacgccaccaggcccagctaatttttgtatttttagtagagaccaggttttgccacgttggccaggctggtctcaaactcctgacctcaggtgatccacccacttaggcctcccaaagtgctgggattacagccatgagccacccgccctgccccaatccaaagttttaacaatttgtagaattgaaagagaataccaagcatagaactctattttcagaaaagtagcgtaagttgcacacataaatataaatggtgcattaagatcactttttggaattctacttgctgatgttaacaatgtaagttttaaaagtttaaaatgtgcttgtgt

SEQ ID NO: 704053 - DNA, 635 bp, Homo sapiens
tgcaatatactcatataacaaacatgcacatgcaccccctaaatctaaaatttttcaaaagttaaacaatcttctagaatgatttaattttgacattttggaaacaacgaaaatcaatataaaatagtgtactccaacccaaaggttttttttttttttttcttttytttgagatggggtctcaccctctctgtcccccaggctggagtgcagtggctcaatctcgactcacctcaacctccacctctcaggttcaagtgattccccagcctcagcctccccagtagctgggattacaggcacacgccaccaggcccagctaatttttgtatttttagtagagaccaggttttgccacgttggccaggctggtctcaaactcctgacctcaggtgatccacccacttaggcctcccaaagtgctgggattacagccatgagccacccgccctgccccaatccaaagttttaacaatttgtagaattgaaagagaataccaagcatagaactctattttcagaaaagtagcgtaagttgcacacataaatataaatggtgcattaagatcactttttggaattctacttgctgatgttaacaatgtaagttttaaaagtttaaaatgtgcttgtgt

SEQ ID NO: 704054 - DNA, 769 bp, Homo sapiens
taatgacagcatttatgagagccactaaacaaaaattagtaacgaagtttttatttctgtttatattttatttaaatattttattaacttcttgtcaacttacttgacatatgggtttgaaaatttaggacacgtacactttgtacatgaattcaatgactagcttttagtttgttttattttgtaagcctcagtgattttccccaaaacatatccttagttcttctgctaacattttcacaggaataaagcacaaatagggaatatctgatcacagaggatactatgaatactgtcacactcacactagccactcatgtcctcaaacttagtacatatttgttttagaaaaatattctcagggaccttctcagtaacatcaagaaaaacgacttattgaaaagtggagatatgaaagcgtttgctacttctgttataaaamctcttccctggctagctgtgtgacacttattataaaggacccctaatcatggttcatagctgttacagttttttgtttattttcttatttaatgtctttaaggagttaaataagcaattttgaaaataataatataattattatagcctcaacataaaggaaaggagcagtatcaaagagcattttttttggtcaaacattatcagaaaataatgaatagagtttttataagaatatatggagaacatgctgaatcacttatcataatcaaacattagaagctaattccaatgtatttaggaaataagatatttttcttggcaggct

SEQ ID NO: 704055 - DNA, 769 bp, Homo sapiens
taatgacagcatttatgagagccactaaacaaaaattagtaacgaagtttttatttctgtttatattttatttaaatattttattaacttcttgtcaacttacttgacatatgggtttgaaaatttaggacacgtacactttgtacatgaattcaatgactagcttttagtttgttttattttgtaagcctcagtgattttccccaaaacatatccttagttcttctgctaacattttcacaggaataaagcacaaatagggaatatctgatcacagaggatactatgaatactgtcacactcacactagccactcatgtcctcaaacttagtacatatttgttttagaaaaatattctcagggaccttctcagtaacatcaagaaaaacgacttattgaaaagtggagatatgaaagcgtttgctacttctgttataaaacctcttycctggctagctgtgtgacacttattataaaggacccctaatcatggttcatagctgttacagttttttgtttattttcttatttaatgtctttaaggagttaaataagcaattttgaaaataataatataattattatagcctcaacataaaggaaaggagcagtatcaaagagcattttttttggtcaaacattatcagaaaataatgaatagagtttttataagaatatatggagaacatgctgaatcacttatcataatcaaacattagaagctaattccaatgtatttaggaaataagatatttttcttggcaggct

SEQ ID NO: 704056 - DNA, 543 bp, Homo sapiens
ccaaagactctacctcataataccattactttggcagaatttcataatatgaatttggaaggacacaaatattcagcccacaacatagagaaatatgttaatattatgtaaatattgttcctcatttttttctcatacttttagtattaattgatattttctaactccattattatttctctttawtggttggtgttctactacaaggaagaatgttcctgtttaaaatttatatgtattatatgaactcatgattcttcagttgtccaatagtttataatccactactctgtctctttctctatatatgtgtgtgtatgtgtgtatatatgtattatatgtgtgtgtatatatgtatatatatgatatatacattacgtatgatatacagatttgtatatatctatatatatacacacacatatagatacacacacatatatattcattatatataatatacatatatacacacacacatcctggctcttgcaaccttttgacatgtttctgtcttagtctgcttaggctgtgatgctaaaa

SEQ ID NO: 704057 - DNA, 592 bp, Homo sapiens
attttaacagatgcagaaactggagtagagaggttaggtgacttgcccacagccacacgggtaggaagcagwgatgtcaggatggggaccaggaaatctgcctctagtctgtgcctataacaaccacctgcctctctcctgcctcataaacccggcatcaggcatcctttttcccttccacactgaaattatgaggatcttatttaaccttatggattctcacctttttccaggttcctcttgagagacacatttctcccagaatctctactttcctttttcatgtggcagccaactttgcccagattacttttcttgtcccacctactattcccccaaatatgaagccaggcccatctctcattccctgacacacagctaagtccagaccacgtgatttaacaagagattactaaagcctttggaaaacagaaggggattaaagtgcacacggcagaacccatccacagacttcccacggtcccccatcactgacttcctgcaagtcaccatgttgaaggagccagtgcatctcagctattgggaggcacctctaccctgaacccctactctgctaaaacccatgtcaaac

SEQ ID NO: 704058 - DNA, 609 bp, Homo sapiens
tattaatccttaatcattacattatattcctcctcttaagcttaattcaatctctacagtaaatactgaaggtgaaaacagagagcatttttttatgtatgtatgtatgtttgagacagagtcttgctctgtcgcccaggttggagttcactggtgtgatctcagctcactgcaacctccacctcccaggttcaagcgattctcctgcctcagcctcctgagtagctgggattacaggcacctgtcaccacatccagctaattttttgtatttttagtagagatggggtttcaccatgttrgccagactggtctagaactcctgacctcaagtgatccacctgcctcagtaacccaaagtgctgggattacaggtgtgagccaccatgcaggcctggccagccagagagcattttaaatttcaaaatgactatgtggaagaagaaaatttacttagctcagacaggtccacaacatagaagggtacgtgcctccaaagatgaggagaagaaaaagagatatgggatcccaaatggggggaataaaagtacttgtgagaatagagggatcaatttctctgctcaaacagggctaccttcagtgtcagctc

SEQ ID NO: 704059 - DNA, 878 bp, Homo sapiens
tacagatgaagcttcgcttgttcacctgctgctcacctcctgctgtgtgacctggttcctaacaggccagggactggtaccagtctgtggcctgagggttgggggcccctggaatataggaccacrtttgcagtgtagagaacaaccaggacattcagtaaatagcttttatttcttaggttgtataaataaatattttgtaccttaataaaggctgtgccttgatcacaaatgacattacatggaagtactgagtctcaatcactgttgtagaaggcaaaagaatgaagttcaaacacacttgttgaaccaaaggaatgaataattgcttccatcaccatttctgcacttctatcttgacaaaagaagtatctgaaaacagcaattactgattttaacaatagttgacatttcttgctgtgcacattagtcagtatttacccttcaggtatgacattaatataacccacgcctaacacttttttagatacaaatgattattggttccctttgagccatcaagaatgatgacagttgtggagacagtagcaaatggcagcaactacctccttttttcaccactcctatagggcttcccaacaggactgttgtcttcttgggttacactggctcctggtcttttcttctccccatgggtgcttgttctggtttttaatactcctgtagggtcctcatggttccacagtcataacatccacactctgatccagaacatgaaggcatgctttatgctttacacatttaaagtgaaatgtagacctctatgaaaattatgtttaaaatataaattgcattcctgagtcagactaacctatggcaaactctttttaaattttactctgcagtacatttctttc

SEQ ID NO: 704060 - DNA, 878 bp, Homo sapiens
tacagatgaagcttcgcttgttcacctgctgctcacctcctgctgtgtgacctggttcctaacaggccagggactggtaccagtctgtggcctgagggttgggggcccctggaatataggaccacgtttgcagtgtagagaacaaccaggacattcagtaaatagcttttatttcttaggttgtataaataaatattttgtaccttaataaaggctgtgccttgatcacaaatgacattacatggaagtactgagtctcaatcactgttgtagaaggcaaaagaatgaagttcaaacacacttgttgaaccaaaggaatgaataattgcttccatcaccatttctgcacttctatcttgacaaaagaagtatctgaaaacagcaattactgattttaacaatagttgacatttcttgctgtgcacattagtcagtatttacccttcaggtatgacattaatataacccacgcctaacacttttttagatacaaatgattattggttccctttgagccatcaagaatgatgacagttgtggagacagtagcaaatggcagcaactacctccttttttcaccactcctatagggcttcccaacaggactgttgtcttcttgggttacactggctcctggtcttttcttctccccatgggtgcttgttctggtttttaatactcctrtagggtcctcatggttccacagtcataacatccacactctgatccagaacatgaaggcatgctttatgctttacacatttaaagtgaaatgtagacctctatgaaaattatgtttaaaatataaattgcattcctgagtcagactaacctatggcaaactctttttaaattttactctgcagtacatttctttc

SEQ ID NO: 704061 - DNA, 3121 bp, Homo sapiens
  misc_feature 2325, 2326, 2327, 2328, 2329, 2330, 2331, 2332, 2333, 2334,2335, 2336, 2337, 2338, 2339, 2340, 2341, 2342, 2343, 2344,2345, 2346, 2347, 2348, 2349, 2350, 2351, 2352, 2353, 2354,2355, 2356, 2357, 2358, 2359, 2360, 2361, 2362, 2363: n = A,T,C or G
  misc_feature 2364, 2365, 2366, 2367, 2368, 2369, 2370, 2371, 2372, 2373,2374, 2375, 2376, 2377, 2378, 2379, 2380, 2381, 2382, 2383,2384, 2385, 2386, 2387, 2388, 2389, 2390, 2391, 2392, 2393,2394, 2395, 2396, 2397, 2398, 2399, 2400, 2401, 2402: n = A,T,C or G
  misc_feature 2403, 2404, 2405, 2406, 2407, 2408, 2409, 2410, 2411, 2412,2413, 2414, 2415, 2416, 2417, 2418, 2419, 2420, 2421, 2422,2423, 2424: n = A,T,C or G
tgagactcactttctatgccatttactttgtgaagctttttctatttttcctggacaagattagttcctccaatttcagtgtttccatagcaatgatgatgaagcagcacaggaggaggttagtgaagaggatggtggtaacacagtcctctttatgcaccaggaattgtcttaagtagtttgaatttcaatttatgtaatccttgtaataacccccgaaggcaattctagcatttccattttataacacagcagacaagcactgaaatgttaggtaattcactcaatatcaaacagttatttattactgaagccagaatttgaactcaggtggtctagcttctgagtcagtgctctttattgccatacttcactgtatttacagctcacatttttaaggtggcatttataagctgtaataaagtcgtctgttttcttgtttaccccggtagaccgtgagtttctgcagggcagtgaccatgttagttgtgtttatactcttgcatataacccaaagtcaggcatatagacattcaataaataactttcaataactaagtaagggtttgaatttaaatcctgaaactttaagtccagttttttattttctctctatcacattagtcacattcattttatgtggcttttcgtcttactattataaatgagttctggaaatgcatcggctctattagttgaaatagtagtggagacatttattgaagaagactactatttcatttcaattatttcctttaatgttacaataattatgattcaaaaaggaatgctaatttcatgagatcttgttgtgcatgttaaaatgtagtctaatctcatagcatcttcttcaaggtctcacatttcttttctggaatgttccccactcttctatcccaaattatgttttctattataaatgatctgtaattttttggttcaaagtttttactaactacattggttgaaaggctcttctttttcattaatattccctttctatcactgagggcttactgatctttctctttctttagtgacacatttctatggaagtacaaactatcttgataccaatgccactcacgaccactataactgtgatcataatcatgatcatcatccttgtcctcattcaaatgtcaggtgggkttggtaaccttgcccatgttatctcagatgattaggttcagacctgaatccaaagtaaatttaacacctatcctaagattttcatgctctaagtcatttcacgttctcctgtagttttgaggtcctactttctctgaattatttcagtttagagagtatcttgtttctggacttcattatcttttggctataatgcatggaccgaaacacagaattcagccattttccacaatttctgctgtgaaaacctgctcacatcaggattccatatgtgaagcaggctttctaacatacaggtgtgaaggacttgtattcaagtcaaagtgagaagtacaaatttagttgaggcttctgatgttcatcatgctgtttggccatacttctttcattatttttctcccctcctctgcttgaccctccccataggtgacattttttgttcaagtctgacttagctaacaaaattctaacgacctttttttgttgtcttggtttctccaaacatatgcctgcctcaccctcctccaacaggcagcctctcagggtatgtttttctgaccacatatgtctttgcttctacctaacagacatttatgtgccattatgctttttgttttggtttccataataactgttttctcctatagatgatattttatagatctttaaagtactttgacttttttttgatatttttctcataatagacctgtcagataggagaggaccagatacattaaacttgttaactaaataacatagttgaagcatgtagtcccatgtttgaaacatgaagtttatattagataaggcttaaattctattctgtgtgtgtgtgtgtgtgtgtgcgtgtatgagtcttaaagttgaaagagaactcagggaccatttaatattagaaagataagatattacaatttctgctttacagatgctttacatgatgtccagagagtttcagtgatttgctaaaagtgaggagaaatggtgacatgtagtcacagaatccactctcttctacttcttggacagtgttcttcctcatttctctaggaagtgtatgctttagtgaaaatttttgaaaagtggggaataagacagtaggggagcagctgggcatgcatgtggttctcagatataggtcactgggggagaggatgcattgcaaaaggnnnnnnnnnnnnnnnnnnnnnnnnnnnnnnnnnnnnnnnnnnnnnnnnnnnnnnnnnnnnnnnnnnnnnnnnnnnnnnnnnnnnnnnnnnnnnnnnnnnnttatgacatagtaatgtatttcttttttagtaatacattacaaaataagtgccaatagttatactaataacttacataattttgaaataatacaagacaacatttctagatatcagcaatagctatcatttgaaaatagaatatctgtgatttctattgctgataccaatatggctagtactgctggaatttgtggctttacatttgcaattgagagaattactgatcagttggtaagaggttaatgaaaattgataaatattttcatacccaagttcacagatcacattggtttatacccacaaagcattcggggtgcacatgctttgtagtctcacatgatgtctgggaaatagtattcactcaataaatgtttgctaagctgaagtaaatagaaacaaaagagctatacatacatacagaaataaagtattaaaaagaattacttgcatacagcaaattactcttagtaaagcaataagattctactcatgcaggtaagatttcattagatcccacctgtaaacaagaatagtttgtatataagagaaccagttccttcagttatcctgtaatcacaaggctttaagagaagacataaagaaaagactatggagaatgttaaggaatagacattttaaacccgacagtaacggataagagaaatcaggaataatcattttatacataaaatttc

SEQ ID NO: 704062 - DNA, 3121 bp, Homo sapiens
  misc_feature 2325, 2326, 2327, 2328, 2329, 2330, 2331, 2332, 2333, 2334,2335, 2336, 2337, 2338, 2339, 2340, 2341, 2342, 2343, 2344,2345, 2346, 2347, 2348, 2349, 2350, 2351, 2352, 2353, 2354,2355, 2356, 2357, 2358, 2359, 2360, 2361, 2362, 2363: n = A,T,C or G
  misc_feature 2364, 2365, 2366, 2367, 2368, 2369, 2370, 2371, 2372, 2373,2374, 2375, 2376, 2377, 2378, 2379, 2380, 2381, 2382, 2383,2384, 2385, 2386, 2387, 2388, 2389, 2390, 2391, 2392, 2393,2394, 2395, 2396, 2397, 2398, 2399, 2400, 2401, 2402: n = A,T,C or G
  misc_feature 2403, 2404, 2405, 2406, 2407, 2408, 2409, 2410, 2411, 2412,2413, 2414, 2415, 2416, 2417, 2418, 2419, 2420, 2421, 2422,2423, 2424: n = A,T,C or G
tgagactcactttctatgccatttactttgtgaagctttttctatttttcctggacaagattagttcctccaatttcagtgtttccatagcaatgatgatgaagcagcacaggaggaggttagtgaagaggatggtggtaacacagtcctctttatgcaccaggaattgtcttaagtagtttgaatttcaatttatgtaatccttgtaataacccccgaaggcaattctagcatttccattttataacacagcagacaagcactgaaatgttaggtaattcactcaatatcaaacagttatttattactgaagccagaatttgaactcaggtggtctagcttctgagtcagtgctctttattgccatacttcactgtatttacagctcacatttttaaggtggcatttataagctgtaataaagtcgtctgttttcttgtttaccccggtagaccgtgagtttctgcagggcagtgaccatgttagttgtgtttatactcttgcatataacccaaagtcaggcatatagacattcaataaataactttcaataactaagtaagggtttgaatttaaatcctgaaactttaagtccagttttttattttctctctatcacattagtcacattcattttatgtggcttttcgtcttactattataaatgagttctggaaatgcatcggctctattagttgaaatagtagtggagacatttattgaagaagactactatttcatttcaattatttcctttaatgttacaataattatgattcaaaaaggaatgctaatttcatgagatcttgttgtgcatgttaaaatgtagtctaatctcatagcatcttcttcaaggtctcacatttcttttctggaatgttccccactcttctatcccaaattatgttttctattataaatgatctgtaattttttggttcaaagtttttactaactacattggttgaaaggctcttctttttcattaatattccctttctatcactgagggcttactgatctttctctttctttagtgacacatttctatggaagtacaaactatcttgataccaatgccactcacgaccactataactgtgatcataatcatgatcatcatccttgtcctcattcaaatgtcaggtggggttggtaaccttgcccatgttatctcagatgattaggttcagacctgaatccaaagtaaatttaacacctatcctaagattttcatgctctaagtcatttcacgttctcctgtagttttgaggtcctactttctctgaattatttcagtttagagagtatcttgtttctggacttcattatcttttggctataatgcatggaccgaaacacagaattcagccattttccacaatttctgctgtgaaaacctgctcacatcaggattccatatgtgaagcaggctttctaacatacaggtgtgaaggacttgtattcaagtcaaagtgagaagtacaaatttagttgaggcttctgatgttcatcatgctgtttggccatacttctttcattatttttctcccctcctctgcttgaccctccccataggtgacattttttgttcaagtctgacttagctaacaaaattctaacgacctttttttgttgtcttggtttctccaaacatatgcctgcctcaccctcctccaacaggcagcctctcagggtatgtttttctgaccacatatgtctttgcttctacctaacagacatttatgtgccattatgctttttgttttggtttccataataactgttttctcctatagatgatattttatagatctttaaagtactttgacttttttttgatatttttctcataatagacctgtcagataggagaggaccagatacattaaacttgttaactaaataacatagttgaagcatgtagtcccatgtttgaaacatgaagtttatattagataaggcttaaattctattctgtgtgtgtgtgtgtgtgtgtgcgtgtatgagtcttaaagttgaaagagaactcagggaccatttaatattagaaagataagatattacaatttctgctttacagatgctttacatgatgtccagagagtttcagtgatttgctaaaagtgaggagaaatggtgacatgtagtcacagaatccactctcttctacttcttggacagtgttcttcctcatttctctaggaagtgtatgctttagtgaaaatttttgaaaagtggggaataagacagtaggggagcagctgggcatgcatgtggttctcagatataggtcactgggggagaggatgcattgcaaaaggnnnnnnnnnnnnnnnnnnnnnnnnnnnnnnnnnnnnnnnnnnnnnnnnnnnnnnnnnnnnnnnnnnnnnnnnnnnnnnnnnnnnnnnnnnnnnnnnnnnnttatgacatagtaatgtatttcttttttagtaatacattacaaaataagtgccaatagttatactaataacttacataattttgaaataatacaagacaacatttctagatatcagcaatagctatcatttgaaaatagaatatctgtgatttctattgctgataccaatatggctagtactgctggaatttgtggctttacatttgcaattgagagaattamtgatcagttggtaagaggttaatgaaaattgataaatattttcatacccaagttcacagatcacattggtttatacccacaaagcattcggggtgcacatgctttgtagtctcacatgatgtctgggaaatagtattcactcaataaatgtttgctaagctgaagtaaatagaaacaaaagagctatacatacatacagaaataaagtattaaaaagaattacttgcatacagcaaattactcttagtaaagcaataagattctactcatgcaggtaagatttcattagatcccacctgtaaacaagaatagtttgtatataagagaaccagttccttcagttatcctgtaatcacaaggctttaagagaagacataaagaaaagactatggagaatgttaaggaatagacattttaaacccgacagtaacggataagagaaatcaggaataatcattttatacataaaatttc

SEQ ID NO: 704063 - DNA, 637 bp, Homo sapiens
aatatgacctaacacagtaatttgaatacaaacaggctacacacatcatgacatttattgaaacattgtgaataatatcaaggataaactcaaagcccagtaatagyggaaaggttaaaggaattatcaggaattacttttctaattagtttacagctatttaaaattctattgctgagtgccgataataacatggagaaatacctatggtaccttcagtaacaaatgagagtataaaatagtattattacaattatgaaaagttttaaaaaataattatacaaacaaaaagacttaaaatacatataaatgttaagtgacttactctgagtggtaggctttgggtaattttttctctcttctttctaatttattggatttctacattttctataattggtattcataacatttgtgatgaaggaaatataaatttattttttaaagctgaaaacaggagataaatgacataaagaatatatttagatggtacaagagcctaaatttctcaataataagtcataatattgctctgtcaaacctaacacttcatctccaacaattaatgttttaatgtgttttacgaggcattgccatctattttgatattacctcgaaagatcaatattgatggcca

SEQ ID NO: 704064 - DNA, 594 bp, Homo sapiens
ggattgattaggtaattacagagccctttgattttgtccaatatascttaagagtcaactaacgatttaaaagtctatctctaggtgtgtttcatagccctagtctggcttcacttacagtcatagagctagagttgtattcagtgggaggttttactgattttcatcaaaattaaaacaattagcttaataaaagcctaaattataaccatatctggacataaggggatgccacaagttggtcatgaaaagagattaatctctacactctcaaagccttggactaagagacattcattcattcaaacaaccctttttttttttttttttttttgagatggcgtctctgttgcccaggctgaagtgcggtggcacaatcttggctcagtgcaaccttcacctcccaggttcaatgcaaccttaaccttcagcctccctagtagctgggattacaggtgcttgccaccacacccagctaattttttgtatttttagtagaggcgggatttcaccatgttggccagaatggtctggaactccagacctcaggtgacccgcctgccttggcctcgccaagtgctgggattcaaacaa

SEQ ID NO: 704065 - DNA, 610 bp, Homo sapiens
taaaccacaagtctcaaaaatttcaaagaaaaaatttgaaagaacttgacttcatgaatcaataacacacacacataggcacacacacacacacattcacacacaaggaatcaacatgggcaagcaattaactggtctgcaaatgtaragatgttgcaattgttagataggtcctataaaataaccatgcttaatatgtttaaataaataaaagatgaaattttaaaaattacaaagaaacaaaaactattaaaattgacagagcagatttgaaaaaaaatagccaaatacaatttctaaaaataactaaaaaaatatgaaaaattaagagatgggttcaataatagattagacatggctacatagtgaattattgaagtaaaagatggagctaaggaaattctatagaatgtagcacagtgagataaataggctatttgatgaaaagtaatggttcttactaagtattagcatttaaaaaataaaaatgtttttggtatataagatacagtgataatgtctcacatatatcaactcaaacttccagaagaagagtgtaaagagaatgctaaaatatcaatacacaaattttttatggccttaaaatttt

SEQ ID NO: 704066 - DNA, 601 bp, Homo sapiens
caaggactctgctggcacccaaactgctggctgatgatgagcgttaaaaattcaacacatacacgcgatttcctgtaacctcaggaatccatgtttacacactttaaacagttgtcacatcttactttctgcatggctctttaactcggtgttccttaactttacacgttatacatgtggtatcttttgtcaatgaaacaccaagtgtcctaaagtcaaagcaatgtgttacatgactttatattgctcgcagtgcttagatgtagcaggtgctcaattcatttttgttgaatgaatacatttactgtatacaactaatcaagtgtgcgttttctctaaattcttataaaaacaatacttggggaaaataacaagaagaccctccccaatcctagcacaaaataccaaaaaaaaaaacttaaaatgggacaaaaacaacytacaatccttttcctcatccgcacttctgactgtacatcaggccagccatgcagaaatgagcaagagggtgcaagactactcttggggtaccagggagaacaacctaactccaaggagcctcctcagacaccctccacttctgggccattccttagcaaca

SEQ ID NO: 704067 - DNA, 1227 bp, Homo sapiens
tgggtctagccagttcttacacagtaaaggggtcagatggagcctgcctgtgatgtgcaatctagccaatccagaggtgtatctcctttatgtgaccactataccccagaaggcaatatttctttgatttactcacctttaaatgatattttgctatttgtataatgcctccactaaatgtaacaaatccacaagtataggatgaggctttaaggttaagcaaattttaattatattaagttgatatttaatatctttttttggtatgtttcgaattcccaatcataaatggtagaagggaagagctactattccttttaaaataacaataaacttttactaccaccaaatagaggcaaaattactatggccaatgttccttctgaaaatgaaaggaaactttagttccccgactcttattattcttccaccattatcagtcttggaaactaaatagagtaaggcatccataaattaacatgatgacaatacaaacttacatatattactatattttatttttttcttcaaagacgatattaacgttttactccaaaattgtcctaaatattaatatattttataatcatgttaataaataaaaaataaaatatatattggtaatttataaaaccttttcactggtcttttatttgttttacgtttgcaatgggaaaaaatacatatacatttttctctcgacaatattctggctaactagaacctccagaaatgactgagagatatgaatattgtataaagatacttttaaaccttgtatatacagagctaaagagttcttagtactgattattctttacaagcttttctccataagagagatccacatgatgttatgttctacataatgttatgaatatgctgctgaaagcaatttgctatagggttacaagtacttgattttgcaaatagaacacagaaatagtaaaatttaagtctaactctgtcgtcggtcaccaaaatgtgaaggattattcttatatttttsaaatatttcttttaacatcacttataattaaaacaccaataaagttatctcctcatcaaactgtgaggtgacaaacaaactcaaaatgtttagagatttataaacaagaaaaatacagtagcccatagccaggctgttcactatgaatcttctagaaaatgctttcctcaccctgtatgtttccatctatttctctaatgagcttatgtctgaatttc

SEQ ID NO: 704068 - DNA, 1435 bp, Homo sapiens
ttagcacttattgcaggtgtgacccttattctgggaaactggagtttaacaaaaagctccygagttcatggagttttcaatccagaggaagatgagacaaatgcattcgtttatacctgcagtccgtagtgtgcttcacggaaaattggatggccagatagagcagccatttctgcagaaagtcatcatctctcaacttgatggtaaacccctttctttcttcctctctggcttccctcacatttattctccagtagatatttatggaccgctagctgctcaccagattctatgcccttctctttttcctggacacatggctaatcttcattttcccgctagtgcctgagatcaggccaactacatgtaggcagaagtgatgtgggctccttccaggcctacccataaaaacttcctatgaacgtgcctccatgcctttttcccattctgctggatgaatgggaaaccctgaatggccaaggttacttggaagccatgagttgaagatggcaaagataaccatcagcctcggtctccgaatgaccttgttgaacaaagcccccttccccggctccttccccacatgcaattgacttggactctgcgtgaacaagaaacaaactttgcttgtctttgagccattctacattttgatctatttgttaagcagtgagtgaggtaccttaattttgtcaagtccctggtagctcttaagcgctatgccaggtggtggggatacagtggcaatccaggaactaaaaataaacatgtaaacaaacatgagggaactaaacaataagcatgtaaagaaaacagaaatatacatattgagataagtgcaatgaaaggaattaacaggtgataagagtaacaagctggggaaggggcagctggctgtgaactaggctttgaataaagcataggttttgactcctaaacagggattgttggttaaactctgaaagtaggaaactaattatcaattaaaggaggatacaggaaaattgcagaaacctaggacagcaccctgactccccttctaaacctgttccaaaatactacttctgcaaatggttaaaaattccaaaaggccgggtgcggtggctcacgcctgtaatcccaacactttgggagggacgaggtcaggagttcgagaccaacctggccaacatggagaaacccccgtctctactaaaaatacaaaaattagctgggcgtggtgatgcgtgccggtaatctgagtactcaggaggctgaggtaggagagtcgcttgaacccaggaggcagaggttgcagtgagccaagattgcaccattacactccaacctgggtgacaagagtgaaactccatctcaaaaaaaaaaaaaaagaaaaaagaaaaaaaattagccaggcatggcagctcaggcctgtagtcccagctatttgggagac

SEQ ID NO: 704069 - DNA, 1435 bp, Homo sapiens
ttagcacttattgcaggtgtgacccttattctgggaaactggagtttaacaaaaagctcccgagttcatggagttttcaatccagaggaagatgagacaaatgcattcgtttatacctgcagtccgtagtgtgcttcacrgaaaattggatggccagatagagcagccatttctgcagaaagtcatcatctctcaacttgatggtaaacccctttctttcttcctctctggcttccctcacatttattctccagtagatatttatggaccgctagctgctcaccagattctatgcccttctctttttcctggacacatggctaatcttcattttcccgctagtgcctgagatcaggccaactacatgtaggcagaagtgatgtgggctccttccaggcctacccataaaaacttcctatgaacgtgcctccatgcctttttcccattctgctggatgaatgggaaaccctgaatggccaaggttacttggaagccatgagttgaagatggcaaagataaccatcagcctcggtctccgaatgaccttgttgaacaaagcccccttccccggctccttccccacatgcaattgacttggactctgcgtgaacaagaaacaaactttgcttgtctttgagccattctacattttgatctatttgttaagcagtgagtgaggtaccttaattttgtcaagtccctggtagctcttaagcgctatgccaggtggtggggatacagtggcaatccaggaactaaaaataaacatgtaaacaaacatgagggaactaaacaataagcatgtaaagaaaacagaaatatacatattgagataagtgcaatgaaaggaattaacaggtgataagagtaacaagctggggaaggggcagctggctgtgaactaggctttgaataaagcataggttttgactcctaaacagggattgttggttaaactctgaaagtaggaaactaattatcaattaaaggaggatacaggaaaattgcagaaacctaggacagcaccctgactccccttctaaacctgttccaaaatactacttctgcaaatggttaaaaattccaaaaggccgggtgcggtggctcacgcctgtaatcccaacactttgggagggacgaggtcaggagttcgagaccaacctggccaacatggagaaacccccgtctctactaaaaatacaaaaattagctgggcgtggtgatgcgtgccggtaatctgagtactcaggaggctgaggtaggagagtcgcttgaacccaggaggcagaggttgcagtgagccaagattgcaccattacactccaacctgggtgacaagagtgaaactccatctcaaaaaaaaaaaaaaagaaaaaagaaaaaaaattagccaggcatggcagctcaggcctgtagtcccagctatttgggagac

SEQ ID NO: 704070 - DNA, 1435 bp, Homo sapiens
ttagcacttattgcaggtgtgacccttattctgggaaactggagtttaacaaaaagctcccgagttcatggagttttcaatccagaggaagatgagacaaatgcattcgtttatacctgcagtccgtagtgtgcttcacggaaaattggatggccagatagagcagccatttctgcagaaagtcatcatctctcaacttgatggtaaacccctttctttcttcctctctggcttccctcacatttattctccagtagatatttatggaccgctagctgctcaccagattctatgcccttctctttttcctggacacatggctaatcttcattttcccgctagtgcctgagatcaggccaactacatgtaggcagaagtgatgtgggctccttccaggcctacccataaaaacttcctatgaacgtgcctccatgcctttttcccattctgctggatgaatgggaaaccctgaatggccaaggttacttggaagccatgagttgaagatggcaaagataaccatcagcctcggtctccgaatgaccttgttgaacaaagcccccttccccggctccttccccacatgcaattgacttggactctrcgtgaacaagaaacaaactttgcttgtctttgagccattctacattttgatctatttgttaagcagtgagtgaggtaccttaattttgtcaagtccctggtagctcttaagcgctatgccaggtggtggggatacagtggcaatccaggaactaaaaataaacatgtaaacaaacatgagggaactaaacaataagcatgtaaagaaaacagaaatatacatattgagataagtgcaatgaaaggaattaacaggtgataagagtaacaagctggggaaggggcagctggctgtgaactaggctttgaataaagcataggttttgactcctaaacagggattgttggttaaactctgaaagtaggaaactaattatcaattaaaggaggatacaggaaaattgcagaaacctaggacagcaccctgactccccttctaaacctgttccaaaatactacttctgcaaatggttaaaaattccaaaaggccgggtgcggtggctcacgcctgtaatcccaacactttgggagggacgaggtcaggagttcgagaccaacctggccaacatggagaaacccccgtctctactaaaaatacaaaaattagctgggcgtggtgatgcgtgccggtaatctgagtactcaggaggctgaggtaggagagtcgcttgaacccaggaggcagaggttgcagtgagccaagattgcaccattacactccaacctgggtgacaagagtgaaactccatctcaaaaaaaaaaaaaaagaaaaaagaaaaaaaattagccaggcatggcagctcaggcctgtagtcccagctatttgggagac

SEQ ID NO: 704071 - DNA, 1531 bp, Homo sapiens
taagatatatgtaagtgagtgtgtccagataagtctgaagttctgggaagatgtcagaactagagctagagattcaaaagctattggcatataaaggttatagctagagtcctaagagtggaattatagcacccaagaaaaaataaaataagaagaggaatgggcagatgatagagccctggggaaaactaacatttttgggctaaatagaggagaggaataggttcatgagagaggctgagaaggaataatcacagaagtagtacagaagataaaccaggaaaacaaagtgatgaaggcagaatggtaagtgaaaagatgggggcactgagtaatttagaatgtcactttgtaagaagctataaagttcatcattgtcaatatcgtgatcataatgatcatcatcaaaatcatgagagtatttgctgaaactccctcaaattcctgattccaattaaatataaagtgtaaatatattacctgtttttcacaagccagtattctttcccattaagatcaccatagccaaccacaagtacaccatgattcacattctgagtacaggatggttcatagtagacacctgagaatcaaatatgggtgggaaaaaagagtgaatactataggataataaagggcattttaaaacggtattactttttattagcctgctttggatacatagcaaggttaatttaaaaagttaaggacatgtccaggcatggtggctcatgcctgtaatcccagaagtttgggaggccaaggcgggcgggtcacaaggtcaagagatcgagaccatcctggccaacatggtgacaccccatctctactaaaaatacaaaaattagctgggcatggtggcacgcacctgtagtcccagctactcaggaggctgaggcaggagaattgcttgaacccaggaggcagaggttgcagtgagctgagatcgtgccacctcactccagcctggcaacagagcaagactccatcttaaaaaaaaaaaaaaaagtcaaggacatatactgtcatgcataaactagggctcataattatttgccaccaatgctgtatttgtcagtgttcttgccaagcttagcatcactccagtcatagttcccccagaaaccttctttgataagcacaccacctttttctaagtttttttcttttttgtttttttctaagtatttttaaacttgcatacaatcagttattttaattctctgtgtatacaggcatatctcattttattgtgctttgctttattgtgctttgcagatattagcttttttttttttttaaggaacagtgttttgctctgttgtctaggctgtaatacaggtggtatgatcatagctaattgtaacctcaatctcctaggctccagtcatcctcctgatttkgcctcccaaagcgctggaattataggcatgagccactgcacccagctagatattgcattttttacaaattgaaggtttgtggcaactctacattcagcaagtctattggtaccattttcccaaaagca

SEQ ID NO: 704072 - DNA, 614 bp, Homo sapiens
aatggaaataaggcagttggaagaaaagaggatgaaaacaggtgaagattcttagttgtggaataagctaggttggctatgggttgataccatgtgtgcttgggtagtaaaggtagctagttttttctgcgtgttgtattaagccattatttatcaaatactaattacgttttatgcactaaatactagtccaagtattctatttgatatatggattaattcatttgttcctcctagtgccatgaggcaggtattattattcctgatttacagatgaggaaaccgaagacacagctaatatgtggcagagatcagaatcacaatctgcctctggagccttggcttaatcactgacagagcaacagccactcaggcagagaaaaaggagttggcatttacagttagaggagttaggactytagtaactctgcccgtttccctaaagcttaggattggctgtgataggggaaagtagcttatgaattgactggattgatgtaagtataacagaaaagagagattgtactcaaatttacagccatgttttttgacatttagaataatcagaggatacttttctgtagtgagaaatatacaaagagttgttcacacac

SEQ ID NO: 704073 - DNA, 567 bp, Homo sapiens
tggtttctctgtctttatgtctctcttcatctttctctaggcttcttgccattctcaattaaactccttaaaggtcttgcatttgaaatttgaaataaataaacttttgccagtcacatatttctgaatagctaattgcctatatctccttcatttaataagtaatgtcttaaaactaaatgattttattcatgttctctatctttctcattttctactgaattatcaagtaaatgcaacctgacaatctctctatctttcagaggtagaggataaagttttcctgtggttggatgttgcgatgccctataaatgccatcatattcccccaccaggctattccctgycctgtaagtttctctgaattttacacagaggcaagaataattaaactacaatcaaaatagtcctcagggactactgagatagttccagggagagtgctgtttaatgctaatttagggtcacagctaaggtgcagcatttacttaggccaaatttaggcataactcttgagatgtatagcccactcactggcctcatggaagaaataacttaaagagctaa

SEQ ID NO: 704074 - DNA, 1011 bp, Homo sapiens
aggtgtatatgtgtgtgcacacatatatgcacacatttatagaaaagtggttgataccctggctgttacttctgtccttgagaaaagccctttccttccatcccttgatcccmacttctgctccagttagagcctctttctagaaatctttctaggtttctggcctgtcctaatcctgatgggcagtattgttccttttgaacacaaagcagagccattctgggaaaggtagccctggagacccccacgaacaggcatgcaaaccaggagcagacagatctggaaggagcagacagctagaggatggtgcaagtgtgcataggcagataagcagggaatgtccaccggtccacaggtgggagctgctttcccctcttttacttcagcacagcaaaacagcctcctcaaaactagaaacaaactatcgatttcagtcatttctcttgggaggtcatgatatgagaattgccaagaccatggtggcaggagatcttctttctctctaacttgcaaatagggaagagctagacatggtcagtatgaggcagtgacaatgtgcctaagtgagaacttatgagggacagtcccacggtacctttaaaattctcacccaaagttctcccataggcctctgtgtttcaacatttttgtcatctgtgatagcctacctttctcccaaaggctttcagttgtctgtaaatcagagctcaagggaacattggctacccttagaatcatcaatgaggttttggtacactgagtgttcattcatgaagggcagtttgccctcacaatctggaccttaatctcctgattctggtccctagggaggcatggaggaaactgtcctgcagacctcaccagtgggtgtatctgatctacctgttgcaagagtgagacccatggaaggttttctctcatgcaaggtgtagagctgggggaccacacagggccaggagatgatcttgaaagaaaacaaacccctcctttgtcacctggaggaacttttgc

SEQ ID NO: 704075 - DNA, 1011 bp, Homo sapiens
aggtgtatatgtgtgtgcacacatatatgcacacatttatagaaaagtggttgataccctggctgttacttctgtccttgagaaaagccctttccttccatcccttgatccccacttctgctccagttagagcctctttctagaaatctttctaggtttctggcctgtcctaatcctgatgggcagtattgttccttttgaacacaaagcagagccattctgggaaaggtagccctggagacccccacgaacaggcatgcaaaccaggagcagacagatctggaaggagcagacagctagaggatggtgcaagtgtgcataggcagataagcagggaatgtccaccggtccacaggtgggagctgctttcccctcttttacttcagcacagcaaaacagcctcctcaaaactagaaacaaactatcgatttcagtcatttctcttgggaggtcatgatatgagaattgccaagaccatggtggcaggagatcttctttctctctaacttgcaaatagggaagagctagacatggtcagtatgaggcagtgacaatgtgcctaagtgagaacttatgagggacagtcccacggtacctttaaaattctcacccaaagttctcccataggcctctgtgtttcaacatttttgtcatctgtgatagcctacctttctcccaaaggctttcagttgtctgtaaatcagagctcargggaacattggctacccttagaatcatcaatgaggttttggtacactgagtgttcattcatgaagggcagtttgccctcacaatctggaccttaatctcctgattctggtccctagggaggcatggaggaaactgtcctgcagacctcaccagtgggtgtatctgatctacctgttgcaagagtgagacccatggaaggttttctctcatgcaaggtgtagagctgggggaccacacagggccaggagatgatcttgaaagaaaacaaacccctcctttgtcacctggaggaacttttgc

SEQ ID NO: 704076 - DNA, 631 bp, Homo sapiens
ttatcaatcagtacaccctaaatatgtgttgtttattgtagtaaataaatcaataccatatatgtggaaaataacctatatatgatcatccattttcaattctaagtgccttaattttaagcaggctacatggaaataaagagagaaagaagcagagtgtaccgagtcaccaccctccctccttcctgccttccttttcacccagcagccaggcacctattggttggggccccctcaactaccccttcccaaccccaccaaaaaatttagtataagctagcttgcaacatagacaattttaccttttcttaccagctaagagtagccaccagagccataagtcaaatgtttgaagtgtcctgagacagttgtaatgcattgtgggctatgataaaatgcagcagaaagaccctaaagaacgtacttgaagcccctgmctaacaatcaataggtgacactgggaaagattgtgacaccatagtactcagccaatgagaaaccaggggaaggacctatgcactacgggataaattgcttgttaaaactgtgctgggtcaagacaaggatgccctctctaaccactcctattcaacacagtattggaagttctggccagggcaatcaggcaaga

SEQ ID NO: 704077 - DNA, 2400 bp, Homo sapiens
gtggtttctgccacttgtgggaactttcagaccatgtacagacattaaactttcacctactggtttttaaagttcattgataatttttgactgaattactactatattgtttaccaaaaggtagctttctaactccacaacttcttctaaatttatttaatgatgttctcctatacaggaagagcttttctttctcttccctctatttatttatttatatcagtatggtctcatggatttctattttattcaaggattataattgtttaccgtcatcatttattttgacattcaattgtcccaaattcaatcagtagaactcttcattttgttcttaatttgtaattatttccagattttttgcaatgagtatatgatcactttttgtacttaggggaaagaaagctactcttaaaatgtaactgatgggtcgtgtgcaaattcttgcgcaacatggaagctcttctgataatayagtaagatcttcagtattaaaatgattcgtaaggccacttcaaacagtgaaatgctatgattctaaaaacatgttggtttacatttttcacattaaaatatttataaattttttattttgcagttttaatagtccaaacgtgacaatagaccctgagtttcggctatggttaagctcaaaatcatacagttcttttccaattcctgttcttaaaaagggtttaaaggtaagaacaaagtataacagatttaatgttgactgaggagccctgtttgaatgcaagtcatcttacattcaaaactctgagtttaaaagagaaagctaattctgataaattctgaaatgctaaatttctgctttgtgctcaaccctatactggggatgaggaagaacactaaagtagattcctacttacaaggaattcacaatttatatgttatttgctcaaacaaggatgttagacctccaattattataaagcaaaatttacaatttgtgttgttttcctgcccttcacttctctagcatttcttatttctgccctacttaaccgttttattattaattctctagaaagggtctgacagaaagcaggctaaaactgtttactaaaaagtcctcattaaagattatctgggacttctcatatccactattgaggctgaataaatagtaagacagtcaattctattagaccagggtccagttgaccaaaaggtggggtcctaacagcagagaaaactgaccgatggcataggcagaagggggtacccagactcccgatcacgtgcacactaccagctttcacagaagtgggtgggcatggagaaaatcaggtggatgaggcactttccagatacagccccaatccagcctaagaaacttcctgccacactgcttctcagctctgcccgtctcctgtatgtatctacccaaactgacagtactgagccatttcccaacatcccggttcctggggcagacagaacagggactggagaaacccacaactcttagtctgagactcgaaagattccacttgtctcccagagagcagcagaccatgctctcagacagcctttaatctttggtcaggagaggggaattggggggtggaggtactgggggtaggggaatgaagggtgtcagagagggacagaaatagcgcttcagggaatatttcatcttaagtagtccatcgctccacctccactttaagtctccatcagcattttaaatgtggctataattagtgcatacataaaactttatgggagtttttcatatgccattatttatacagacagagatgataattttcttgatatattaaaagagcacctacacataagtcagaaaaacattaacattccatacaaaatgggcaaaggacacaagaggtcaataaacacattttaaaaataaaagttcagcctctagatatcagaaaaatacaaatcaaaaactgcattaaattggctaagactataactatgatatagttagtgctattaaggatataatgaaataactactctcacataatgctgacaaggtaatatcagggagatattaatccagaaaggaaggtaatttcacagtatagagatagtgtttataaatttcatacaatttgatcatggcccacttctaggaaaaggccaaataaattatgatgtatttgtgtgataaaatagtatgctatcactaaaaatcaaaattaacacacactctctcttctctctctctctgccctccttccactcactttccccttcagatatagttctgaaggcggacagacacctacttttagagatatgagaatgagttctttaaagaatcagtcatagcagtcgggaaacagtgctcgataaatattttctcatttctccacaattagggctaagcaacaattgctggca

SEQ ID NO: 704078 - DNA, 2400 bp, Homo sapiens
gtggtttctgccacttgtgggaactttcagaccatgtacagacattaaactttcacctactggtttttaaagttcattgataatttttgactgaattactactatattgtttaccaaaaggtagctttctaactccacaacttcttctaaatttatttaatgatgttctcctatacaggaagagcttttctttctcttccctctatttatttatttatatcagtatggtctcatggatttctattttattcaaggattataattgtttaccgtcatcatttattttgacattcaattgtcccaaattcaatcagtagaactcttcattttgttcttaatttgtaattatttccagattttttgcaatgagtatatgatcactttttgtacttaggggaaagaaagctactcttaaaatgtaactgatgggtcgtgtgcaaattcttgcgcaacatggaagctcttctgataatacagtaagatcttcagtattaaaatgattcgtaaggccacttcaaacagtgaaatgctatgattctaaaaacatgttggtttacatttttcacattaaaatatttataaattttttattttgcagttttaatagtccaaacgtgacaatagaccctgagtttcggctatggttaagctcaaaatcatacagttcttttccaattcctgttcttaaaaagggtttaaaggtaagaacaaagtataacagatttaatgttgactgaggagccctgtttgaatgcaagtcatcttacattcaaaactctgagtttaaaagagaaagctaattctgataaattctgaaatgctaaatttctgctttgtgctcaaccctatactggggatgaggaagaacactaaagtagattcctacttacaaggaattcacaatttatatgttatttgctcaaacaaggatgttagacctccaattattataaagcaaaatttacaatttgtgttgttttcctgcccttcacttctctagcatttcttatttctgccctacttaaccgttttattattaattctctagaaagggtctgacagaaagcaggctaaaactgtttactaaaaagtcctcattaaagattatctgggacttctcatatccactattgaggctgaataaatagtaagacagtcaattctattagaccagggtccagttgaccaaaaggtggggtcctaacagcagagaaaactgaccgatggcataggcagaagggggtacccagactcccgatcacgtgcacactaccagctttcacagaagtgggtgggcatggagaaaatcaggtggatgaggcactttccagatacagccccaatccagcctaagaaacttcctgccacactgcttctcagctctgcccgtctcctgtatgtatctacccaaactgacagtactgagccatttcccaacatcccggttcctggggcagacagaacagggactggagaaacccacaactcttagtctgagactcgaaagattccacttgtctcccagagagcagcagaccatgctctcagacagcctttaatctttggtcaggagaggggaattggggggtggaggtactgggggtaggggaatgaagggtgtcagagagggacagaaatagcgcttcagggaatatttcatcttaagtagtccatcgctccacctccactttaagtctccatcagcattttaaatgtggctataattagtgcatacataaaactttatgggagtttttcatatgccattatttatacagacagagatgataattttcttgatatattaaaagagcacctacacataagtcagaaaaacattaacattccatacaaaatgggcaaaggacacaagaggtcaataaacacattttaaaaataaaagttcagcctctagatatcagaaaaatacaaatcaaaaactgcattaaattggctaagactataactatgatatagttagtgctattaaggatataatgaaataactactctcacataatgctgacaaggtaatatcagggagatattaatccagaaaggaaggtaatttcacagtatagagatagtgtttataaattycatacaatttgatcatggcccacttctaggaaaaggccaaataaattatgatgtatttgtgtgataaaatagtatgctatcactaaaaatcaaaattaacacacactctctcttctctctctctctgccctccttccactcactttccccttcagatatagttctgaaggcggacagacacctacttttagagatatgagaatgagttctttaaagaatcagtcatagcagtcgggaaacagtgctcgataaatattttctcatttctccacaattagggctaagcaacaattgctggca

SEQ ID NO: 704079 - DNA, 1508 bp, Homo sapiens
ccttccttgcttcttactctttttttcgctttgtcccagtccattgtggctctgtcttctggaatctgttttagggaaacctctgtaatgccaggtctattaaggagaggttctggggatccaggccgctgtggtacccgctctttctcaattctccctaagattggaggcaaccactgggcaaatgctcactattctccagatcacccaccctgggggagttcctgctggaggcatctaattcttgcctctatttccttttcctgtgcttttctcatcagactgtggctacacaatctctcaagtgagatcaatgaagattctgaagcgatttggtggcccagctggtctatggaccaaggatccactggggcaaacagagaagatctacgtgttagatgggacacagaatgacacagcctttgtcttcccaaggctgcgtgacttcacccttgccatggctgcccggaaagcttcccgagtccgggtgcccttcccctgggtaggcacagggcagctggtatatggtggctttctttattttgctcggaggcctcctggaagacctggtggaggtggtgagatggagaacactttgcagctaatcaaattccacctggcaaaccgaacagtggtggacagctcagtattcccagcagaggggctgatccccccctacggcttgacagcagacacctacatcgacctggcagctgatgaggaaggtctttgggctgtctatgccacccgggaggatgacaggcacttgtgtctggccaagttagatccacagacactggacacagagcagcagtgggacacaccatgtcccagagagaatgctgaggctgcctttgtcatctgtgggaccctctatgtcgtctataacacccgtcctgccagtcgggcccgcatccagtgctcctttgatgccagcggcaccctgacccctgaacgggcagcactcccttattttccccgcagatatggtgcccatgccagcctccgctataacccccgagaacgccagctctatgcctgggatgatggctaccagattgtctataagctggagatgaggaagaaagaggaggaggtttgaggagctagccttgttttttgcatctttctcactcccatacatttatattatatccccactaaatttcttgttcctcattcttcaaatgtgggccagttgtggctcaaatcctctatatttttagccaatggcaatcaaattctttcagctcctttgtttcatacrgaactccagatcctgagtaatccttttagagcccgaagagtcaaaaccctcaatgttccctcctgctctcctgccccatgtcaacaaatttcaggctaaggatgacccagacccagggctctaaccttgtatgcgggcaggcccagggagcaggcagcagtgtttttcccctcagagtgacttggggagggagaaataggaggagacgtccagctctgtcctctcttcctcactcctccct

SEQ ID NO: 704080 - DNA, 1508 bp, Homo sapiens
ccttccttgcttcttactctttttttcgctttgtcccagtccattgtggctctgtcttctggaatctgttttagggaaacctctgtaatgccaggtctattaaggagaggttctggggatccaggccgctgtggtacccgctctttctcaattctccctaagattggaggcaaccactgggcaaatgctcactattctccagatcacccaccctgggggagttcctgctggaggcatctaattcttgcctctatttccttttcctgtgcttttctcatcagactgtggctacacaatctctcaagtgagatcaatgaagattctgaagcgatttggtggcccagctggtctatggaccaaggatccactggggcaaacagagaagatctacgtgttagatgggacacagaatgacacagcctttgtcttcccaaggctgcgtgacttcacccttgccatggctgcccggaaagcttcccgagtccgggtgcccttcccctgggtaggcacagggcagctggtatatggtggctttctttattttgctcggaggcctcctggaagacctggtggaggtggtgagatggagaacactttgcagctaatcaaattccacctggcaaaccgaacagtggtggacagctcagtattcccagcagaggggctgatccccccctacggcttgacagcagacacctacatcgacctggcagctgatgaggaaggtctttgggctgtctatgccacccgggaggatgacaggcacttgtgtctggccaagttagatccacagacactggacacagagcagcagtgggacacaccatgtcccagagagaatgctgaggctgcctttgtcatctgtgggaccctctatgtcgtctataacacccgtcctgccagtcgggcccgcatccagtgctcctttgatgccagcggcaccctgacccctgaacgggcagcactcccttattttccccgcagatatggtgcccatgccagcctccgctataacccccgagaacgccagctctatgcctgggatgatggctaccagattgtctataagctggagatgaggaagaaagaggaggaggtttgaggagctagccttgttttttgcatctttctcactcccatacatttatattatatccccactaaatttcttgttcctcattcttcaaatgtgggccagttgtggctcaaatcctctatatttttagccaatggcaatcaaattctttcagctcctttgtttcatacagaactccagatcctgagtaatccttttagagcccgaagagtcaaaaccctcaatgttccctcctgctctcctgccccatgtcaacaaatttcaggctaaggatgmcccagacccagggctctaaccttgtatgcgggcaggcccagggagcaggcagcagtgtttttcccctcagagtgacttggggagggagaaataggaggagacgtccagctctgtcctctcttcctcactcctccct

SEQ ID NO: 704081 - DNA, 569 bp, Homo sapiens
tcagcaactagcaactggcctatactattttttattwaaaaaaaaaaattggtttctttaaagtttctttttggaattttactactaattatgtctaattctaaatttcaaataatcatctcagaaaaatcaaggaagtcatttgcttacgttcaaaagaaaacggaacttggggtttcagaggagaaactactggaaagagaggtaagtatatagtaaaggaactaacaacatcaacaaagaatgtgagaactcctggggcagatgaaggccttcagatcaaggatgggggacattaggatggggatggaggtgaggccccagccttggacaatcatcgcctgccccttcattgcaaatagcagcaacagcccaggctgaaggtttaggaaacctaaacctcttgtaagggagaccgtctcttcctaggggtgcatcttcctaagggtttaaaggcaaaatcttgaccagaagttgtctggtgtttatataagaaaaaaatgtgtatttatgtgccccaaaatgaatacatttttaacaaaatggtgggcggaaagtctcaaattata

SEQ ID NO: 704082 - DNA, 650 bp, Homo sapiens
gaaatcattcacttttcttcatttacatcccctggagacagtgctaagttacytctctgctaaattacctgtcagatttcaagttgaaagagaaatgcaattgtgagctgaattgcatccttcccccagaattcatatattgaaccacctcaaaaggtgactgtatttggagatggattctttaaagaggtgattaagttaaaacgaggtcattggggtgagcccctaattcagtatgactgatgtccttataagaagaggagattaggacacacagagagaaaccagagatgggtgcacacagaggcaaggccatgtgaagatacattaagaaggcagccttctgcaagccaaggagagagccctcagaagaaaccaaacttaccaaatttttatttccagcctccagaactatgagaaaataaatttctgatgtttaagccacccagtctgtggtgttttgttatggtagccctagtagactcatacaaatgccacaagatgtgcaagaagatataacttttcatttgatcaagagtagctttgttaggctcatttaagaaacctaggcccaattagccgggcatggtgacattcgcctgtaattccagatactggggagactgagacaggagaattgcttgaacctg

SEQ ID NO: 704083 - DNA, 673 bp, Homo sapiens
ggaatcttgctctgtcgcccagactggagtgaaatggcacgatctcagctcactgcaacctccgcctcccaggttcaagtgattctcctgcctcagcctcctgagtagctgggattacagwcatgtgccaccacacctggctaattttttgtatttttagtagagacagggtttcatcatgttggccaggctggcttcaaactcctgaccttgtgatccgcccacctcggcctcccaaagtgctgggattacaggcacaagccactgtgtccagccctaaattatgttttgttgatagtacattttagttttactttgaaaaactgactagatgcaaagcccccaataaaaatgccctgatactgctgtggaaacatgtgatggcatacaggcaaaccattgcatatgatcaagactttatcttattcaaatcctttgaatattagtaactatgtgaaaacttcctttttaacattaactcttagacaaaagacctcattaatggagaaattgtgtctatcatgctcattatgcttatcacgacttacttaatccagaaactggtacatggtggatactcagcagaattaatctgcaagatgtccattacaataaacagtaacagtgagtttgatggttgggtagcttaagctcttagtaaggataactttct

SEQ ID NO: 704084 - DNA, 673 bp, Homo sapiens
ggaatcttgctctgtcgcccagactggagtgaaatggcacgatctcagctcactgcaacctccgcctcccaggttcaagtgattctcctgcctcagcctcctgagtagctgggattacagacatgtgccaccacacctggctaattttttgtatttttagtagagacagggtttcatcatgttggccaggctggcttcaaactcctgaccttgtgatccgcccacctcggcctcccaaagtgcygggattacaggcacaagccactgtgtccagccctaaattatgttttgttgatagtacattttagttttactttgaaaaactgactagatgcaaagcccccaataaaaatgccctgatactgctgtggaaacatgtgatggcatacaggcaaaccattgcatatgatcaagactttatcttattcaaatcctttgaatattagtaactatgtgaaaacttcctttttaacattaactcttagacaaaagacctcattaatggagaaattgtgtctatcatgctcattatgcttatcacgacttacttaatccagaaactggtacatggtggatactcagcagaattaatctgcaagatgtccattacaataaacagtaacagtgagtttgatggttgggtagcttaagctcttagtaaggataactttct

SEQ ID NO: 704085 - DNA, 673 bp, Homo sapiens
ggaatcttgctctgtcgcccagactggagtgaaatggcacgatctcagctcactgcaacctccgcctcccaggttcaagtgattctcctgcctcagcctcctgagtagctgggattacagacatgtgccaccacacctggctaattttttgtatttttagtagagacagggtttcatcatgttggccaggctggcttcaaactcctgaccttgtgatccgcccacctcggcctcccaaagtgctgggattacaggcacaagccactgtgtccagccctaaattatgttttgttgatagtacattttagttttactttgaaaaactgactagatgcaaagcccccaataaaaatgccctgatactgctstggaaacatgtgatggcatacaggcaaaccattgcatatgatcaagactttatcttattcaaatcctttgaatattagtaactatgtgaaaacttcctttttaacattaactcttagacaaaagacctcattaatggagaaattgtgtctatcatgctcattatgcttatcacgacttacttaatccagaaactggtacatggtggatactcagcagaattaatctgcaagatgtccattacaataaacagtaacagtgagtttgatggttgggtagcttaagctcttagtaaggataactttct

SEQ ID NO: 704086 - DNA, 1602 bp, Homo sapiens
acaaaaagctcatttccacataacctcccaacccatattaagtctttagaagtcgtgcacacacccatctgtgggatgataaatacatggcatttatgctgcttctccttccctggtgcccacagaaaacacagcaagttgatagtggcattattttactcattgatccaagaaggacctcagagcccagtttatagagtgattcttgctgccaccgtaactgaagagagagactatgtgatatgatttaccatccttgctgtaggggtaataggacattaggctattcccagggggcagcacaacctctgagtaatactgcatgtcttttccattctcaaacttttttttacaagtgaaatgaagacccatagatcatttggtatgattgtatacatataaaatgagcttagagttttttcttctctcctcctcatgttttattaagtaatttaaaagcataattgctattattgattatatgtagcaattcaggaagttgggataaacagtatgatgtgaaggggtggcagccaatgcaagatttcattgtattaaggaaatgaaaacaaggcacccctttatatattgtgcattatattaagtaatttatacattatttctaagacgtaaccacctggtgaaaaatttataccttatttccattttatagatggaacaagttatttaactggtagttgagctggctattaacctagctctatcccaccttagatctcacagatttgtgatcacattcacaacgagaataagcttcagggactggctggcctctcacagatcatgtgatgtttcttatacaccatatctggaaggcacatggccccagtaataacatttaatttcctcagttgtaaaggctgttctcaaattttcagagcaagctatatgtcattgctttacttttaacttggagtggtttattgaataatatattaggaaagaaatgaatgagcctaatttttcccccctctaacccattyggagttaagttcctcttgtatcactttaagataaaagacaataattctgccagtttctagggactttggaagtctcaatatgatggtatataatagccccttgaatctcctagaagaaaattgctatgcaaacacaaattattgtattccagtagagaaatgatccaacaagcaggtgcacatacgtgcacatgcacaattcatctgaatggaagacactgagaacttttctagcgcttgctccttaacaacactgagattatagttaactagctactttacaataaaacatgaaccaattttattgcatcatcagaaagactgactttttgtgaaatattgtcacaagcagttaagttctaaagtgtggtcaacttcctctagatacaaaatttataggtaattttatattctgatacataattatagagaaggttttcatgattacctttatatattttaaggaaagttagatttgccaagggaatcaaaatcaatcaatttcatttcaacatactttatagaaggtttaatgcaaaatgcaattccaaataatgaaatcacaaaatgcagcactaatgacagatcaggacaaata

SEQ ID NO: 704087 - DNA, 1602 bp, Homo sapiens
acaaaaagctcatttccacataacctcccaacccatattaagtctttagaagtcgtgcacacacccatctgtgggatgataaatacatggcatttatgctgcttctccttccctggtgcccacagaaaacacagcaagttgatagtggcattattttactcattgatccaagaaggacctcagagcccagtttatagagtgattcttgctgccaccgtaactgaagagagagactatgtgatatgatttaccatccttgctgtaggggtaataggacattaggctattcccagggggcagcacaacctctgagtaatactgcatgtcttttccattctcaaacttttttttacaagtgaaatgaagacccatagatcatttggtatgattgtatacatataaaatgagcttagagttttttcttctctcctcctcatgttttattaagtaatttaaaagcataattgctattattgattatatgtagcaattcaggaagttgggataaacagtatgatgtgaaggggtggcagccaatgcaagatttcattgtattaaggaaatgaaaacaaggcacccctttatatattgtgcattatattaagtaatttatacattatttctaagacgtaaccacctggtgaaaaatttataccttatttccattttatagatggaacaagttatttaactggtagttgagctggctattaacctagctctatcccaccttagatctcacagatttgtgatcacattcacaacgagaataagcttcagggactggctggcctctcacagatcatgtgatgtttcttatacaccatatctggaaggcacatggccccagtaataacatttaatttcctcagttgtaaaggctgttctcaaattttcagagcaagctatatgtcattgctttacttttaacttggagtggtttattgaataatatattaggaaagaaatgaatgagcctaatttttcccccctctaacccatttggagttaagttcctcttgtatcactttaagataaaagacaataattctgccagtttctagggactttggaagtctcaatatgatggtatataatagccccttgaatctcctagaagaaaattgctatgcaaacacaaattattgtattccagtagagaaatgatccaacaagcaggtgcacatacgtgcacatgcacaattcatctgaatggaagacackgagaacttttctagcgcttgctccttaacaacactgagattatagttaactagctactttacaataaaacatgaaccaattttattgcatcatcagaaagactgactttttgtgaaatattgtcacaagcagttaagttctaaagtgtggtcaacttcctctagatacaaaatttataggtaattttatattctgatacataattatagagaaggttttcatgattacctttatatattttaaggaaagttagatttgccaagggaatcaaaatcaatcaatttcatttcaacatactttatagaaggtttaatgcaaaatgcaattccaaataatgaaatcacaaaatgcagcactaatgacagatcaggacaaata

SEQ ID NO: 704088 - DNA, 723 bp, Homo sapiens
tatttcacagaagacttctagttctactcaatgcttcactcattcaacaaagttattaagttcctactaagtgtttggcttgtcatccagcaggagatacaaagaacacaggcaattgaaktattataacaggtagatcactatgtgatctactgagaaccattggaaaataaaagaagatgctattaataattaccctggggcaggggatggcagctaggaggcaggactaacttgcaactctcactcagatgtgtggagactcacatcatgaacttttgttccaagaaccgctgcaggaacataccaggaaaactgaaagaattcaccagccctttgaaagaagtggcttgccactgcaaactctgtgaaatagctgaaaaactgtgagtgcctaaagtgtgagagggggaaagtctacctctgaacacacatcttcactggggaaacctgaaaatccaaataacaggagaagaatttaactttacctagagctgaaatgaatttagagagccaagcaaaatacaaaagtagaagaagcagtgggaagagccctacaggcactcctggtcccccaggaagtccagggaagtcatttctgactttatctcacagggttccttggggagggctgccagtgggattggggaagggccacagggagaaggaaacttccagctgaactttgtaataattttgactgagtacgaattgtcctggtca

SEQ ID NO: 704089 - DNA, 656 bp, Homo sapiens
ttctcacttataagtgggagatgaatgatgagaacacatggaggggaacaacacacactgggacctgttggagaggggttgggggagagagaggatcaggaaggttagctwatggatgttggtcttaatacctagatgatggaatgatctgtgcagcaaaccaccatggcacacatttacctatgtaacaaactttgacatcctgcacatgtacccctgaacttaaaataaacattgaagaaaaaaaagaaaattattgagatattttatatatttttttggtgctaagatttcaagatctggtatgaattttacacttacagcacatctcaatttggactcaccacatttcagatgctcaagagctgcatgtgtctagaggctaccatagtgaatagggcagcactaggtccgtactttctcaaactttggcacaggtgggaataatccagagataacattaaacacagattcctggacttcattcattcacaaaggtcagggggaggacctgaacattcgcatttccaaaaagctcccagttgatgctgatactgccagtctacagaccacacttggggtagcttgcaaaacaaagcacgcacatctcccagtgaattgtggcaattataatgatgataacaaatagttataat

SEQ ID NO: 704090 - DNA, 580 bp, Homo sapiens
taatcatacattttaaaataaaagagtatatttgtttgcaagaacaacaacaaaaatgcctcaggtgatagataccctatttaccctgatgtaattattacacattgcatgcctgtatcaaaatattacagataacccacaaatatatatacctactgtgtacccacaaaaattaaaaagtaaaataaacccacttgagcacatgtcattttcactgctgttacaggcggctggacatgtccctcaagtactcatgttgaattccttaccccccagaatgtgactgtattcagacacgggattctttttttctgtttaaacagagacaggggtctcgccttgttgcccaggctggtctcaaactcctgggcttaagtgatcttccaacctgggcctcccaaagtgctaggattacagggaacatagggtctttaaggaggtaattaagttaaaatgaggtcattagggtgggccctaatccartattactggtctccttaaaagaaaagaagattaggacaaagatacaggcacagaggtaagaccatgtgacaagagccacctacaagccaaggagagg

SEQ ID NO: 704091 - DNA, 1255 bp, Homo sapiens
tttttttttggtagagacagggtttcgccatgttgcccgggctggcctcaaactcctgagctcaagcgatccacctgcctcagcctcccaaagtgctaggattacagacataagccactgcactcaaccataattttttttaaactttttgtaaagacgatgtctcactatgttgcccaggctagtctcgaactcttgggctcatgcagtcctcccactctgacctaccaaartgctgcaattacaggcatgagctactgcgcctggccagaacatgcattttagaactgattaaataagtaaggtaaatcagacacgaaggatatacagaataagccaaagagtagggtgtagggtgtagggagacttggaagaaggaaagtactgtgaagaggggacagcttgtgctgagaggtctggagggaagagggtggctgcttatagctcagtaagactgcagttagagcctgtgggctggaaggtgacagatgaggctggagatggaaacaagggccagatcatggcctgcctcataagtagatggccttagtcccagtttacatctgtagtgcatctttttgatcttaagtgccctgttggacaataaattatatgatcaccctactaataagccatttttagatatgtgctttttatcttaagagaaatgagaacaatggaagggttttaaacagacagtaacaaaatcagattgtgaaagtgtgtgtgtgttggaggcagggtgtgtattgcttaatttgaatgtttttgatgagctaatatgttcatacaagtcaaaactttaaaaaacacaaaagtgaaaaatctcccttccaccctggccctccttccaccccttccaccctacctcacggccaacccaattttcttccctaaaagcaactgatactatcaatttcttgtgtgccctttcagaattttgttttccttttctttgagatggagtctcactctgtttcctaagctggagtacagtggcgcgatttcggctcactgcaacctccacctcccagattcaagtcattttcctgcctcagcctccccgtagctgggactacaggtgtgtgtcagcgcgccagctaatttttgtatttttaatagagacggggtttcaccatgttggccaggctggtcttgaactcctgacttctagcgatccgcctgcctcggcctcccaaagtgctgggaatacaggcgtgagccaccatgcccggcccctttcagacatatttaa

SEQ ID NO: 704092 - DNA, 635 bp, Homo sapiens
atttttaaatgaaatttgagaaataataaaaacattgttgaaataaaatttactgactgttaaattaaattggttcaggcactcaagaagcagatgctaagatagaatttttcatgtaaggattatgttggagaaaaatacctgtgagggataaaggacagagggagaagagaatagggcaaatattgactctaaaatccaggtctgacagctgagaaaaaaagagaagaaaggagaagattttaaaagtagaaagagcctgagactgtggtgcatctctgagaaaatgttagcccgattggtagagatcagtarttaggctggatttgggaagtggaaatccatgctgttagaccaacccattcatagcttccatctttgtctagagatgctagagaaactgaccacaggaggctctctgatgtgtatgttccccatgagagcagcaagtccttccctgagaagcaatctgggtgttacatcttcacatctaccaaggatcgtttcatagaagaggaattgctagtgaaaaccatagcaggctgggcgcggtggctcacgcctgtaatcccaagcacttttggagcccaaggtgggcaaatcacaaggtcaagagttcgagaccagcttggcaa

SEQ ID NO: 704093 - DNA, 635 bp, Homo sapiens
atttttaaatgaaatttgagaaataataaaaacattgttgaaataaaatttactgactgttaaattaaattggttcaggcactcaagaagcagatgctaagatagaatttttcatgtaaggattatgttggagaaaaatacctgtgagggataaaggacagagggagaagagaatagggcaaatattgactctaaaatccaggtctgacagctgagaaaaaaagagaagaaaggagaagattttaaaagtagaaagagcctgagactgtggtgcatctctgagaaaatgttagcccgattggtagagatcagtagttaggctggatttgggaagtggaaatccatgctgttagaccaacccattcatagcttccatctttgtctagagatgctagagaaactgaccacaggaggctctctgatgtgtatgttccccatgagagcagcaastccttccctgagaagcaatctgggtgttacatcttcacatctaccaaggatcgtttcatagaagaggaattgctagtgaaaaccatagcaggctgggcgcggtggctcacgcctgtaatcccaagcacttttggagcccaaggtgggcaaatcacaaggtcaagagttcgagaccagcttggcaa

SEQ ID NO: 704094 - DNA, 1204 bp, Homo sapiens
tcattattatacttcaccacagaactaaactcgtgtttcaacatttcttatatgtgacctgttttacatggttttaccttttcttttactgtggcatgcacaaagcatgctcaagaaatatgtcttctgtgactgagattgtaaatgttcacttatctttagttatattaattcttggacaatgttgattggattgataaatttctaggtaaaagtgaaacataaaaatgtaaatattgaaataccagatttttatcatgtctatgcagattaaaacaagaaattaaccagcagtttatgtacaaacattaaacacatggtaatgttttgcatggtttttatgttmcccttgagaaccttgctaatatggagaattcaccaccatttcaaagtgagttcttatcatttagaacctcactttcaatgacgaacaacagatgagctaaccagtgtagaatgattctgcaaaataagaaaatctccaatcgattatggggtacaggaaaatatagatcctaaatgccagtctgcacagagaccgcatgctatgataaagtttccagcactcagaagcaaaagtatatgaattagtttgccagttaaaattgtttgggatcaactgttctcattgtataaaatgtttttatgtcatttgtcctattttcttttaaaaatatgacactttattatcatcttgaggtgacatatctagttggcatacgtgtttgtcttcacattttgaagagttggatgtggatggattttactctttgtaaaatttcacaattgaaaatacctcgttacatatttttaaaaataatgaccatttagaagttgaataagttttgtaatttgtcatgaaaaacttgtttttcaaagcataaaattcattttaatagctactgttaaaaaacaaaaatgcttatggattttcttttgtaagtttgccaaaccattcagtttcttttctgtttgccaaaccattcagaaagtgacttgcatgtagctcacacatttctctcattttcttctatttgtgggtcataaatataagaaaacaatgaattttgataaatgtaatatggtatttttctaagatcaattaatgtttcaagggtagattttttcaaccatcactggggccttttaatttctattgaatgagacacaattaaaattacattggcactaagaaaaacaatca

SEQ ID NO: 704095 - DNA, 1016 bp, Homo sapiens
attgcagcactgttcacaatagcaaagacttggaaccaacccaaatacccatcaatgatagactgaataaagaaaatgtggcacatatacaccatggaaccctatgcagccacaaaaaaggatgagttcatgtcctttgcagggacatatataaagctggaaaccaccattctcagcaaactaagacaagaacagaaaattaaacaccgcatgttctcactcataagtgggagttgaacaatgagaccacatgaacacagggaggagaacgtcacacaccagggcctgttagcggtacgggcctaggggagggatagcattaggagaaataccaaatgtagatgacgggttgatgtgtgcagcaaaccaccatgtcrcatgtatacctatgtaacaaccctgcacgttctgcacatgtatcccagaatttaaagtataataaaaaaatagcaaaaaaggaaaaatttgtgtgatctcaaaaactcctttgtaatcatttcccgcaatttaagtgttaagataacattgtgcaattcttagagcttgcaaatcctgttaaaacccaatttcctgtctcaaggtggttcaatattgttgctaattacatgactgcctgattagtttcctggcgctacttccaattagttgagaagaaatttaatattttgtgtcattttttctcatcataaaagaaaggatatgattagaatgttctttttgtaaggtttaggaggattaaataatatttgcaagaaaatagtatgtcttgagtgttcaaaaatatgtatatatggtattatgattattcatcttttcaggttgagtgaagggaattaattaaaaatacatgaaacagtacattaaaaattataaccagtgtctaaatgccaggtattattatgtaatctggttagagaaaaccaaggtacaaaataattgtcacattatcttctcttagacacactaatgctagttaaaaggattctgaattagagttcccaactactcaggaattc

SEQ ID NO: 704096 - DNA, 1062 bp, Homo sapiens
gtaagaaaataataaaaagatataaggtaatttttctccctccaacttttaaagaaatataactatgaagtaattatataactatatacttacatatatatttacatattatattatatttgactttcaagaagtcactgctgtccccttaataatagtaaaatattatttaaacagttgatcccaatgcaaaaggaaatgagtgtcagcatctattttataactactaatttaaaatagaagtggtaggtgagagctctgattattttgtttattaaacaaaagagcactgcccaccattggctgggtacatacaagaagggaagaacattgattaattacaatactaaataaatatttctctgaaaatattttataaagagagataaaaagagaaagatagtttataaccctaaataagcttaggcacattagtttgggtaaaaacaagtaaaattattttagaatctggtattagttttctattcttgtgttataaattaccataaatttagcactttaaaacaacactcagttattgtctctcaataattgtttcttttttattttaattcttgtgggtatacagtatgtgcacatgaaatgttttcatataggtatgcaaaggataatggatgcaatcatataatgcatgcaattccatcatggagaatggggtgtccaacctctcaagagtttaccctttgtattacaaacaatccaattatactcttttagttatttttaaatgcagagttaaattattattgactataatcactctctttctattttcttttgtacctattaaccattcccactcttccctccagaccccactccctttcccagcctctggtaaccatccttctattctctatctccatgagttcaattattttawttttttgttaccgcaaataagtgagaacatgtagtgtttgtctttttgtgcctggcctgtttcacttaacatgatgatctccagttccattcatgttgttgcgaatgacaggatctcattctgttttatggctgaaaaatattccactgtgaatatgt

SEQ ID NO: 704097 - DNA, 557 bp, Homo sapiens
tatttgtattccttaagctcagaatccytctcctataatacaacccactgcttgatgtcacctggttttcttcacatttctctatgggaactgaagctcaggaagatagaacaatgctgatactctggctactgatattgctgagaataataccacccttcatgttacccaggagtctcatgtcttctgccagaacccagaaactctggcaggattgttagcttgcaagtaaggtaaaatctcattttccttgtaatttgtaacattcttaacatattctttgtaatttgtaacattcttaacatcaactcacttgttgatgattcccacgtacattattttattgttgacttataatgtgtcccaagtttaagggatcattttggttttctagaagtacttatgctcaactagggcatcctctagacctttaagttcatgtcatcttgatagtagagatttaaatgttatcttcccacaaatctctttcttatattatctctttttcctgccgagaatgataagtaaggtttcacaccatataggtcaagaaaatg

SEQ ID NO: 704098 - DNA, 1960 bp, Homo sapiens
caatcatttactcttgtttaaactaaaatcctcaaattgatttcctaaaatttgaattgaaatcatgtttaatactccatattttaatattaaagacaaaatgaatgtggtgtttgttgccttctctttgtcaccaacatggaaaacacttcccaattatttattttctatgtgcaayagggaaaagtttataaacagatttaataagttataattattctaattaatcctccagagattatcacaaaattaaagaaaacagggattgttaagaaataaccagggctattaatattataaatgtaaattaaatgtacatatttgtattactaataatttctaaagagagatggcactttatacattaaaatcggtaagaatgttaaaaaaaggtacttacaaattcaattatatcaataaatacaaaaatgtattattgggaaatgcagaatatgccatgttttccaatatatttataaaaactaatgcataaattaaccatgcattacacacctgaaaaaaacttatttcagctacagacctttacaaaaaataattacaagtaattttgtttgctattatattctattaatccaagtttttcaaacctccatgacatgttctaatgggtttcaactttcttcccctccttagtataaatgtacactgccatatttggtcactgttagggactgaatggtgtcccctaaaaagatatgtttaaattctaacctcaatcctacctgtcaatatgaccttgtttcaaaatagcatctttgcagctgtaatgaagtcaagatggggtcacaagggtaggctctgatccaaaatcactggtgtttttgtaagagggaaatttggacacacacgtacatacacagagaacactgtgtgatgacagagcagagaacagacttacgctgccataagctaaggaattcctggagctaccagaaactgagacagacaaagaaattacctattctagagggttctgaggggcaaggccctgctggctgacaccctgatttcagatttcttgcctccagaaatgtgagagaataaatttctctcgtttaagccacccagtatgtggtacttcgttaccgcagcccgaagaaacaaatacagtcacacatttgtgattatatgtgaaagtggtatattataatcacatgatcagatgttcaaagtaatacatttcaatagaacatctaaattatctttcagtttaatttgttcttcaatgtttccactgaacaacagagcctcaatctctctttattattttaatctataaagggcactttttgtaatgatctcatgtgtcttgctgtttacagcacatctatgaaccattgatgtatacatatatcctcaaacaaaaactcatgctcaaacaataaatctgaagagacaaaagattaatatttttaaaagatttagaaaacggaatggttatgaagtacttcacatcaaaacaatcagacatgaatactattttacaccctacccaattagcactgaatgctaatctgtttggattcttggaaactccacttctttgttaaatcactgaaaaacaagactcttcttgggctagattccaagcactcttgaggctataggattatcactgtagcttgtctgttttataaacaaactttaatttagttttgtaagaaactgccaaaggagctttctttaactaaataacaactctgccacttgaaagacatcattcatcaactttctttgtgggagtattgttattatgaaactaaaagcaggcattctttcttgagtgcttctggattttaattatcaaattttaatgtcaccagatatttactgaaaggaaaacatcaattttaataagctacctaagactgaaaaacataaacggtattccactgcaaagccaagttcacttgagtcttgtgagtttgcttaatatata

SEQ ID NO: 704099 - DNA, 1960 bp, Homo sapiens
caatcatttactcttgtttaaactaaaatcctcaaattgatttcctaaaatttgaattgaaatcatgtttaatactccatattttaatattaaagacaaaatgaatgtggtgtttgttgccttctctttgtcaccaacatggaaaacacttcccaattatttattttctatgtgcaatagggaaaastttataaacagatttaataagttataattattctaattaatcctccagagattatcacaaaattaaagaaaacagggattgttaagaaataaccagggctattaatattataaatgtaaattaaatgtacatatttgtattactaataatttctaaagagagatggcactttatacattaaaatcggtaagaatgttaaaaaaaggtacttacaaattcaattatatcaataaatacaaaaatgtattattgggaaatgcagaatatgccatgttttccaatatatttataaaaactaatgcataaattaaccatgcattacacacctgaaaaaaacttatttcagctacagacctttacaaaaaataattacaagtaattttgtttgctattatattctattaatccaagtttttcaaacctccatgacatgttctaatgggtttcaactttcttcccctccttagtataaatgtacactgccatatttggtcactgttagggactgaatggtgtcccctaaaaagatatgtttaaattctaacctcaatcctacctgtcaatatgaccttgtttcaaaatagcatctttgcagctgtaatgaagtcaagatggggtcacaagggtaggctctgatccaaaatcactggtgtttttgtaagagggaaatttggacacacacgtacatacacagagaacactgtgtgatgacagagcagagaacagacttacgctgccataagctaaggaattcctggagctaccagaaactgagacagacaaagaaattacctattctagagggttctgaggggcaaggccctgctggctgacaccctgatttcagatttcttgcctccagaaatgtgagagaataaatttctctcgtttaagccacccagtatgtggtacttcgttaccgcagcccgaagaaacaaatacagtcacacatttgtgattatatgtgaaagtggtatattataatcacatgatcagatgttcaaagtaatacatttcaatagaacatctaaattatctttcagtttaatttgttcttcaatgtttccactgaacaacagagcctcaatctctctttattattttaatctataaagggcactttttgtaatgatctcatgtgtcttgctgtttacagcacatctatgaaccattgatgtatacatatatcctcaaacaaaaactcatgctcaaacaataaatctgaagagacaaaagattaatatttttaaaagatttagaaaacggaatggttatgaagtacttcacatcaaaacaatcagacatgaatactattttacaccctacccaattagcactgaatgctaatctgtttggattcttggaaactccacttctttgttaaatcactgaaaaacaagactcttcttgggctagattccaagcactcttgaggctataggattatcactgtagcttgtctgttttataaacaaactttaatttagttttgtaagaaactgccaaaggagctttctttaactaaataacaactctgccacttgaaagacatcattcatcaactttctttgtgggagtattgttattatgaaactaaaagcaggcattctttcttgagtgcttctggattttaattatcaaattttaatgtcaccagatatttactgaaaggaaaacatcaattttaataagctacctaagactgaaaaacataaacggtattccactgcaaagccaagttcacttgagtcttgtgagtttgcttaatatata

SEQ ID NO: 704100 - DNA, 1960 bp, Homo sapiens
caatcatttactcttgtttaaactaaaatcctcaaattgatttcctaaaatttgaattgaaatcatgtttaatactccatattttaatattaaagacaaaatgaatgtggtgtttgttgccttctctttgtcaccaacatggaaaacacttcccaattatttattttctatgtgcaatagggaaaagtttataaacagatttaataagttataattattctaattaatcctccagagattatcacaaaattaaagaaaacagggattgttaagaaataaccagggctattaatattataaatgtaaattaaatgtacatatttgtattactaataatttctaaagagagatggcactttatacattaaaatcggtaagaatgttaaaaaaaggtacttacaaattcaattatatcaataaatacaaaaatgtattattgggaaatgyagaatatgccatgttttccaatatatttataaaaactaatgcataaattaaccatgcattacacacctgaaaaaaacttatttcagctacagacctttacaaaaaataattacaagtaattttgtttgctattatattctattaatccaagtttttcaaacctccatgacatgttctaatgggtttcaactttcttcccctccttagtataaatgtacactgccatatttggtcactgttagggactgaatggtgtcccctaaaaagatatgtttaaattctaacctcaatcctacctgtcaatatgaccttgtttcaaaatagcatctttgcagctgtaatgaagtcaagatggggtcacaagggtaggctctgatccaaaatcactggtgtttttgtaagagggaaatttggacacacacgtacatacacagagaacactgtgtgatgacagagcagagaacagacttacgctgccataagctaaggaattcctggagctaccagaaactgagacagacaaagaaattacctattctagagggttctgaggggcaaggccctgctggctgacaccctgatttcagatttcttgcctccagaaatgtgagagaataaatttctctcgtttaagccacccagtatgtggtacttcgttaccgcagcccgaagaaacaaatacagtcacacatttgtgattatatgtgaaagtggtatattataatcacatgatcagatgttcaaagtaatacatttcaatagaacatctaaattatctttcagtttaatttgttcttcaatgtttccactgaacaacagagcctcaatctctctttattattttaatctataaagggcactttttgtaatgatctcatgtgtcttgctgtttacagcacatctatgaaccattgatgtatacatatatcctcaaacaaaaactcatgctcaaacaataaatctgaagagacaaaagattaatatttttaaaagatttagaaaacggaatggttatgaagtacttcacatcaaaacaatcagacatgaatactattttacaccctacccaattagcactgaatgctaatctgtttggattcttggaaactccacttctttgttaaatcactgaaaaacaagactcttcttgggctagattccaagcactcttgaggctataggattatcactgtagcttgtctgttttataaacaaactttaatttagttttgtaagaaactgccaaaggagctttctttaactaaataacaactctgccacttgaaagacatcattcatcaactttctttgtgggagtattgttattatgaaactaaaagcaggcattctttcttgagtgcttctggattttaattatcaaattttaatgtcaccagatatttactgaaaggaaaacatcaattttaataagctacctaagactgaaaaacataaacggtattccactgcaaagccaagttcacttgagtcttgtgagtttgcttaatatata

SEQ ID NO: 704101 - DNA, 1960 bp, Homo sapiens
caatcatttactcttgtttaaactaaaatcctcaaattgatttcctaaaatttgaattgaaatcatgtttaatactccatattttaatattaaagacaaaatgaatgtggtgtttgttgccttctctttgtcaccaacatggaaaacacttcccaattatttattttctatgtgcaatagggaaaagtttataaacagatttaataagttataattattctaattaatcctccagagattatcacaaaattaaagaaaacagggattgttaagaaataaccagggctattaatattataaatgtaaattaaatgtacatatttgtattactaataatttctaaagagagatggcactttatacattaaaatcggtaagaatgttaaaaaaaggtacttacaaattcaattatatcaataaatacaaaaatgtattattgggaaatgcagaatatgccatgttttccaatatatttataaaaastaatgcataaattaaccatgcattacacacctgaaaaaaacttatttcagctacagacctttacaaaaaataattacaagtaattttgtttgctattatattctattaatccaagtttttcaaacctccatgacatgttctaatgggtttcaactttcttcccctccttagtataaatgtacactgccatatttggtcactgttagggactgaatggtgtcccctaaaaagatatgtttaaattctaacctcaatcctacctgtcaatatgaccttgtttcaaaatagcatctttgcagctgtaatgaagtcaagatggggtcacaagggtaggctctgatccaaaatcactggtgtttttgtaagagggaaatttggacacacacgtacatacacagagaacactgtgtgatgacagagcagagaacagacttacgctgccataagctaaggaattcctggagctaccagaaactgagacagacaaagaaattacctattctagagggttctgaggggcaaggccctgctggctgacaccctgatttcagatttcttgcctccagaaatgtgagagaataaatttctctcgtttaagccacccagtatgtggtacttcgttaccgcagcccgaagaaacaaatacagtcacacatttgtgattatatgtgaaagtggtatattataatcacatgatcagatgttcaaagtaatacatttcaatagaacatctaaattatctttcagtttaatttgttcttcaatgtttccactgaacaacagagcctcaatctctctttattattttaatctataaagggcactttttgtaatgatctcatgtgtcttgctgtttacagcacatctatgaaccattgatgtatacatatatcctcaaacaaaaactcatgctcaaacaataaatctgaagagacaaaagattaatatttttaaaagatttagaaaacggaatggttatgaagtacttcacatcaaaacaatcagacatgaatactattttacaccctacccaattagcactgaatgctaatctgtttggattcttggaaactccacttctttgttaaatcactgaaaaacaagactcttcttgggctagattccaagcactcttgaggctataggattatcactgtagcttgtctgttttataaacaaactttaatttagttttgtaagaaactgccaaaggagctttctttaactaaataacaactctgccacttgaaagacatcattcatcaactttctttgtgggagtattgttattatgaaactaaaagcaggcattctttcttgagtgcttctggattttaattatcaaattttaatgtcaccagatatttactgaaaggaaaacatcaattttaataagctacctaagactgaaaaacataaacggtattccactgcaaagccaagttcacttgagtcttgtgagtttgcttaatatata

SEQ ID NO: 704102 - DNA, 1960 bp, Homo sapiens
caatcatttactcttgtttaaactaaaatcctcaaattgatttcctaaaatttgaattgaaatcatgtttaatactccatattttaatattaaagacaaaatgaatgtggtgtttgttgccttctctttgtcaccaacatggaaaacacttcccaattatttattttctatgtgcaatagggaaaagtttataaacagatttaataagttataattattctaattaatcctccagagattatcacaaaattaaagaaaacagggattgttaagaaataaccagggctattaatattataaatgtaaattaaatgtacatatttgtattactaataatttctaaagagagatggcactttatacattaaaatcggtaagaatgttaaaaaaaggtacttacaaattcaattatatcaataaatacaaaaatgtattattgggaaatgcagaatatgccatgttttccaatatatttataaaaactaatgcataaattaaccatgcattacacacctgaaaaaaacttatttcagctacagacctttacaaaaaataattacaagtaattttgtttgctattatattctattaatccaagtttttcaaacctccatgacatgttctaatgggtttcaactttcttcccctccttagtataaatgtacactgccatatttggtcactgttagggactgaatggtgtcccctaaaaagatatgtttaaattctaacctcaatcctacctgtcaatatgaccttgtttcaaaatagcatctttgcagctgtaatgaagtcaagatggggtcacaagggtaggctctgatccaaaatcactggtgtttttgtaagagggaaatttggacacacacgtacatacacagagaacactgtgtgatgacagagcagagaacagacttacgctgccataagctaaggaattcctggagctaccagaaactgagacagacaaagaaattacctattctagagggttctgaggggcaaggccctgctggctgacaccctgatttcagatttcttgcctccagaaatgtgagagaataaatttctctcgtttaagccacccagtatgtggtacttcgttaccgcagcccgaagaaacaaatacagtcacacatttgtgattatatgtgaaagtggtatattataatcacatgatcagatgttcaaagtaatacatttcaatagaacatctaaattatctttcagtttaatttgttcttcaatgtttccactgaacaacagagcctcaatctctctttattattttaatctataaagggcactttttgtaatgatctcatgtgtcttgctgtttacagcacatctatgaaccattgatgtatacatatatcctcaaacaaaaactcatgctcaaacaataaatctgaagagacaaaagattaatatttttaaaagatttagaaaacggaatggttatgaagtacttcacatcaaaacaatcagacatgaatactattttacaccctacccaattagcactgaatgctaatctgtttggattcttggaaactccacttctttgttaaatcactgaaaaacaagactcttcttgggctagattccaagcactcttgaggctataggattatcactgtagcttgtctgttttataaacaaactttaatttagttttgtaagaaactgccaaaggagctttctttaactaaataacaactctgccacttgaaagacatcattcatcaactttctttgtgggagtattgttattatgaaactaaaagcaggcattctttcttgagtgcttctggattttaattatcaaattttaatgtcaccagatatttactgaaaggaaaacatcaattttaataagctacctaagactgaaaaacataaamggtattccactgcaaagccaagttcacttgagtcttgtgagtttgcttaatatata

SEQ ID NO: 704103 - DNA, 1833 bp, Homo sapiens
ttaaaatatttttctttgaaaataattagtgctcatcttaaaggcatggtgatatgattggttttggcactaacaactatttcaggatgtttcattcatattgttttgaaagagttaatggttaatgttgtatttactcaaggaaacagatttgcaacctgtccagttgctatgggcaactacatttttatgttcaataagttaatctatgtaaaaaaggatagaaactgtaaatgattacagtaatatacatttattaaataagactttggaaaatactaaaaagtataatacgtcacccatagttctttcaacaaacacatattctgttgctattttgagacctttcccttctttttcaccccacacatttttttgcaactgtagtgttgtttgtatcatgtatgcatttttacatcactggyttccagctaacattatatcatagttgttttcattaaagccattactttaaaaagaaacacacacacacacggcacataggattatctattcttttaatatcattttgccatcttgcatgttagtgcctatgaaacaatccgtgataaaatgcatttatattccttccccaactgttctttataacacatttttctctcacaaattaccctgttctttagttcagaatccatttcgctcattaccacttattatattgccatatatgggcaagtttatacaaggtttcctcatggttatctgccagattaacttctaacacaaacaccctttaggagaaattatctgtggtgattatgttgcatctctattgctctctgcttgctcacatatccctctctatgattgttctttctccttaagctccaactttcattcatttatttatttggcaaatatttacagagcacttttacatgccaggcaatgtgcttggcactcgaccaccacaatggtgagcagggcacaatttttgacagtcaattacaaataatatgaaaagtgcttatttgtgtaaatagaaggtattatgacagaaagagtacaggcaatcagttctgtctttggggaatcgagaatatcttccttgagaacatggctttatcagctgtaatactgccagcccaggatatgagtacctggccagaaaaggaagacttagttgttatgaaggatttcctcaaatattattttggtaactcaggtagattcaggaatgaaatatgctacaactggaacaatgcaagctgttaagaaatgggtaaccaagttccagccaaagaattatctttaaagtggggaaggaccaaggcaaactcattttgctacagagctgcctcagatgactgtcccaatgggtggcccaatgcatagtacctaatgggcatagcaagcccccataaatgtaatatgtatattgatatcaggaggtttagcccagtgggtgaagcagtactgcagataattctgaagtgcaggacattaggagaacttcctatacacagcagatctgtggacagaaagtcctggaggcaggatctagatttgggaaagggccctggtctctggctttgaattcagtaggccttactgtaagacagagaagcattcgagtagagtcgacatgcaatggcatctaagggaaggaaacccaggctgaaactttatgatatcctgggtcaacatggagtacaaggaaggctgtgttattgggaaggtgacacacttcaggtactagctacactgaatttgattaggtaggtttttttctaccaaaataaagtatgcttgcagacacactacattattttcctccatttgtaacccttcaaaatataattctacactatc

SEQ ID NO: 704104 - DNA, 1833 bp, Homo sapiens
ttaaaatatttttctttgaaaataattagtgctcatcttaaaggcatggtgatatgattggttttggcactaacaactatttcaggatgtttcattcatattgttttgaaagagttaatggttaatgttgtatttactcaaggaaacagatttgcaacctgtccagttgctatgggcaactacatttttatgttcaataagttaatctatgtaaaaaaggatagaaactgtaaatgattacagtaatatacatttattaaataagactttggaaaatactaaaaagtataatacgtcacccatagttctttcaacaaacacatattctgttgctattttgagacctttcccttctttttcaccccacacatttttttgcaactgtagtgttgtttgtatcatgtatgcatttttacatcactggtttccagctaacattatatcatagttgttttcattaaagccattactttaaaaagaaacacacacacacacggcacataggattatctatwcttttaatatcattttgccatcttgcatgttagtgcctatgaaacaatccgtgataaaatgcatttatattccttccccaactgttctttataacacatttttctctcacaaattaccctgttctttagttcagaatccatttcgctcattaccacttattatattgccatatatgggcaagtttatacaaggtttcctcatggttatctgccagattaacttctaacacaaacaccctttaggagaaattatctgtggtgattatgttgcatctctattgctctctgcttgctcacatatccctctctatgattgttctttctccttaagctccaactttcattcatttatttatttggcaaatatttacagagcacttttacatgccaggcaatgtgcttggcactcgaccaccacaatggtgagcagggcacaatttttgacagtcaattacaaataatatgaaaagtgcttatttgtgtaaatagaaggtattatgacagaaagagtacaggcaatcagttctgtctttggggaatcgagaatatcttccttgagaacatggctttatcagctgtaatactgccagcccaggatatgagtacctggccagaaaaggaagacttagttgttatgaaggatttcctcaaatattattttggtaactcaggtagattcaggaatgaaatatgctacaactggaacaatgcaagctgttaagaaatgggtaaccaagttccagccaaagaattatctttaaagtggggaaggaccaaggcaaactcattttgctacagagctgcctcagatgactgtcccaatgggtggcccaatgcatagtacctaatgggcatagcaagcccccataaatgtaatatgtatattgatatcaggaggtttagcccagtgggtgaagcagtactgcagataattctgaagtgcaggacattaggagaacttcctatacacagcagatctgtggacagaaagtcctggaggcaggatctagatttgggaaagggccctggtctctggctttgaattcagtaggccttactgtaagacagagaagcattcgagtagagtcgacatgcaatggcatctaagggaaggaaacccaggctgaaactttatgatatcctgggtcaacatggagtacaaggaaggctgtgttattgggaaggtgacacacttcaggtactagctacactgaatttgattaggtaggtttttttctaccaaaataaagtatgcttgcagacacactacattattttcctccatttgtaacccttcaaaatataattctacactatc

SEQ ID NO: 704105 - DNA, 857 bp, Homo sapiens
cagatacttggattctttctcttctgtttttaaatttgatctaataaactattattttccatttcaggaaaatgcctcagatctatatatcttgaggcattatatagaaactgtttctcttgatgttttagtatgaaatctatgaaaagctgatagtcccacaggcatgacaaaattaagatcaccctccgattttcagtctatgttcatgccctttagttttaaggacttccacaaaaaccagatacttggattctttctcttctgtttttaaatttgatctaataaactattattttccatttcaggaaaaaaatatgtagtggacatttatcctgttttctttttcacgtatatagtttctgcagtaactttagatttccttttaattaacttaatctgctctacttattttccaaacacataagcatcttttaaataactgttatcgtctactattaactaaataaaacttcgattcccttctaagagtataaaaatataacttttgcattaacytatactagagttcagtattttagtttatcatatatgaaattttattttttgaagttctcagtaatgatttctgatttacaaatagactttgtctaatgattttatttatgtatttatttttgagatggagtttcactcttgtcacccagactggagtacagtggtacgatctcggctcactgtaacctctgcctcctgggttcaagtgattctcctgcctcagcctcccaagtagcgaggattacgggcacccaccaccaagcccagctaatttttgtatttttagtagagacagagtttcaccatgttggccaggctggtctcaaactcctgacctc

SEQ ID NO: 704106 - DNA, 1614 bp, Homo sapiens
gccaaaggcaggaatccaagctttctctaggtcacagggtacctgggaaaactcccagtgtctgtcagctggcatcaggcactgggagtttttattatcaagcttttttattaatgagttattactgatatcaatcctcagctcaataataaagttgcttttcactgggtttgtttcaagcctgttgctgagctttggtactctgaagtccacagatttaatgagaagcaaagaaaatcaatttaacccactttattcaaagaaccttttcattacattattttacttcctatgttgacatatttcctacaacacatttccggctgtacagtttttgcattgctataaaaaatagtgttctacatagactcctttttttgttgtttccgcctttttatttttaagatattcagtatcagttttatcttatgtcaggcaatttcatttttagcttctataatgtatcacaaatgaccttgattcatttcctcatttgataagtaaacatttcacattttgataatacatttgtgagaatacttaatcacaagttcagctagtgttatgctttaaaataatcacaaggatttttagtgtccttgttagtatacggaaattaaaatgcactatcccaatttgggggctttaagagttactgcctgtagaagctgcagtctttagagaataaattgtctccaggcactatatttgcaattcttactaaattacctggttgcctggatatctccctggcccagagagaagaaaaccaccaatttgctctttttcataatctcaaatccagaacctacaaatagagtaattggtatgcagattctttgatgactagctctgctctttggagagcatgttatgagtattttagccttttcttttaaaaaggttagatttattcatcctttgacttcctcccaccaatcagtaaataagcaaaaacaagtaacatttcagtaaaatatccaacaaataaaattttatacctattgccaatgaaagtaataaagaatgtggatagtccttacggagtatgcacagagggcctctgagaaattacaaaagaatcctggaatcctgtcaggggtatccaatcttttggcttccctgggccacactggaaaaagaagaattgtcttgggccatacataaaatacactaacacaaatgatagctgatgagctaaaaaaaaaaaaaaaaaccaaaaacaacaacaaaaaaaagggtcggtgcataaatctcataatgttttaagaaagtttatgaatttgtgttgggccgcattcaaagccatcctgggccaagggttggacaagctggctgtaattacaattggattgcaaaggacttgctccttggccctgttaatccagtgagccagaactcaaatcayttctttctgctgaatcatcaagcccaagttaacaattgaacactgcatcctgaactgaaaggtgcaaaggtgaaagcaagtttaaacaatcccaatgatttttctctttgttaaatggcagaaaacaaccagttgagtatttatccttttgcaaaaccagttaactgaattccagttatttgttccaattcagagttcagttttca

SEQ ID NO: 704107 - DNA, 1590 bp, Homo sapiens
  misc_feature 1255, 1256, 1257, 1258, 1259, 1260, 1261, 1262, 1263, 1264,1265, 1266, 1267, 1268, 1269, 1270, 1271, 1272, 1273, 1274,1275, 1276, 1277, 1278, 1279, 1280, 1281, 1282, 1283, 1284,1285, 1286, 1287, 1288, 1289, 1290, 1291, 1292, 1293: n = A,T,C or G
  misc_feature 1294, 1295, 1296, 1297, 1298, 1299, 1300, 1301, 1302, 1303,1304, 1305, 1306, 1307, 1308, 1309, 1310, 1311, 1312, 1313,1314, 1315, 1316, 1317, 1318, 1319, 1320, 1321, 1322, 1323,1324, 1325, 1326, 1327, 1328, 1329, 1330, 1331, 1332: n = A,T,C or G
  misc_feature 1333, 1334, 1335, 1336, 1337, 1338, 1339, 1340, 1341, 1342,1343, 1344, 1345, 1346, 1347, 1348, 1349, 1350, 1351, 1352,1353, 1354: n = A,T,C or G
gaagacttctttctggagaataaaggaaaatgtttttacatttttccaaaggaaaaaagacaccttgtcttcccttttgtgaactcaggtagtagagaagttctcttctttacattggctggtgctattcaagaagaataaaaatacaaatagaaggataaaaataccatctgcaccgaatataatctagtttgtaaaacagaatataatatataaaatgcacaataaatattttgtattatacaaaactgttgaaaagattttttttgggaaaaattaatgtgtctaaaatcaaccgatacaggcactgctcaagtcaggcaatgaggccaggttatttattttaagagaacttcacgaggggcttttgggaaagccaagttcccttggtgattcttggttggaatacctggaggagaaaactgttaacatcccaggaccgtgtgccttgggaaggaggcatggacactccactttctgccttcctatcatgatgtcaaatgatttgcctcattaagtcagctgtgtgagaaacctggagcaaacaaatacatatttaaattttcctctcttttcccatcgctaaacacacatggctttttaaaaatattaagagaaataatttcttaggatagataattctggacacccttatgatattacacattgaggcaactaatctgcctttgactaatcttcctcatctcatacgtctaattctctatcattaattatgggacttttgctacttttattatatttattactcttggacatatattttaagatcagaaataaagaaaaagatggcaaatagttgtttcattggaggttttacaatttatagttgtgtaaaaggacaaatataatttcttgtttatttatttattttgagacagagttgctcggttgcacaggctggaatgcagtgtcaggatctcagctcactgcagcctctgcctcctgggttcaagtgattattgttcctcagccttccgagtagctgggatcacagatgcatgccaccatgtccagctaatttttgtatttttttttcttttggtagagatggggttttatcatgttggccaggctggtctaactcctggcctcaagcaacccaccctccttggcctcccaaagtgctgggattacaggcttgagacaaatataatataaatatccagaattagctttaaaakcacctatttgattaggactcgctttcaaaatctccttttctatagtttaaacnnnnnnnnnnnnnnnnnnnnnnnnnnnnnnnnnnnnnnnnnnnnnnnnnnnnnnnnnnnnnnnnnnnnnnnnnnnnnnnnnnnnnnnnnnnnnnnnnnnntgttttgttttgtcttacacatttgatgttccctgtgtagttatttgtatgcctggaaggggttttatatatatatttttagatcatttaacttttttataaagggtacagggttgaaaaatgtgaaactaatgttattttcattatgatgctcttcacttttactattttatccacccaccttgtattatctttgatcctgcagagtctttcaagtctcaacttgaaaatccact

SEQ ID NO: 704108 - DNA, 1590 bp, Homo sapiens
  misc_feature 1255, 1256, 1257, 1258, 1259, 1260, 1261, 1262, 1263, 1264,1265, 1266, 1267, 1268, 1269, 1270, 1271, 1272, 1273, 1274,1275, 1276, 1277, 1278, 1279, 1280, 1281, 1282, 1283, 1284,1285, 1286, 1287, 1288, 1289, 1290, 1291, 1292, 1293: n = A,T,C or G
  misc_feature 1294, 1295, 1296, 1297, 1298, 1299, 1300, 1301, 1302, 1303,1304, 1305, 1306, 1307, 1308, 1309, 1310, 1311, 1312, 1313,1314, 1315, 1316, 1317, 1318, 1319, 1320, 1321, 1322, 1323,1324, 1325, 1326, 1327, 1328, 1329, 1330, 1331, 1332: n = A,T,C or G
  misc_feature 1333, 1334, 1335, 1336, 1337, 1338, 1339, 1340, 1341, 1342,1343, 1344, 1345, 1346, 1347, 1348, 1349, 1350, 1351, 1352,1353, 1354: n = A,T,C or G
gaagacttctttctggagaataaaggaaaatgtttttacatttttccaaaggaaaaaagacaccttgtcttcccttttgtgaactcaggtagtagagaagttctcttctttacattggctggtgctattcaagaagaataaaaatacaaatagaaggataaaaataccatctgcaccgaatataatctagtttgtaaaacagaatataatatataaaatgcacaataaatattttgtattatacaaaactgttgaaaagattttttttgggaaaaattaatgtgtctaaaatcaaccgatacaggcactgctcaagtcaggcaatgaggccaggttatttattttaagagaacttcacgaggggcttttgggaaagccaagttcccttggtgattcttggttggaatacctggaggagaaaactgttaacatcccaggaccgtgtgccttgggaaggaggcatggacactccactttctgccttcctatcatgatgtcaaatgatttgcctcattaagtcagctgtgtgagaaacctggagcaaacaaatacatatttaaattttcctctcttttcccatcgctaaacacacatggctttttaaaaatattaagagaaataatttcttaggatagataattctggacacccttatgatattacacattgaggcaactaatctgcctttgactaatcttcctcatctcatacgtctaattctctatcattaattatgggacttttgctacttttattatatttattactcttggacatatattttaagatcagaaataaagaaaaagatggcaaatagttgtttcattggaggttttacaatttatagttgtgtaaaaggacaaatataatttcttgtttatttatttattttgagacagagttgctcggttgcacaggctggaatgcagtgtcaggatctcagctcactgcagcctctgcctcctgggttcaagtgattattgttcctcagccttccgagtagctgggatcacagatgcatgccaccatgtccagctaatttttgtatttttttttcttttggtagagatggggttttatcatgttggccaggctggtctaactcctggcctcaagcaacccaccctccttggcctcccaaagtgctgggattacaggcttgagacaaatataatataaatatccagaattagctttaaaagcacctatttgattaggactcgctttcaaaatctccttttctatagtttaaacnnnnnnnnnnnnnnnnnnnnnnnnnnnnnnnnnnnnnnnnnnnnnnnnnnnnnnnnnnnnnnnnnnnnnnnnnnnnnnnnnnnnnnnnnnnnnnnnnnnntkttttgttttgtcttacacatttgatgttccctgtgtagttatttgtatgcctggaaggggttttatatatatatttttagatcatttaacttttttataaagggtacagggttgaaaaatgtgaaactaatgttattttcattatgatgctcttcacttttactattttatccacccaccttgtattatctttgatcctgcagagtctttcaagtctcaacttgaaaatccact

SEQ ID NO: 704109 - DNA, 648 bp, Homo sapiens
caattaatagatgttaggtcaagactttcaaataattaatttatactttaagcaaattctttcttctgaaaagttctccaaaaaatagtaatgtgacatttggagaattatgtttaagatattattgtagaaatgataaactgagattttggtcagcaaaacaagtgcaagggtaacaaaaatacaataagtcttctgaagaagtcagtgttcctaaaataattggtcttcatattgaattttcataaagtagatatatcgattacttacataaactttgacagagttattcaatgtacatttacagagaaatgaaatataaatctctattaaataaataagtgaattagtttgaaattactccattgttttggtrgcataatttttaaaaattgacaactagaatataacacatttctaaatttcttagatttacttcgtaaacttaacagtatacagaaacattattgattattaataattaaacgggaaaatttttgagaaaataaatcatctttttttgatctttttgagaccattggcttacaaaacaaatctaattttgcttacatagaaaataaaaaagggaacaagctttcaatgccacaggttttggatctggagcttttttaaacagaggtgattgtg

SEQ ID NO: 704110 - DNA, 1106 bp, Homo sapiens
gtttgacctgtgctgacaccacagcggcccttctcacgtcccatctcctgcagtgtgagtatctccccgccagcggggagcattcactgaccatggcacagatatacccgcactcagaactacaattagttgctgatgtatttgcctagttagtgagcctgaccatagaatgaggtgtttcaacttcagtgttttttataagctacagattaacttctgtaaagtggaactccttgaggcaaatagtttccacgtagcaaacacaggccaaggccaaaatctgtagccacgttccttcttttgggttgtctctcatttatgcctttgtgcattttaccagcaatgcatattcagtctaagagtcagaatataaaccaaactctgagcaaaccctggaaagggcctcactgggataaaagttacagtcctctcagattagtaaagcrttagccatgaaggaaaaagaagacatttcttcagtatctcacacagatcaagagatggttcagaactgtgtcaagaattatagttacttcaaaaataaaccatgagaagtgtaagaggaggttctggcaccttgccgagcccccagcgatgggaatagaaaaacagaaatacccacattgctcctggactagaggtgggaccacagctagcacagaactaatgtttctgaaatttgaatccaggaaatatgacatagaaagttccaaaattttaggaattaataagtatataggttatttgcagcttccttggtccttccccagacataccttcttcaaataataaattttattatgggtttgctatcctccaccaggggacgtgttgattaataaaagttttcaaagtgactttggttcttactcatttggctgaaagacttctcaggtagacacatggcaacgaatgcaatgtatgactgaaccagatctttttgctataaaaaacataattgggcagttggtaaaatatgactagggtccacatctgggatggagcctcagatcgtggccctgttcctgatctgggtagttttacaaggctgcgggtaagaatattgtattagtccatttccacactgctgatagagatgtggcggc

SEQ ID NO: 704111 - DNA, 852 bp, Homo sapiens
aggtgtcagagcccctgggggtgtccctgggatgctctggcagctttgcatcatcaaggaggatgcccccaacaaggaggtctcaccgccccctgggttgtcaggtgagctcctggggcagaggtggccctgggtcgtccgaccatcctggtgtgggctcagtctggacccctgggggtctctcccaccccgagacttttatccacctccccaccaactcactctgtacaggcaagcactcccctcgctgggcctgtttctcctctgtccaatggtgagtgggattctccttcagcttgtaagtgggaactgtccccaaaccagggacaccctgggggctcctctggaactggaaaggccggaagagaaactggctttctcttctgagccaaaggacaatgttcctccagcagctgggagtccacaccccaggcaggcctcgccttcccacttgtgatgcggggtcccacctctgcagcttcgggtgtctgagtctgaggcagtgctgaggatgaggtcactctggagggtggcccggggttccaggtatgggtgcattaccaggcctttaggaatgtgaaggatcrcctgggaacatgcccaggacgcgacgttcagtgaaaagtcatgtttcagagccacacacgaatcacatttccttatctctgcacagtgaccgtggatttttaaatctttcatccgctcccctaattccccagagtgccggggcgctcggttgaaatgcgagttgcgtttggctgcaggccgtgactgaagcctcagaacaatgcccagtgtttcaaaacaacatatttgtgcaaaaagaaggcctccagatctcaggaagcggga

SEQ ID NO: 704112 - DNA, 467 bp, Homo sapiens
aggtggtattacgggcacatgccaccacacctggctaatttttgtatttttttagtagagacagggtttcaccatcttggccaagctggtctcgaactcctgacctcgtgatccacccacctcggcctcccaaagtgttgggattatagccatgagtcaccgcacccggccaggagtggccctttctaatttacagccctattaccccaccctagccatggcctgtttgcaaccccagcagcgtcawagcagcacacattatgatgggcctcgtgagtatgccgtttcctcaagttttacctcctgcaacttaaaggcagattttgcagcaactttttggtaaactgtcaactagtggcttgctgttggactgtacttctctgagtgaggtgctgtgaggacccctggaaggacacaagggcagaatagtgaaggccgacgctgacttccagaagcaatgagtggga

SEQ ID NO: 704113 - DNA, 1126 bp, Homo sapiens
tggcagctggtctttcccttggcttaggccaaaaactgcggcagtcacccctcctgcctccaaccctcacaccttacctccacaccggaccttcagaatgtgtccaggatctcacccctcacccctccgcgccccccaagccagtgctgtctcgccgggtggtgctgaggtccaccggsagcctctctgccctcatggtctgctctcatcctggggcccaagtgtgtcacagcacattcaggtagaccccaaagggtccagaaggcccacgtggcctgcttccccaccaatagcctgtctattccctctgacctccccacattgctccagccccttgacctctgacctgtcccacaggctgcccggtctgctctgagtgaggctgcggcctactgtgtcccccagcctccagcccctcctctgctctgcgttatgtcttgtacagccctctgtgcttcttgcctgtcttctcctggtaggacaccctcacaggggcagggggcagtgtccaggcgcctattcggagctgacacctgctccatggatatttgcacggcccacctaccctgaagctggccacagtctggaggtggggcaggcgagctgccagggcagagcaggatcatggtttctgggcagggagaggacggagaagaggctgttaagttttacctcaacagagggtggctcttggagggttcagggtggggagaggccctgcagggacaggacccagtgcctgccaaggccatcatgaggcatgtgctttgccaggaacactgtgttgggtgaggtgtagagggtcccctatggccagcttgcctgcttggcaccagcaccttgggcagagatagccctgccagctataggatcgctcagggctgggctgtctctagcagggcacggaaaactgggcccggggtatgttccacgtctgcatcaggaagtgcaccagcaagtctggcgctctgatgcaggcacacttagaatgcgcactgtttgctcattttaatgacttttgtatgggttaggtttaataatttataagcacacacacactcatggacctgtgtctgctaaccagctatgccactggcagtgatatataaaaaatgattttatcaca

SEQ ID NO: 704114 - DNA, 1126 bp, Homo sapiens
tggcagctggtctttcccttggcttaggccaaaaactgcggcagtcacccctcctgcctccaaccctcacaccttacctccacaccggaccttcagaatgtgtccaggatctcacccctcacccctccgcgccccccaagccagtgctgtctcgccgggtggtgctgaggtccaccggcagcctctctgccctcatggtctgctctcatcctggggcccaagtgtgtcacagcacattcaggtagaccccaaagggtccagaaggcccacgtggcctgcttccccaccaatagcctgtctattccctctgacctccccacattgctccagccccttgacctctgacctgtcccacaggctgcccggtctgctctgagtgaggctgcggcctactgtgtcccccagcctccagcccctcctctgctctgcgttatgtcttgtacagccctctgtgcttcttgcctgtcttctcctggtaggacaccctcacaggggcagggggcagtgtccaggcgcctattcggagctgacacctgctccatggatatttgcacggcccacctaccctgaagctggccacagtctggaggtggggcaggcgagctgccagggcagagcaggatcatggtttctgggcagggagaggacggagaagaggctgttaagttttacctcaacagagggtggctcttggagggttcagggtggggagaggccctgcagggacaggacccagtgcctgccaaggccatcatgaggcatgtgctttgccaggaacactgtgttgggtgaggtgtagagggtcccctatggccagcttgcctgcttggcaccagcaccttgggcagagatagccctgccagctataggatsgctcagggctgggctgtctctagcagggcacggaaaactgggcccggggtatgttccacgtctgcatcaggaagtgcaccagcaagtctggcgctctgatgcaggcacacttagaatgcgcactgtttgctcattttaatgacttttgtatgggttaggtttaataatttataagcacacacacactcatggacctgtgtctgctaaccagctatgccactggcagtgatatataaaaaatgattttatcaca

SEQ ID NO: 704115 - DNA, 1126 bp, Homo sapiens
tggcagctggtctttcccttggcttaggccaaaaactgcggcagtcacccctcctgcctccaaccctcacaccttacctccacaccggaccttcagaatgtgtccaggatctcacccctcacccctccgcgccccccaagccagtgctgtctcgccgggtggtgctgaggtccaccggcagcctctctgccctcatggtctgctctcatcctggggcccaagtgtgtcacagcacattcaggtagaccccaaagggtccagaaggcccacgtggcctgcttccccaccaatagcctgtctattccctctgacctccccacattgctccagccccttgacctctgacctgtcccacaggctgcccggtctgctctgagtgaggctgcggcctactgtgtcccccagcctccagcccctcctctgctctgcgttatgtcttgtacagccctctgtgcttcttgcctgtcttctcctggtaggacaccctcacaggggcagggggcagtgtccaggcgcctattcggagctgacacctgctccatggatatttgcacggcccacctaccctgaagctggccacagtctggaggtggggcaggcgagctgccagggcagagcaggatcatggtttctgggcagggagaggacggagaagaggctgttaagttttacctcaacagagggtggctcttggagggttcagggtggggagaggccctgcagggacaggacccagtgcctgccaaggccatcatgaggcatgtgctttgccaggaacactgtgttgggtgaggtgtagagggtcccctatggccagcttgcctgcttggcaccagcaccttgggcagagatagccctgccagctataggatcgctcagggctgggctgtctctagcagggcacggaaaactgggcccggggtatgktccacgtctgcatcaggaagtgcaccagcaagtctggcgctctgatgcaggcacacttagaatgcgcactgtttgctcattttaatgacttttgtatgggttaggtttaataatttataagcacacacacactcatggacctgtgtctgctaaccagctatgccactggcagtgatatataaaaaatgattttatcaca

SEQ ID NO: 704116 - DNA, 1189 bp, Homo sapiens
taatggggtacaatatgatagtttgatgcacrtgtacattgtagaatggtcaaatcagggttcttagtgtaactctgttatttcaagattctggtctcttttcccaacattctgctttgttggctcaattagaaggcaaaacgaaaataaaggagcatttacttcctaccccattctatttctgtttgagactttgatatgaatggaaacattttcaatccagctagctctaagaggaaaaaccaagcttgggagagggaagcattcttccccttctttgcctaccattgtgtaaaacatggccccagcactttgtgagcccagttagtgttagctagaattgttataggcctggttagagtttggccatctcaagagcaggtcaagaaaaaaaggttcacaggagaagtctacttctgttttagattacaaaacaaatcactgaggacaactacggaatatctagcttctgtgtttaatattcacccttccagacttctcagctgcactttccaaatcaaagcaatccttgccctgactgccacacacatctttgcatctctggtatgtcatcggtgtcattagggggaacctctctagtgaatgggacatatcatacatatttaatgtgatagagcttgctttggctctactatcaggataataatagtgtactgatgaaaagttggacacaaagaaaagttagtttctaagtggatagtcattttatcttttgcttttctggaattcaatctgactcataaaaattagcagctgctcctgtttatgctgaggagctataagagttccgaagactggggttttattccaggtaaatggagtgtccttttggaagcactgtgcaatgaagctgaaggagaataaaaaagggtcaatgatatcaaaagcccagtaactgtgtaccaataagttaggttaagtatagcaggaccaaggagaaatattttaacctcttcactcctgcctcgctttccgtttttcaaatttcttttctatgtgctctttgctgtttaatttgcttgaccattcttgaaagggaattatttcaattgtttcactgagatcatgttatcatttgtatgtacctccataagctcgattttgcgtgacagtgatgctcacccattgtagcaaagggatagaaaacccaacataaaggagaattata

SEQ ID NO: 704117 - DNA, 1189 bp, Homo sapiens
taatggggtacaatatgatagtttgatgcacatgtacattgtagaatggtcaaatcagggttcttagtgtaactctgttatttcaagattctggtctcttttcccaacattctgctttgttggctcaattagaaggcaaaacgaaaataaaggagcatttacttcctaccccattctatttctgtttgagactttgatatgaatggaaacattttcaatccagctagctctaagaggaaaaaccaagcttgggagagggaagcattcttccccttctttgcctaccattgtgtaaaacatggccccagcactttgtgagcccagttagtgttagctagaattgttataggcctggttagagtttggccatctcaagagcaggtcaagaaaaaaaggttcacaggagaagtctacttctgttttagattacaaaacaaatcactgaggacaactacggaatatctagcttctgtgtttaatattcacccttccagacttctcagctgcactttccaaatcaaagcaatccttgccctgactgccacacacatctttgcatctctggtatgtcatcggtgtcattagggggaacctctctagtgaatgggacatatcatacatatttaatgtgatagagcttgctttggctctactatcaggataataatagtgtactgatgaaaagttggacacaaagaaaagttagtttctaagtggatagtcattttatcttttgcttttctggaattcaatctgactcataaaaattagcagctgctcctgtttatgctgaggagctataagagttccgaagactggggttttattccaggtaaatggagtgtccttttggaagcactgtgcaatgaagctgaaggagaataaaaaagggtcaatgatatcaaaagcccagtaactgtgtaccaataagttagrttaagtatagcaggaccaaggagaaatattttaacctcttcactcctgcctcgctttccgtttttcaaatttcttttctatgtgctctttgctgtttaatttgcttgaccattcttgaaagggaattatttcaattgtttcactgagatcatgttatcatttgtatgtacctccataagctcgattttgcgtgacagtgatgctcacccattgtagcaaagggatagaaaacccaacataaaggagaattata

SEQ ID NO: 704118 - DNA, 1189 bp, Homo sapiens
taatggggtacaatatgatagtttgatgcacatgtacattgtagaatggtcaaatcagggttcttagtgtaactctgttatttcaagattctggtctcttttcccaacattctgctttgttggctcaattagaaggcaaaacgaaaataaaggagcatttacttcctaccccattctatttctgtttgagactttgatatgaatggaaacattttcaatccagctagctctaagaggaaaaaccaagcttgggagagggaagcattcttccccttctttgcctaccattgtgtaaaacatggccccagcactttgtgagcccagttagtgttagctagaattgttataggcctggttagagtttggccatctcaagagcaggtcaagaaaaaaaggttcacaggagaagtctacttctgttttagattacaaaacaaatcactgaggacaactacggaatatctagcttctgtgtttaatattcacccttccagacttctcagctgcactttccaaatcaaagcaatccttgccctgactgccacacacatctttgcatctctggtatgtcatcggtgtcattagggggaacctctctagtgaatgggacatatcatacatatttaatgtgatagagcttgctttggctctactatcaggataataatagtgtactgatgaaaagttggacacaaagaaaagttagtttctaagtggatagtcattttatcttttgcttttctggaattcaatctgactcataaaaattagcagctgctcctgtttatgctgaggagctataagagttccgaagactggggttttattccaggtaaatggagtgtccttttggaagcactgtgcaatgaagctgaaggagaataaaaaagggtcaatgatatcaaaagcccagtaactgtgtaccaataagttaggttaagtatagcaggaccaaggagaaatattttaacctcytcactcctgcctcgctttccgtttttcaaatttcttttctatgtgctctttgctgtttaatttgcttgaccattcttgaaagggaattatttcaattgtttcactgagatcatgttatcatttgtatgtacctccataagctcgattttgcgtgacagtgatgctcacccattgtagcaaagggatagaaaacccaacataaaggagaattata

SEQ ID NO: 704119 - DNA, 2284 bp, Homo sapiens
cttgacagaatcaggttgacttgcgaaattaagtgaaaaatggtttgcagaaagatatcgtgttccaaagggcatgtagagtggcatgagaaagagattggaagatgacaagaatgtaaagaggaccgaagttgcttcagctgggtgttgttttttggttcttctctatctctgattgccatcctcaatacagcagggtagagagagaagggagtagtcagccccatcccagcccagtatttccaccagttctgcttagccccagtgccccctcttggtatggggtgggaaagagatggggggagggggggcgggcacagaactcacctgtgacagagaggagaccacccttctaaaaacttttgagggcatgtagagaatgagaagggcttggcaatggagacttgtgaattaaaggtaagaatatccaggcaacgaaaataactcttttgagttgagaaatccgtagatatcaaaactttgggggaaggggctcataccatcaattctggacagggtgagggcagggagtgggtactgagaccaatcacactttgtacttttcaaacaaacacaaacacaaatcacaaagtttaagtgtgttttcaccagtgtaatctaggttatctgaatattaggaacagccttgaaaagtgagaaagggagcctatgttgaaaacaaggggcagttttctcccctttgccttggtgtgcttggggagtgctgcttgcattggtatatctcaatcatgttgcactgataaactcccctccttagttttctccaccacctgctgcctcaccagtttctcctgagcctggatacctgtttcttcagttcaagggcaaggtgagggttccaaggaagcttactttaagtttcttaatgccttagaaagtcaggcccctccccttttgtgcttaaaaaacaaaggttggcaattaaacttcaagagtcgtgaggctgggcaaaaataaatggaaaagatttaaatgagaaaaacaactaagtttctgctttctcagaaagatcaggctctgcaagctgattctcatcaatgtgccctgttggctctcatttcccaaaggcccatcccagtctccacattgatacattcagtctttcaggacaaagcagtgctgtctttgtgagccgtgctctactgccagctgcctgcaagctgccccactcaaggccrctgagcagacaaacaaagctttaggaagaggtgcatctggatgttttgacctctctccaccatgtgaggctggctgtatgttccaagttgatggaagttgaagaacactgactcagacaagagtttcatggcaaggtgagggttctcctcatccctcccaatcagcaagctagaccttactcccaaaagcaaactgggcagtcataagaaaatcactcaatccctctggatctcagttttctcctctgtaaaatgggcatatgactatctgctctgccttctgagcagcttattaggaaggccaaaggagggaatatttaagaggtattagggacaactttcaagtgcaatgtcaggagtatgaagagaagactctctacctgcctatctctccttcctgagacctcaggcctgaaatacctttaaaaggaggcaagccttaatgcttaacaacaagatgacatttgaagtgcaaacactgcagggagaagatatgcaagggcacacttatacctaggagtgagtgactatatcagcgatgtctctggtagccaagtttgatggaggaaggagagagagagatagaaagaaagaaaaagagagagagagaaagagagctcctgcagttggccaacagatagaggatatgagtgcatgggggaaggcaatgatagggaaaagcttaaattccagaataaccttcaataattttacagtttggctggagatggttcctgccattcagggattttcttcagaggtacagattgaaatcaattaagcgagaagaaagacatattttaccctattctgttctttacttttataccatgtaaagagacagcttattaaattcaaccaaactgcaggctcatgagcatggagcaatgttcttgacaccgaatctgtgtcactggctgttacctacattttgctctttaggactcatccagacaaataaattcagtgtggttaagtcttcaaagcattgcttgcctgatggttgtggttccctctaatccagagcttcctaacccctgtaccgcttcacaatggtggtctgcgagaaggctacatatgtgcaa

SEQ ID NO: 704120 - DNA, 936 bp, Homo sapiens
tgctctatccttaatttgtattatacggcataatataaaaatttacattatgtggtataatttatatggtataatatataaattatatgataaagcaataaaatatgaaagcttaatgtgtaaaagagcaaggttctaatattaataataatgcgaatttaaggatgctaactggaaatatttagtattcaaagatgatcatgttgtactaaaaattcacaagctacatctttatggtctcaccatattacaaggaatttttattcctgccataaatctcatagtatacattttaaagcctataatattatagtatgcctacactacattcacagaaacaatcaaaaataaaggataatgtgttaaatagaaaaggaatttgttttttaaaataaatataaacctaccaaataagaatttctgaatggmgaataaatgtctttggtcccgtcataacgacagatttttaaaaagaccaacctacattattttccctcttgggacagcaacatgcttagtcagtaattgaacaaatttctaaaggctaaagatgagtcttcaacatcattgttgtcagtctctctattggttggcctaacttgtactttgaaaaacaataataaagaaagcaagtattaccaagcatggacaaggatgtcctctaagtgcttgggtacctgtggtaaattgttggcagaagtggctgtctttatttctacctttgtttgcacaccactttgcaatgtgacattgtgtttctctcctcaagaggtggggtcaacagaatctggttgactccttgaatctggtctggactttgtgacttggtatgaccaatagaccacagcaaaattatgtatggtatggcagttctgagcctcttggaatgccatcagatgaataccaccaaggcagtctgctggggaatgtgaagca

SEQ ID NO: 704121 - DNA, 960 bp, Homo sapiens
tggaagcattcccccctccccagcccctgctttgagttgtcccacctttctgaaccaagccaatgtacttcttagatgtatttgactgatgtctcatgcctrtctaaaatgtataaaaccaagctgcgccccaaccaccttgggcacatgttctcaggacttcctgagagctgtgtcatgggccatggtcactcgtatttggctcagaatacatccttcaagtattttatagagtttgactcttctcattgacatttaaaatactattgaataatgatctttaatcaccattgttatgatgattaacaattgcagtaactgaaggatacagactgtctgcatcaatagtacaaacattctttgatagaattattttctgccaaagattatgttcatttattacaaagtacataggacaggaggtttacaaaatgtaaaatttaagaaaggttgctatatctgatcttgatacattattagatattttcagtgttcctggtaatattttgttgttgttctttcaaatttgctgtcatgggaaaatgataataccaatattttttgttttattcaagagattgggaactgtctgaggacagctgcacacttctactcatgtgattgatttcaacgcaactcagatagtggttaaggaaatttaagaattatgatctcataggtagaggatgtttgactttacattgctctgtgctccagtaaatgaaccctgagaattaggccaccctagagaggctttataacctcaggctgactctgattttggaaagccatttactttcagtgttctcatgtataaaatgtggactgcttggataatcatcacttcttatctagatctatgatccattcctttataacttgcttttatgactccatgagtgggacagccagttctgcataaacatctgcaaatccttgctgaaactctggaatttcctt

SEQ ID NO: 704122 - DNA, 1014 bp, Homo sapiens
ttcaagtcctacctccatgttacatgaaacaattatgaaactatttgttactttttataaaaccaaagtaaaaaatgccccaaacaaaacatgaaataaccactaaaaaaatctactaaacaaaaatattacagctaaggtaactactcttatagaccctttcttcacctccttgagatttggcatcttaatattatttctaaaccagatatcaggaaacaactatgtgtgaaaaagaaaatgaaaactccatgtctaattcacattaaagaagtttcggataatagtagctgggaaaaacatttaagcacacaatgaaacaaacaaaaagaattgccagctataatggggtgcatagggtaattgataaaaacatataatttgtctaatcaaaatatctttaaatactgtctgatcatcaaatttcagcaaaagcaaggatctagaattttgaattttagataagtagaaatccaggactttttttttttgkcagggtgatagacacatagaacaatataatagaactggatccagaaatagacccacagaattatgcccaattcatattttacaaagacacaaaagcaattaaatggagggaagatagcatttccaacaaatgataatgaagaactgaactcccatatgcaaaaaaatgaacatttacctaagtatcagactttaaataaatgaactcaaaacaagtcacatccaaaagtgttaaatttaaaccctaaaatatttggaaaaatataggagattatcttcagggtctggggctaggaaaagtgtttttagactttctacaaaaagaataatccatcaaagagaacaactgacaaattgactgttagaaaaaaatacaccaaaaaaataagaaggaaaaagaaagaaaaatttatgacaggctatcatgtatgtatacagaattaaatttttcacctaaaggaatgccaagctgagatgttgacaaacaaataaaaaatacaacgagttgaagttgtattaaat

SEQ ID NO: 704123 - DNA, 1455 bp, Homo sapiens
tgcttagcaggacacagaggtcaaggaggtgagtgtggcttacagctggggaggaaagcctgcagtgagagccacgaacacaggactaagccacaggtcatagggagggggtatgggtgggtcaaggtcaagtttggaaccaactggaaagcagggtacacgaaaagctagtggtgtcaatgggaagccttcaatcataccaggcaccaaggaccactggttggtttttactggggccagttgtatggrgagggggacagaactaccaggctaggggaggcacacagaaccagtgaccacataacaactccagtgagatgtcttcttccagggcccagttcacccagcctccttgcgctccttgaagacatctttgacagtgctctcagccgcagccacttctctcaggcacgccctccatccattttgctccctttgccctgtctctaccccacaaggcagattgtagaagctgcacaggttttgcagcctgaccaacctaagactgaagaatatcaatcaataggattggtgagcttcacttggcctcagcttcctcagagagaatgacacctgtttcaaggcatcattgtgaggaataaatgagagtacacggggcccatgccaggtgtagagtgaaggctcgataaataggtcttcttaatttttcagagacagggtctcactctgttgcctaggttggagtgcggtggtacaaccatagctcactgcagcctcacactcctggcctcaagcaatcctcctgcctttgcctctcacagtgctgggattacaggtgtgagccactgcacccggcctagtgctttacccaacaaatatttacaaagaacctactgtgagccaaacaccttaccagctgctggggattttatggtgagcagaaccagacatgttccctgtcctcatgcagcttccagtctagaggggaagacagacattaattcgtaaccacaaaaataatgacaaagtaacaggtatgaaaagggctatgggggctgagaacgtgtttatttgagaggtttggtgattctgagaatcaggaaaagccatcttcaaaaccctgctcaaaagcctgccctaattcctcccaactggaagtgatcctattggcttgtaaattctcagcaggaagcatgcatcctgcaattgacacttagcttaccgtattgtgtccagtattttcaccagtggtgtacacatcctgtctcctctgccagagtgtaaattctctgtaggcagagtaggccatctacatctttgcgtgcgtcacagtatctgttaaaagtcgattattttaatgaatcggcgaaattagcttcctgaaagctgccacaatttaactggactcgaagctttatgtttgctttttgcaagccaagttctcattgatttctaagtcattggtcagaacataagaggtggtgtgtagggaaa

SEQ ID NO: 704124 - DNA, 642 bp, Homo sapiens
tgcttctacatgcatattgtgacattatgggtgcttctcaaattaacctacaatccaagtgctgtcagcattccaataaaatatgcacagtccagggtggtcagccagcattctaatcaggaaagccatactctggaggcagctatttatagaggttctattatctgtatctggtaacatctgatgctttaccaattaccacacctaactgcaaaaatgggttttaattggtacacatggtggactatttactagcattctcaatatctgaaaggggytctagatggtaaaaataaaggtattcaaggagctggcttcggtggcacactcctataatctcagcactttgggaggccgaggcaggaggatcacttgaggccaggagttcaagaccagcctgggcaacatggcaagatctggtctctacagaaaaattaaaaaattagccaggcgtggtggcatgcacatgtagtcctatctatttggtaaggtgaagcaagaggatcacttgaatgcaagagttcaagactgcagtgagctatgatcttgctacttcactccagcctgggcaacagagagagagagagactatttttttaaaacaggacggggccgggctttgtggctcatgtctgtaattcc

SEQ ID NO: 704125 - DNA, 1469 bp, Homo sapiens
  misc_feature 1369, 1370, 1371, 1372, 1373, 1374, 1375, 1376, 1377, 1378,1379, 1380, 1381, 1382, 1383, 1384, 1385, 1386, 1387, 1388,1389, 1390, 1391, 1392, 1393, 1394, 1395, 1396, 1397, 1398,1399, 1400, 1401, 1402, 1403, 1404, 1405, 1406, 1407: n = A,T,C or G
  misc_feature 1408, 1409, 1410, 1411, 1412, 1413, 1414, 1415, 1416, 1417,1418, 1419, 1420, 1421, 1422, 1423, 1424, 1425, 1426, 1427,1428, 1429, 1430, 1431, 1432, 1433, 1434, 1435, 1436, 1437,1438, 1439, 1440, 1441, 1442, 1443, 1444, 1445, 1446: n = A,T,C or G
  misc_feature 1447, 1448, 1449, 1450, 1451, 1452, 1453, 1454, 1455, 1456,1457, 1458, 1459, 1460, 1461, 1462, 1463, 1464, 1465, 1466,1467, 1468: n = A,T,C or G
tgcggtcttaggctggggcctaatctagtatgactggtgtccatataagaagaggaaatctggacatggatgtgtgcaaaaggaagaccatgtgaagacatggggaagagatgactatttacaagccaagaagagagacttcagaagaaaccaaccctgctgacacctttgtctcagacttccaacatctagaattctgagaaaataaatacctgtggttcaagctacccattctgtggtactttgttattgtagccctaacaaactaataaagtaccacagggaatggaaagagtcaatgactttcctaaattacctygcctagtaccccaaaaatagtaaactctgagatagcctgggtgattaactccaaaactaattcattcattaattattcagcaaatatgtactaatttgattttttttctattcatttgtcacttgctagattctggagatacaaggccatcttctcaagaaattgagtctggtaggaggtacaggcacgcagaaataattgtaatcagtgtgggagatgtcaaagtaaatgcatacattcctttatgtattcattcacctttaaaatccaatgcactctttttgagatggtaccttgtgccagcactagctggagaaacattgaactttcacaggaagacattttaatgaaggactccctaataatagatctattctctcatgaagaaagaaggttttattcagtgtgttttactggttgtcttctggatgtcccactagtatgtcacacaaaaacctccatgacagtgcctactctcttccccagtaagtgctctttgggctactttccttaccttgttccatgactctcatccgtctagtcacccaaatcaaaatctgaagtcatccttgaattatcctttcacccttaccccatatcttgggtcatcagatctggtgactcatctcaaatatctctaaacattctaactctcttcaaaccttattatttattttaggccttaatcatctcttgcctagattattatagtctgtagttattatagactacaatttactgactagattattattttctattgtaggagaacttctacctcttattgcctttcattttaacccatcttccacagtgactcaatagttacatttctaaatgaaaacacagatacatcattttcttgcataatctttcattctttcatgattgctaacaagatgtaatataaatttccttaactcagtgcaatagctcctgtctgcttctccagccatactcccactgcttaaccagaatacatcctatgctcttgtcacaaaaagttaagattttcacattttaaatataaacctgagtaaaaatagaaannnnnnnnnnnnnnnnnnnnnnnnnnnnnnnnnnnnnnnnnnnnnnnnnnnnnnnnnnnnnnnnnnnnnnnnnnnnnnnnnnnnnnnnnnnnnnnnnnnna

SEQ ID NO: 704126 - DNA, 1469 bp, Homo sapiens
  misc_feature 1369, 1370, 1371, 1372, 1373, 1374, 1375, 1376, 1377, 1378,1379, 1380, 1381, 1382, 1383, 1384, 1385, 1386, 1387, 1388,1389, 1390, 1391, 1392, 1393, 1394, 1395, 1396, 1397, 1398,1399, 1400, 1401, 1402, 1403, 1404, 1405, 1406, 1407: n = A,T,C or G
  misc_feature 1408, 1409, 1410, 1411, 1412, 1413, 1414, 1415, 1416, 1417,1418, 1419, 1420, 1421, 1422, 1423, 1424, 1425, 1426, 1427,1428, 1429, 1430, 1431, 1432, 1433, 1434, 1435, 1436, 1437,1438, 1439, 1440, 1441, 1442, 1443, 1444, 1445, 1446: n = A,T,C or G
  misc_feature 1447, 1448, 1449, 1450, 1451, 1452, 1453, 1454, 1455, 1456,1457, 1458, 1459, 1460, 1461, 1462, 1463, 1464, 1465, 1466,1467, 1468: n = A,T,C or G
tgcggtcttaggctggggcctaatctagtatgactggtgtccatataagaagaggaaatctggacatggatgtgtgcaaaaggaagaccatgtgaagacatggggaagagatgactatttacaagccaagaagagagacttcagaagaaaccaaccctgctgacacctttgtctcagacttccaacatctagaattctgagaaaataaatacctgtggttcaagctacccattctgtggtactttgttattgtagccctaacaaactaataaagtaccacagggaatggaaagagtcaatgactttcctaaattaccttgcctagtaccccaaaaatagtaaactctgagatagcctgggtgattaactccaaaactaattcattcattaattattcagcaaatatgtactaatttgattttttttctattcatttgtcacttgctagattctggagatacaaggccatcttctcaagaaattgagtctggtaggaggtacaggcacgcagaaataattgtaatcagtgtgggagatgtcaaagtaaatgcatacattcctttatgtattcattcacctttaaaatccaatgyactctttttgagatggtaccttgtgccagcactagctggagaaacattgaactttcacaggaagacattttaatgaaggactccctaataatagatctattctctcatgaagaaagaaggttttattcagtgtgttttactggttgtcttctggatgtcccactagtatgtcacacaaaaacctccatgacagtgcctactctcttccccagtaagtgctctttgggctactttccttaccttgttccatgactctcatccgtctagtcacccaaatcaaaatctgaagtcatccttgaattatcctttcacccttaccccatatcttgggtcatcagatctggtgactcatctcaaatatctctaaacattctaactctcttcaaaccttattatttattttaggccttaatcatctcttgcctagattattatagtctgtagttattatagactacaatttactgactagattattattttctattgtaggagaacttctacctcttattgcctttcattttaacccatcttccacagtgactcaatagttacatttctaaatgaaaacacagatacatcattttcttgcataatctttcattctttcatgattgctaacaagatgtaatataaatttccttaactcagtgcaatagctcctgtctgcttctccagccatactcccactgcttaaccagaatacatcctatgctcttgtcacaaaaagttaagattttcacattttaaatataaacctgagtaaaaatagaaannnnnnnnnnnnnnnnnnnnnnnnnnnnnnnnnnnnnnnnnnnnnnnnnnnnnnnnnnnnnnnnnnnnnnnnnnnnnnnnnnnnnnnnnnnnnnnnnnnna

SEQ ID NO: 704127 - DNA, 1239 bp, Homo sapiens
tctgaagtatccatttttcagtttaacaccagatatgtcagttgtggactggggagccatggtatgctgacatgagcatgaatttctgtgcctctttttactgatcaagcagctggttagtgcaaggaagagtctgcattgcactgttcaacacatggatcaaacactgttctttgcactgtattctaaccagccatggccattctttagtcatgtctcaaaaggtaccacggttcccaagttggtttctctagcaactgtagagacagttgaattacaattcataattgaccagtcactggccctggggatatttctttatccgccaagtttccatgtggcctgtggagtgtggaaagtggctgcccctcccagtttcctgagtcctttgagaaagaaccagtgaaccacaaccctctgttctgatcactgcaaaaaaawtttttttttccttacaattcattcagaacagctttgattttctttaaagattgttatcccagagaacaatgctgcttgttttggattgttttgtgctcttcatacctgttgagctttgattatgctgaagctgccagctcactttataaagagtcaactggaaggcaatttgaatatgtaacctatttgcttcctttacaaacttgactcactctaatttgaccagatgtaatgagagcaataacttgttaggctactaaaagatctttcagtattccttatgtggaagccatttcagattagttgtcttaagccaaagatagttatcaatgactctttatgtcttaaataagtatgtggaaaactctttagcccttgaaatgatattttgtatcattccttttaggttgctgtttaagaagtttttacatctgcaaacactaactatttcaagcactgaaagtctgtcaaatatgtcacaagtatagaattattccaaatatgcctgatattgagaagcattacactttttggaaaatatgcaagcacataactaatcaatgcaatactggttgatgcataaataaatcactaaatttaatagggttattgcaactgaatttgtaattacttagggtttcattaacatttattttgcattacccgtgaacattgattggatttagattggtgaagatggtagactgatgtgaatctttgcctttaaaaatgacatccgtgtccacataatgcattgctgttagaggcagagactgtgtagaattgctgggcttatgt

SEQ ID NO: 704128 - DNA, 647 bp, Homo sapiens
ctattgtcccaaaacatttcctcaatggtaacaggatcctattctgtaaagcccagcaaatataaggtaaagaaatcaagctttctttcaaaataatgccatttgccatggaaagaactgtcaatgagaacaaatatttttaatatgccaaaaatgtagatgctttgtcttttttctcatttttttgatcaaaagctagaaaagaagatattaagaagagagagcatattgtatatraatcctaattaaataggtataaattcacagggatccaaccaaaatgtgtcactttagctgataggtgaacaccaattgtactctccttggttagtgaagagaaactatggaaatagaagcctggggctggtgcccctgaatgagccccggtgttgtaataagttttcaaaataattcttaaaaatccttagcagatttcactttttaaaatggtcaaggaaattaccacatctacatgtagcgtaaatgaccaattgtggatataaattgaagcagttcggagaaagggattgttcacagatctttgctgcttctgtgagagagcttatcattacattccgacacagctttaaaatacctcaaagtgcccccaccatagcctgcctgccccgtgtcccttgactcttttc

SEQ ID NO: 704129 - DNA, 1107 bp, Homo sapiens
ttggccaagaagtttgaaaatactggcccatggaaggcctatataattttttcattatccctcccccaagatatctgtggccaagaattccagggtagatattagggaggtaaattgcaacttagtcaacgagagttatcaaatctaacacagaaacattggaaaaatgattatatttttgaaacttttaagcctgttataaattacagttttacagaaaagcacaatctaatttcaatttacctttctgctgggcaaaagaaaacaaagtaagcacgcagaaataagtctggatgtttctagtctttcttccccccatgaaatggagttttcttctctaaaattggaagcattttctaacagattttctgtcaacattyaaacagagttgcaggttaacaatccaggaagtcctgtgtgatcatagaatacttgagtcagaaaggttaggcctgaaaggacctttgggtgtcatttagcccagtcttctagatggcaaacctgaggtaaattattaataaagaaaagtttgtggttagatttctaaagaaatctttatgagaaaaatatttataaggaagcatattgtaatttgtgagaaatgtacaagtatgtgaacaaggatttagacatccagttcttaattgtctgctccattccaatttacttttcctagtacacaagaaagccaaagtcaacggaaattgtaacagcaggaaaagaaaccatcatctaagaaatctgatcacaagtttaatcccccaactactatagacttggatcacagatgtttttagtacttccagggaggttgtgcctaacacatttctctcaagctgataaaggctcacagtttatttattttagaaaaacattctaaaataaatcatgttatggcactacagcaaaacaatattcttttgaagtggggaaagttttgtaatgggcctcctgagtctctttcccacatggactcttagcaccattagtaaggcatcattctttcagatgacaggaaaatgcttatgctggtggacttgtggcaccttagttcccatgtttctgttagaggttgaagttgcttgatgaattacagaagttacatac

SEQ ID NO: 704130 - DNA, 1107 bp, Homo sapiens
ttggccaagaagtttgaaaatactggcccatggaaggcctatataattttttcattatccctcccccaagatatctgtggccaagaattccagggtagatattagggaggtaaattgcaacttagtcaacgagagttatcaaatctaacacagaaacattggaaaaatgattatatttttgaaacttttaagcctgttataaattacagttttacagaaaagcacaatctaatttcaatttacctttctgctgggcaaaagaaaacaaagtaagcacgcagaaataagtctggatgtttctagtctttcttccccccatgaaatggagttttcttctctaaaattggaagcattttctaacagattttctgtcaacatttaaacagagttgcaggttaacaatccaggaagtcctgtgtgatcatagaatacttgagtcagaaaggttaggcctgaaaggacctttgggtgtcatttagcccagtcttctagatggcaaacctgaggtaaattattaataaagaaaagtttgtggttagatttctaaagaaatctttatgagaaaaatatttataaggaagcatattgtaatttgtgagaaatgtacaagtatgtgaacaaggatttagacatccagttcttaattgtctgctccattccaatttacttttcctagtacacaagaaagccaaagtcaacggaaattgtaacagcaggaaaagaaaccatcatctaagaaatctgatcacaagtttaatcccccaactactatagacttggatcacagatgtttttagtacttccagggaggttgtgcctaacacatttctctcaagctgataaaggctcacagtttatttattttagaaaaacattctaaaataaatcatgttatggcactacagcaaaacaatattcttttgaagtggggaaagttttgtaatgggcctcctgagtctctttcccacatggactcttagcaccattagtaaggcatcattctttcagatgacargaaaatgcttatgctggtggacttgtggcaccttagttcccatgtttctgttagaggttgaagttgcttgatgaattacagaagttacatac

SEQ ID NO: 704131 - DNA, 986 bp, Homo sapiens
ggctttttcttttcattggaaaatttagtccatttacatttaaagtaattgtaataggtaaggatttactgttgttattttgttaattgttttctggatgttttgtagatcctttcttctttctgttcttttttgtgacttgatgatttcctacagagttgcactttgattccttttatcttttgtgtgtctactatagactttaattttgtggttactatgaagcttatgtaaacatttttatggcatctgtttaaataatgtaaagtccctcaccaaaactataaaaatattaaatgatttcctataatgtgtttatttttactttttacatgttttatttctcatttacttgaaaagcttttaggtattttcaatataaatagtgtggtctggctgtaactatagttcttctaattctatctccccttgatagatgaacaattgtctgacatcatccatctagtatcattttctcccgtacttagaaatcacctttatgatataaatttctgcatatcttttggacaatttctggactatttattcatagtccaatgcttattaaaattctgctcaacttattttcctgagtcagcactaaattcttttgaatttttttttagctttaaaaaggttgtatttttggatgaagttagtccaattcatttatttttttatgattttctggcttgcattagatatttattttaccaactaaatgtggtcattgtgtgttttatacttctgacataccataggattaataccttaaatttctttgcatcagtatttatatgtaaamaatgtggcaaagattttttttttttgaaggtgtggggaactatctttgtcaggttttggtatcaatattatattatcttcacaaaaagaatctcagccttttccaaagtaggaataattcctattttaatgataatgtgactggagctacaagaggtttaagtaacttttccaagggtaca

SEQ ID NO: 704132 - DNA, 986 bp, Homo sapiens
ggctttttcttttcattggaaaatttagtccatttacatttaaagtaattgtaataggtaaggatttactgttgttattttgttaattgttttctggatgttttgtagatcctttcttctttctgttcttttttgtgacttgatgatttcctacagagttgcactttgattccttttatcttttgtgtgtctactatagactttaattttgtggttactatgaagcttatgtaaacatttttatggcatctgtttaaataatgtaaagtccctcaccaaaactataaaaatattaaatgatttcctataatgtgtttatttttactttttacatgttttatttctcatttacttgaaaagcttttaggtattttcaatataaatagtgtggtctggctgtaactatagttcttctaattctatctccccttgatagatgaacaattgtctgacatcatccatctagtatcattttctcccgtacttagaaatcacctttatgatataaatttctgcatatcttttggacaatttctggactatttattcatagtccaatgcttattaaaattctgctcaacttattttcctgagtcagcactaaattcttttgaatttttttttagctttaaaaaggttgtatttttggatgaagttagtccaattcatttatttttttatgattttctggcttgcattagatatttattttaccaactaaatgtggtcattgtgtgttttatacttctgacataccataggattaataccttaaatttctttgcatcagtatttatatgtaaaaaatgtggcaaagattttttttttttgaaggtgtggggaactatctttgtcakgttttggtatcaatattatattatcttcacaaaaagaatctcagccttttccaaagtaggaataattcctattttaatgataatgtgactggagctacaagaggtttaagtaacttttccaagggtaca

SEQ ID NO: 704133 - DNA, 986 bp, Homo sapiens
ggctttttcttttcattggaaaatttagtccatttacatttaaagtaattgtaataggtaaggatttactgttgttattttgttaattgttttctggatgttttgtagatcctttcttctttctgttcttttttgtgacttgatgatttcctacagagttgcactttgattccttttatcttttgtgtgtctactatagactttaattttgtggttactatgaagcttatgtaaacatttttatggcatctgtttaaataatgtaaagtccctcaccaaaactataaaaatattaaatgatttcctataatgtgtttatttttactttttacatgttttatttctcatttacttgaaaagcttttaggtattttcaatataaatagtgtggtctggctgtaactatagttcttctaattctatctccccttgatagatgaacaattgtctgacatcatccatctagtatcattttctcccgtacttagaaatcacctttatgatataaatttctgcatatcttttggacaatttctggactatttattcatagtccaatgcttattaaaattctgctcaacttattttcctgagtcagcactaaattcttttgaatttttttttagctttaaaaaggttgtatttttggatgaagttagtccaattcatttatttttttatgattttctggcttgcattagatatttattttaccaactaaatgtggtcattgtgtgttttatacttctgacataccataggattaataccttaaatttctttgcatcagtatttatatgtaaaaaatgtggcaaagattttttttttttgaaggtgtggggaactatctttgtcaggttttggtatcaatattatattatmttcacaaaaagaatctcagccttttccaaagtaggaataattcctattttaatgataatgtgactggagctacaagaggtttaagtaacttttccaagggtaca

SEQ ID NO: 704134 - DNA, 931 bp, Homo sapiens
  misc_feature 147, 149: n = A,T,C or G
ttttttattattattatactttaagttttagggtacatgtgcacaacgtgcaggtttgttacatatgtatacatgtgccatgttggtgtgctgcacccagtaactcttcatttaacattaggtatatctcctaatggtatccctttncncccatccccccaccccacaacatgccccagtgtgtgatgttccccttcctgtgtccatatgttctcagtcataggtgggaattgaacaatgagaatatcctcactttcaaatgtacctgatggtaccaatttctgtgccttaaaggggcctgcaatacaaatcaaaatctcagcttctccccctgcttgcttacagccccctttctraggtctgctaaatcacttgccccatgtccagaagctcctgtttccaatattttttatgcttttgtctttgctcatgttctttgtccttcaaggtttcaatctgtttttttaatcccttaactattttagttagattctcagaggacaaggagataaatgctcgtgtttgatccatcatatttaatcagaactgaaggagaaattttgaaggcagttaaagggtgaggaaaagatcaagcctcctatgaatcataatccctaaacatcatctataatactcattaagcaatcttttttcctttaaaataactcaatacttttctagctatatattttaccatatccctgcagaaacagccaaatttcagttttaaagtgccacactcttgaaggagatcatattcaaatgaaggtcataaataatggcttaagagttcccagattctccaagaggaagttaaagaaaacactgcctctttgccaataaatatttaaaggtactgttaaaatgatgaagtttaaaatgccataagaaattatatcaagatataaatattttctatctaacagctgga

SEQ ID NO: 704135 - DNA, 931 bp, Homo sapiens
  misc_feature 147, 149: n = A,T,C or G
ttttttattattattatactttaagttttagggtacatgtgcacaacgtgcaggtttgttacatatgtatacatgtgccatgttggtgtgctgcacccagtaactcttcatttaacattaggtatatctcctaatggtatccctttncncccatccccccaccccacaacatgccccagtgtgtgatgttccccttcctgtgtccatatgttctcagtcataggtgggaattgaacaatgagaatatcctcactttcaaatgtacctgatggtaccaatttctgtgccttaaaggggcctgcaatacaaatcaaaatctcagcttctccccctgcttgcttacagccccctttctaaggtctgctaaatcacttgccccatgtccagaagctcctgtttccaatattttttatgcttttgtctttgctcatgttctttgtccttcaaggtttcaatctgtttttttaatcccttaactattttagttagattctcagaggacaaggagataaatgctcgtgtttgatccatcatatttaatcagaactgaaggagaaattttgaaggcagttaaagggtgaggaaaagatcaagcctcctatgaatcataatccctaaacatcatctataatactcattaagcaatcttttttcctttaaaataactcaatacttttctagctatatattttaccatatccctgcagaaacagccaaatttcagttttaaagtgccacactcttgaaggagatcatattcaaatgaaggtcataaataatggcttaagagttyccagattctccaagaggaagttaaagaaaacactgcctctttgccaataaatatttaaaggtactgttaaaatgatgaagtttaaaatgccataagaaattatatcaagatataaatattttctatctaacagctgga

SEQ ID NO: 704136 - DNA, 592 bp, Homo sapiens
tgaattttgtaaagtattggccatcrttacacattcttttgggtcaagccactctgatggccacttcagtttttccacaatttcagtaattacatccatttagcctcttatggttaagtgctgtcacctggtctgccattctgaaaaccattatcctcactgatatttcagagccaatttccattttagcatttcctacaaaacagcccctgtagggcttctctattatcttaatgaggatcggataacagagccaagtggtaactttcagtacaaaataaattctttctaacattagtacctccctgagcctttgatcccttccttaatactattttaagaaagttctagcatcttctccttttactaaatgctgtcctcatggccaagcatcaaagagccactccagcataaataactttcagcctcagattttcttgccagaatattgaatgctgactcattgatcattttcccctgtcaagaagttctcgcttctctagccttctattctgcactcttctgtctagtcagacagccttaagattataagatccactctcaaaagttcttcctagattcctactggtat

SEQ ID NO: 704137 - DNA, 622 bp, Homo sapiens
cctgcattctataaaataaagcagtaattgtcttaatacaggaatggtaaacagtgtcctgcatagtatgaaatgatgcagttattgtcttaagatgattaaggtacatgaggcaaagtgatactgctccgggtcagagtgtacactgggatgggatggagaagtggtaggcaggtaaggtatttgatgacttggctacagctgaggtggtttttatcttaactagaattccttgtaaatattgaccaatgaaacttagtaattgaaagataattgagtgcctcatgggcactttactgattactgatctaggaatgattttaaatgatatgcctggtcccttgaagttgtttattgtaaataaactwgtaacttatgcactacatacacctgactagtgaagtgtataagctgagagacactaaaacctagtagcatccctgggttaactcatcctgcagaagtccttgtctttcagcatctgaaaatacttccaggggtgagaaagggataacagaaatatgcatctgctgccactggggtcatccccatattgatgtgagaggtttgcccattttgattctctattgtttcctttatattttctattccagttgggtgt

SEQ ID NO: 704138 - DNA, 869 bp, Homo sapiens
tttttttttwaaatattactttaagttctgggatacatgtgcagaacctgcaggtttgttacataggtatacatgtgccatggtggtttgctacacctatcaacctgtcatctaggttttaagccccacatgcattaggtatttgtcctaatgctctccctccccttgcccccaacctcccgacagaccctgatgtgtgatgttcccctccctgtgtccatggattctcattgttcaactcccacttatgaaagagaacatgcggtgtttggtgtctgttcctgtgttagtttgctgagcatgatggtttccagcttcatccatgtccctgcaaaggacatgaactcattcttttttatggctgcacgctatgtgacattttaaatggctgaaccttaattttaattactatatgtagtggctgaaaatgaaataggaaaatgaaataattcatagaaaatgagagctatgaaagatttttttcttctcatctttagtcattttcattaacattttcagaagctaacagaaatacacacatactgactgtcagttttacttttgttatatatatgtccttacgtaaactttatacacaatttaatttgcaatttaaaattattttgatttccaagaaatactaaatatgtgaactagactgagcagctggagggtaggatttcatttgtctgtgtatttcctgatacactgcagatatacctgcatttattaatgtagcctatggattgaactctgagctttttttcaacctataatctacaaatgagatctagcaagtaattttttataattaggatatgaagttttagttcagtaatttcagtacagaactttttcttctaatagca

SEQ ID NO: 704139 - DNA, 1023 bp, Homo sapiens
aggctcaagcgatcctcctgcctcagcctcccaactagctgggactacaggtgcacagcaccacaccaarctaattattattattttttaagaaacagggtcttgctatgttgcccagggtggggtcaaattcctgacttcaagtgatcctcctgcctcctgccttggcctcccaaagtgtgaaccacctcgcctggccacacttgtcattataccagcaaattttgtgagaattacatatgcatctgcttttgcaataaatgcatttttcaagtacagaacacaggtttacaacatacatcaaatcaaaatggtaaatctgaagctactttgtaattaaaaagcaaaattagcatcaagtgaaaactgtaaaccaactaaatgctacactgatgaagctcttaagtttcctcctagactgcatattcaaactatcagcttgtgcctatgttggtattagcctttaggtaatgcaaacttcttagaatactaaattggaatccttagaaaattctaataaagtgccaattatggtttatgattactgaattctaagaaataaaccttactcttttaggttgctaataatagtgggaagaaaggatacgtctttttggatgagtgtccccgcccaaatctcatgtcggattgtaatccccagtgttggaggtggggcctggtgggaggtgactggattatgggggtggtttcttatggtttaacaccatcccccttggtgttgtcccaatagtgagttctcctgagatctagttgtttaaaagtgtgtggcacctcccctgtctctctgttcctcctgctctggccacgtgaagtgcttgctcccacttaatcttccaccttgattgtaagtttcctgaggcctccccagaagccaagcagatgccagcatcatgcttcctgtacatcctgcagaaccatgagccaattaaacctctttttaaaataaattacccagtctcaggcatttctttataccaatgcgagaacaaacaaatacacctg

SEQ ID NO: 704140 - DNA, 1084 bp, Homo sapiens
ttaggttataggaagttacagtattacataaggtgagcaaaataatctaatccaattaatataacgccatctgggggcttgccagacagtcacagtggcaaactgctgaaatatgaaaggctgcatcatatgtgatacatattcccactgctaatacatggtgccacacaatcagttgtatcctgccatggtccatcttcatatgtggagggaaccttggctggattggacagaatgattgtgacctggggcaggttcyatcccttgcagttagactaaggataaacctggttatatgacaaactaagaatgccaaatgtgtccagctcaattctgaagaggaattaatatacttaaaaggtccatttataaatgagattccaatggccacaattttagagtctaatctggcttcttatatttcaatctgctactcttaaaccaacaaacagtagtacacagttttattggtgcaaaactaaacaaatccaggaaggttattcatataagaatcttcaacacaaattctgcctttatttacaaaatggtctgataaaatatcgccccccccccatacttacaggtctcttccacaacacacttcacacgttgattttagcaatattaatagcaccattcgtatattatttaaaatcaagaagatttcatttcagttactatgttgattcatcatcatttacatccatggatgagataagtgagtatactgggactatctgctgctccatggtaaggattcctgggtccagcacaaaaggctttgcagttaccagttatgaaaggtatctatggtaagtagatactatgagaattttcgtgccacaaagtttaataatcctccatgtttgtataatgttatttccacatcatcttcaaacgaagcaatcacgctgaatacttttccagtgcttgtcttgaaaggagcaaaaacatctcatgtgagcaagtaaatcttccaggtgctacttgatggttaagaccatttgtcttcatatttaatgactatacttgccacagattctgtctgatttatcttggttctaatttcttatattctgattgc

SEQ ID NO: 704141 - DNA, 574 bp, Homo sapiens
aaatattatctgaactggactagtgaaaaatctagtatttgtatcctggcaaataatactaatttataatccacagtaaagttcatcctttgactgtgctggagaattccagttgtatttgaagactgattttaaaacttttctgcatttggtaaaggtatgtaaactttcctgyactcactgagtaacagctaatctttaatataatattatactgctatatttaaaaagctgactacttgatataattacttaatgtgatgcttgatataataattacttaatgtggccgggcacggtggctcacacctgtaatcccagcactttgggaggtcgaggtgggcgtatcacctgaggttgggagttcgagaccagcctgaccaacgtggagaaaccccgtctctactaaaaatatgaaattagccagggtggtggtgcacacctgtaatcccagctacctgggaggctgcggcaggagaatcgcttgaacccaggtggcggaggttgcggtgagctgagatcacgccattgcactccagcctgggcaacaagagcaaaactcagtctcaaataa

SEQ ID NO: 704142 - DNA, 574 bp, Homo sapiens
aaatattatctgaactggactagtgaaaaatctagtatttgtatcctggcaaataatactaatttataatccacagtaaagttcatcctttgactgtgctggagaattccagttgtatttgaagactgattttaaaacttttctgcatttggtaaaggtatgtaaactttcctgtactcactgagtaacagctaatctttaatataatattatactgctatatttaaaaagctgactacttgatataattacttaatgtgatgcttgatataataattacttaatgtggccgggcacggtggctcacacctgtaatcccagcactttgggaggtcgaggtgggcgtatcacctgaggttgggagttcgagaccagcctgaccaacgtggagaaaccccgtctctactaaaaatrtgaaattagccagggtggtggtgcacacctgtaatcccagctacctgggaggctgcggcaggagaatcgcttgaacccaggtggcggaggttgcggtgagctgagatcacgccattgcactccagcctgggcaacaagagcaaaactcagtctcaaataa

SEQ ID NO: 704143 - DNA, 697 bp, Homo sapiens
tggctcatgcctgtctgtaatcccagcactttgggaggccaaggcgggcagatcacaaggtcaggagattgagaccatcctggctaacacggtgaaaccccgtctctaccaaaaatacaaaaaaaattagccgggcatggtggcgggcacctgtagtcccagctacctgggacactgaggcaggagaatggcatgaacccaggaggcagagcttgcagtgaaccgagatcatgccactgcactccagcctcagagtgaggcgacagagtgagactccgtctcaaaaaacaacaacaaataaaggttaaattcctacctcttaaaactaacaaaatgtttttacatgtgaaattcacataaggcaaacagacttaacctataaacaactccttcaataacagacaaaccacagaatatatgacatgaacaggcaattcatagaaaacatgcaaacagcaaataaacatacaaagttatgcaacctgactaataattgaagaaattaagtttacagttttccgctatatatttagcaaataggaagactgtcactgggtatgtagtaaagtaagyattttatatgctgtaggaatgtgaatgtggcctcatgcaacctttattgaaaacaatttggcaatgtctctcaagtagttcaagtattcatatattttaataattctatttctagaatttatcc

SEQ ID NO: 704144 - DNA, 1190 bp, Homo sapiens
agaacagactaatacactgcgagtcagtcaatatagagaagcaggcaaacagagaagatgctggagaaaagtaaagacaagagatctgcagcctaagacagaacagacttcatttctgaggctttccagtcactacaataccacattcagcttgattttctatcctcagagtctgtaagaactagatctgtaataaactgccttttatttgtaccagcttgagtgggtttatgttacctgcaaacaatagagctttgaaaacagcatagctttcagtgcttgagagcaggcttggtgtcttattcagctccacagaccgaccagaagagcacagtgacagatacacagtgaggacttggcaaatgggttgaaattcatgactgtgactattttttttattttcaatctttctaagtgttttctaccatacaatttcactcacccttagagtaaccctgttatgtttattttctttaacaacagaaaaataaagttccaaaaacccaccagttttataagtaagaagaaggattatgcatagagtcatttgggggcaacaggaaggcctcatagccacacttctctcttccttatcttgtcgtttctgaaatatsattagaattattcctgaagtcacttcgatcttccaagtctcttactgaaatacaaatatctaggccagtatttcccaaaatgtgttctgcagaattccaatctctcaagatcttccatggaaaaataagggacagagacaaatgagtagggagccacagtattctatattcttatcttgagagtcccaaggccctgtagcatactaaaggctctgagaagtctcacggtaaaaaaatggtacttctgctagtttcggggcaggtgaatatggcacagtcattaaggacactgtctggcttagaactgtgactctgccacccaacagttgtgtgacttagacaaagtgaagattatagtagcccctccctcacagggggtattgggacaattcaataaggtgatgagtataaaacacttagcccctgaccagctcaaagaagtacttaaaatgttagctgtttttagtgagccgagattgcgccactgcactccagcccgggtgacagagcgagactccgtctcaaaaaaaaaaaaaaaaagttagctgtttttattattaatgtcgcattttctaa

SEQ ID NO: 704145 - DNA, 629 bp, Homo sapiens
tgaaaamaaaacaaaacaaaacaaaacaaaacaaaaaacaggggaccgccaatttgctttctttttgacactgacaggactagggatcaggagcatctggtgtcaaagatgactagagtaggggtctctaagtcctattctggctacccatttgtaaagttatttgtttatttctttaagctctttttcgattttaaaagtcctaggtcctccatccctaaggcctgaactcctacacttacctatgaagaggattgaaaacgtgcaaagtgaacccatgctgctaattggcattaatgttgctgtgtggcctgtgccccactgaccacaagatggcgaaagagattatcacatcgagccagcctgtcttcctccaccatctccacaccagtattatccgaaagaaaacatttattgagcacttactgtgtgccaggcactgttccaaggactcgaacgtatgaagtcatttaatcctcacaataatcctatgaaataggtaccatttcacgtgaggaaaccaatgcacagatatatctgtctggtttagcttttagctattttcatatcatttatctaccgctattgtccatctatcatctatctatatctacatattaatttactat

SEQ ID NO: 704146 - DNA, 1653 bp, Homo sapiens
tttcctgaactcggcctgcacccgagaactcatctaatccccagagtgcttcttttgtcctcctttgcaggattcatacatttcacctagaattatactaatacagtgtaggggttaaagttaaaccggcttctgcccccaggctctgccactgggtgactttgaaccaaggtatttaatcattctgagtctcagcttcttggtgtataccttggcagtagtaataattataatgcctkcctcatcgagttgttgtggggattaaatgaagtaattgaaatgaaatcctcagctcagtgcctgacatatcgtaagtgctcaaagttagatatggacatcttattacctccttataaaataaaagcaatgtgttacttttataatcacaccacaaaagttaattaagaaaaaaaacactttgccttccatgcttgcaattaggtttggagcatctatagagttggctatggagagctctgtttccccagctctggtaaggtccgaaaagcattttcatcctcttgcaatctcaacctgaacagctgaatctttttacaaagcagcaattccaaaactgagcacactcagagctgaggaactcagagtcccattaattctgaatcatctctgcagagaccaggacactttctaggcatgagacaagcccctgcctcttggttaagaaacataattgatcatcttgatccaatttcagtgcattttcttttactccaaatttcttcctgttcttaagaacaatcttaactttcttctcagacaggaattgaaactttgcagctgacatttggaagcttccatttgctcttgttataaaaatgctggagttcagagagagataactctaccttcctgtcatgagaaagtttctttgggaaacaagactcaactctcccaactcagactcgttatctccatcatggtggagggaccttgatgggtttgggacagccaccatagagaggaggaattggattctgaccttcatctcccttcatcacctcacagctcaaccctgagcacaacaggatacacccttgttgtctaagacttgaactgtctttttgggacctttcttgggcagatggaggaagctttaatacttattggtcccagaagttactttgtttcttgagaggcaagagcttaaaagcttgcaggctctacaattagattgcctgttgaagtcctggctgtgtgaactgtgtacctcggtttgctcctctgtaaaatggggatgatatggtttcgctctgtcaccacccaaatctcatcttgaattcccacgtgttgtgggagggacccagtgggaggtaattgaatcatcggggcaggcctttcccatgctgttctcatgatagtgaataagtctcatgagatctgatggctttataagggggagcgtccctgcacaagctctctctctgcctgctgccatccatgtaagatgtgactggctcctccttccaccatgattgtgaggcctccccagccatgtggaactgtaaatccattaaacctctttcttttgtaaattacccattctcgggtatgtctttatcagcagcatgaaaatggactaatacaggggataagaataatatttacctcataaggttattgaaaagataaaat

SEQ ID NO: 704147 - DNA, 1653 bp, Homo sapiens
tttcctgaactcggcctgcacccgagaactcatctaatccccagagtgcttcttttgtcctcctttgcaggattcatacatttcacctagaattatactaatacagtgtaggggttaaagttaaaccggcttctgcccccaggctctgccactgggtgactttgaaccaaggtatttaatcattctgagtctcagcttcttggtgtataccttggcagtagtaataattataatgccttcctcatcgagttgttgtggggattaaatgaagtaattgaaatgaaatcctcagctcagtgcctgacatatcgtaagtgctcaaagttagatatggacatcttattacctccttataaaataaaagcaatgtgttacttttataatcacaccacaaaagttaattaagaaaaaaaacactttgccttccatgcttgcaattaggtttggagcatctatagagttggctatggagagctctgtttccccagctctggtaaggtccgaaaagcattttcatcctcttgcaatctcaacctgaacagctgaatctttttacaaagcagcaattccaaaactgagcacactcagagctgaggaactcagagtcccattaattctgaatcatctctgcagagaccaggacactttctaggcatgagacaagcccctgcctcttggttaagaaacataattgatcatcttgatccaatttcagtgcattttcttttactccaaatttcttcctgttcttaagaacaatcttaactttcttctcagacaggaattgaaactttgcagctgacatttggaagcttccatttgctcttgttataaaaatgctggagttcagagagagataactctaccttcctgtcatgagaaagtttctttgggaaacaagactcaactctcccaactcagactcgttatctccatcatggtggagggaccttgatgggtttgggacagccaccatagagaggaggaattggattctgaccttcatctcccttcatcacctcacagctcaaccctgagcacaacaggatacacccttgttgtctaagacttgaactgtctttttgggacctttcttgggcagatggaggaagctttaatacttattggtcccagaagttactttgtttcttgagaggcaagagcttaaaagcttgcaggctctacaattagattgcctgttgaagtcctggctgtgtgaactgtgtacctcggtttgctcctctgtaaaatggggatgatatggtttcgctctgtcaccacccaaatctcatcttgaattcccacgtgttgtgggagggacccagtgggaggtaattgaatcatcggggcaggcctttcccatgctgttctcatgatagtgaataagtctcatgagatctgatggctttataagggggagcktccctgcacaagctctctctctgcctgctgccatccatgtaagatgtgactggctcctccttccaccatgattgtgaggcctccccagccatgtggaactgtaaatccattaaacctctttcttttgtaaattacccattctcgggtatgtctttatcagcagcatgaaaatggactaatacaggggataagaataatatttacctcataaggttattgaaaagataaaat

SEQ ID NO: 704148 - DNA, 843 bp, Homo sapiens
tgcaacagctctcgctgctgctggttgcaggcctgctttgcaatcctgggtgggttttgccttcctcacccactcaccagctctgatgttatctaattcatttgccgcgaatgcaaataaatctggtctcaggatgtgccctcatgcaattagcaggaaccagactacgctaaaacgctgggccgactgcttggtgcctagagctccctgaggagctgctggtggcggcagaacacctccatccttgggattgcctccagatcttccaggcacacaggctgtgacagggcccccgcccagctgtcagctgccatcaccaccacccccatgccagcttctcgaatccaaggacctctgccacctcctcctgcaaccaacctaggtgcattggaacatgcatcctgcctttatagtatacagaatatgaagcgggcaagggaattgtagcttctggactgcagcagggtctctgacagggtcttttatgtgtacacaaatgagatgagagtgggtttcttatgagtataaggggagaattcaatcagrtggtttgaaaataaagagccatgcctatggtacagccatatggattacagcaatgtctctagtggcatgccacagggctcagtcctcagccatcctattaatttccttttcatctgtgccatatatgaaaatacagggcagcttcatggagtggatgacagcaagttttgaaatgggatggaataacattggaatctcggctgtaccacctggctatgggatctcggtgaagttgcttaacctttctgaactcccatttcctctcttacagggttgttgtgtggatgaaatgataaa

SEQ ID NO: 704149 - DNA, 562 bp, Homo sapiens
gtaaaccataggaattgttccttgtaatcactttgagtggtcctttctctggtcttcagtaatttcctcacagccatgcacttattagctgaagactgaagagggccactccgcaggtctccagcgagctttctctctgyagctctctgctcaccagccctgaccctggtaaactccagctaccttggtgtcctcagaattccatttccatctcctcagctcacagaggctgccgggctgtgtttgggttccccctccctatgctgcagcctggaaatatctccaggaagcgactgggaaatgcacagggctcatcacatttatctctcaaagagcactgtccttatcacctgacgcccagtgttttggaaactgttgttacatatattttagcaggtgtgttagttgttttggtgggagtgtaattctagttgctgccattctgtattggttggaggtggaagttcaccgttgtaattgcaacttcctccattacactgaagtaggcactatcattgaacacatcaaatgatggccttgtgcactgcaatgtaacaccaat

SEQ ID NO: 704150 - DNA, 678 bp, Homo sapiens
atgtattgaaacatcacattgtactasataagtatgtatcaatattatgtgtccattaaaaaaataaaatacttaaggtagtcaaagcataagaagtatttcaatacatgtttaaaagaatatttttattctaaactatccaaaatcactaacattaaaaaataagtacaaattataatttatatgaatttgtaattaaaattatttaaagcagtattttacatcttttaaaaatgtaattatatctcattaaatacttttataagaataaaacctttgtaattctagtttcgcatccatttagtatagaatataaatgccacactttatagaacggcatatacagaaatttatgagtaatatagattaatactataaaatacttctcagccatcacatgcaactattgcaaatactgcaataattcatgaaaatttttagaaacacaaattggaacataaagagggaaaataggtgtttggattcctagaaaataatacttaattgtacacatatatgcttcattcatgctatttgcagtcaaatgctctacctcctctattatgctatttgaaagaagaatttaacaattaatttactgtttctcttacctaagcatttttgcctctcaaattccacacgcactttgaagcatgtcagctatggcataactcacaa

SEQ ID NO: 704151 - DNA, 655 bp, Homo sapiens
agctgatctgatctaagtaacatttacagattaatagaattataatgctcagtaccagggaactgcaacaggttcactttctgatcacattttcagcaatatgttcagttatggaaatttctctttgaggctgatattgacatattggagctttccagtttattcattcatgtattaattcagttgacatatcttgagtgcttgtatcatgccaggcacagagtcaaaatatgaatgacaagaatgatgtggggatggggaggtcccaaaaccatatcaaatgaaggaattgtgtatgtttaggataaagaagtcaagactgaatgaggacataattgttgccttcaaatgattagatcagacctatttttttccagtttcagagaacagatttagaattcattcatttaattatccaacaaaattactgagtgtttayactttagatagaaaggtacagggaagtaatttttgatttaacacaggaaatgctagaatgtcgttctaattattagatctaacaaagagtaaaactactcaagagatagcactccctattcattgaaagtaatattgatgaggtgggaggggagggtagttctagaagacctctgttatcgctttcaactctaaaaatctataattattgttgtag

SEQ ID NO: 704152 - DNA, 587 bp, Homo sapiens
ttaaaaagccccttcactctacctcctctaaagtgaataaacttaatcttagacaaccagggtctgctctggccacgtgtactgtgtagacgctgggttattatagtctgctggggttgaagaaggcttggctgaggagatgtgatttgagctgagctttaatgaaggatgaaattctctaagtgtcctaaccagctatgtcccggggaattttagccatgagaaagttttataraagcatacatggatccttcacagcaagaaggggatccaaacagccataagggctcaacccagccataggagacggtgggtgagtctctgttcaggtgtgatgtgaagggaacacggaggctcttctcacagaggacttggaactgctggcctacaatcgttgccagtaggaggatcacttctaacatgagtgggaaaggtggcctaaaggctcatctgaaatgaaaccaaacccaaaccatcactcagtccactttcccttatcacaggctctcccaggacctggctgcaaagctccctcctttgggaagttgtccctgccccacttaccaccaacactctgggtggaatgg

SEQ ID NO: 704153 - DNA, 2039 bp, Homo sapiens
tgctaagtataaaataatgacataagtgaatatgttaatctacacttagtatacaacaaaacactattcacaatgtaccgtcaacttggtgtgaatgttaagtttttgctagaaatgcacaaaagatgtttcattaagagtttgatttcactttatttgtaaatgtgtcttaatagactttattatagccattgtgttgagttgaagtgctcaattattcctactattttatgttaaattgtactattatctaggaaaataaaaggctgagttgaagaatctaatgcttattcaattgtaagtattgtcccatgaaagcagagactcttcatttccattcttttgtaaattcatggtgtcacaagtaggatttttatttattacttttaatcttcaataaacacaaattataaatcacattctttggatactaaaaccattactagctattgttagacttaatagactttattgtccccattttggtgagttgaagcattcagttgagtgcaatgagatgtattcaattgtggtaacattagaaaagtttcatgtttaaacggtgatctctgagaagttactcttgtaaatttaagttatgctgacttggacaactcttttcagatttatgaatatatagccttggtcacagaagtaatttaaactgctcaaggtttttaaagtatctaatgcacttctcttttatttctgctggttacaatactgctagaaaagtcagccttgctaaggttaatccaagattacacttgcaatttctgtgtaacttcaatcaaaatagtagagaagaatattgggataatttcatgactacattgctaaaaataaattacttctagtttttaaatggaaaaacaaaaaaatttaaagaaccaacrtgaaaacaacaactttaaaaaaaaggtatgagttattcttactctatgtggaaaataaattatgtgaataatttttgcttgttttggcacatttctttaactagatccataggcaagaaaagacagtaaaactcaagttgacatcaagccattaaagacctggaaagaagagggtgttaaaagcgctcaagttcagataacatgtccaaagggataattgatgctgcaaatttttaattggatttaattggatccaagaacatttaattggattatttgatctttagctaaaattacttttctttttggaagttttcggtacagacaatgatttctgattattgagactaacctgatgcacttcattttggaaaccatttcaactgtcattaaaaagacttgtttggggtttctttcttcccatggctctaatgtaattgacaagtgccttttcagtaaattacactcattacctgttctacttactcttgctagttatttttcttaagtatctgtcgaatcatgtcgtgatcctgaattaaactcctcatgatgcctccaaataaagtccatgtcctactttatgtcatacaagccttttaatcattctaaagttacctgtgtgaattgtggaaaagttcaagctttggagacagatgaattgtatgggataacatatgctttgccacttagctagctatggcagtttgctatgccttctaatactcagtgtcctcaactataaaatgggaggattatgcatgataaggaatgtcaagtttctacataatacagtgcctgccactaagcaagtgccaaagtaaacaaacagcaaagtttatgaccacttccccatattctaattcttagaaaatgtcatcaactatgcagagggcagagatcttgccaccatcatcacctacctgagcacaacagcactgcacagcctcagggatggtattcaaactgcagtcaatgtgaattgcaccctctggagatgtaaatagaccagtcactgtatgtgatgactttactcattttctagagcttgggatatgcttgtcggtttgttgaatggataatgaaactaagtgaatttctaagaagttgagaggtttgttttatattaaaaaaaatttgtct

SEQ ID NO: 704154 - DNA, 2039 bp, Homo sapiens
tgctaagtataaaataatgacataagtgaatatgttaatctacacttagtatacaacaaaacactattcacaatgtaccgtcaacttggtgtgaatgttaagtttttgctagaaatgcacaaaagatgtttcattaagagtttgatttcactttatttgtaaatgtgtcttaatagactttattatagccattgtgttgagttgaagtgctcaattattcctactattttatgttaaattgtactattatctaggaaaataaaaggctgagttgaagaatctaatgcttattcaattgtaagtattgtcccatgaaagcagagactcttcatttccattcttttgtaaattcatggtgtcacaagtaggatttttatttattacttttaatcttcaataaacacaaattataaatcacattctttggatactaaaaccattactagctattgttagacttaatagactttattgtccccattttggtgagttgaagcattcagttgagtgcaatgagatgtattcaattgtggtaacattagaaaagtttcatgtttaaacggtgatctctgagaagttactcttgtaaatttaagttatgctgacttggacaactcttttcagatttatgaatatatagccttggtcacagaagtaatttaaactgctcaaggtttttaaagtatctaatgcacttctcttttatttctgctggttacaatactgctagaaaagtcagccttgctaaggttaatccaagattacacttgcaatttctgtgtaacttcaatcaaaatagtagagaagaatattgggataatttcatgactacattgctaaaaataaattacttctagtttttaaatggaaaaacaaaaaaatttaaagaaccaacatgaaaacaacaacttwaaaaaaaaggtatgagttattcttactctatgtggaaaataaattatgtgaataatttttgcttgttttggcacatttctttaactagatccataggcaagaaaagacagtaaaactcaagttgacatcaagccattaaagacctggaaagaagagggtgttaaaagcgctcaagttcagataacatgtccaaagggataattgatgctgcaaatttttaattggatttaattggatccaagaacatttaattggattatttgatctttagctaaaattacttttctttttggaagttttcggtacagacaatgatttctgattattgagactaacctgatgcacttcattttggaaaccatttcaactgtcattaaaaagacttgtttggggtttctttcttcccatggctctaatgtaattgacaagtgccttttcagtaaattacactcattacctgttctacttactcttgctagttatttttcttaagtatctgtcgaatcatgtcgtgatcctgaattaaactcctcatgatgcctccaaataaagtccatgtcctactttatgtcatacaagccttttaatcattctaaagttacctgtgtgaattgtggaaaagttcaagctttggagacagatgaattgtatgggataacatatgctttgccacttagctagctatggcagtttgctatgccttctaatactcagtgtcctcaactataaaatgggaggattatgcatgataaggaatgtcaagtttctacataatacagtgcctgccactaagcaagtgccaaagtaaacaaacagcaaagtttatgaccacttccccatattctaattcttagaaaatgtcatcaactatgcagagggcagagatcttgccaccatcatcacctacctgagcacaacagcactgcacagcctcagggatggtattcaaactgcagtcaatgtgaattgcaccctctggagatgtaaatagaccagtcactgtatgtgatgactttactcattttctagagcttgggatatgcttgtcggtttgttgaatggataatgaaactaagtgaatttctaagaagttgagaggtttgttttatattaaaaaaaatttgtct

SEQ ID NO: 704155 - DNA, 2039 bp, Homo sapiens
tgctaagtataaaataatgacataagtgaatatgttaatctacacttagtatacaacaaaacactattcacaatgtaccgtcaacttggtgtgaatgttaagtttttgctagaaatgcacaaaagatgtttcattaagagtttgatttcactttatttgtaaatgtgtcttaatagactttattatagccattgtgttgagttgaagtgctcaattattcctactattttatgttaaattgtactattatctaggaaaataaaaggctgagttgaagaatctaatgcttattcaattgtaagtattgtcccatgaaagcagagactcttcatttccattcttttgtaaattcatggtgtcacaagtaggatttttatttattacttttaatcttcaataaacacaaattataaatcacattctttggatactaaaaccattactagctattgttagacttaatagactttattgtccccattttggtgagttgaagcattcagttgagtgcaatgagatgtattcaattgtggtaacattagaaaagtttcatgtttaaacggtgatctctgagaagttactcttgtaaatttaagttatgctgacttggacaactcttttcagatttatgaatatatagccttggtcacagaagtaatttaaactgctcaaggtttttaaagtatctaatgcacttctcttttatttctgctggttacaatactgctagaaaagtcagccttgctaaggttaatccaagattacacttgcaatttctgtgtaacttcaatcaaaatagtagagaagaatattgggataatttcatgactacattgctaaaaataaattacttctagtttttaaatggaaaaacaaaaaaatttaaagaaccaacatgaaaacaacaactttaaaaaaaaggtatgagttattcttactctatgtggaaaataaattatgtgaataatttttgcttgttttggcacatttctttaactagatccataggcaagaaaagacagtaaaactcaagttgacatcaagccattaaagacctggaaagaagagggtgttaaaagcgctcaagttcagataacatgtccaaagggataattgatgctgcaaatttttaattggatttaattggatccaagaacatttaattggattatttgatctttagctaaaattacttttctttttggaagttttcggtacagacaatgatttctgattattgagactaacctgatgcacttcattttggaaaccatttcaactgtcattaaaaagacttgtttggggtttctttcttcccatggctctaatgtaattgacaagtgccttttcagtaaattacactcattacctgttctacttactcttgctagttatttttcttaagtatctgtcgaatcatgtcgtgatcctgaattaaactcctcatgatgcctccaaataaagtccatgtcctactttatgtcatacaagccttttaatcattctaaagttacctgtgtgaattgtggaaaagttcaagctttggagacagatgaattgtatgggataacatatgctttgccacttagctagctatggcagtttgctatgccttctaatactcagtgtcctcaactataaaatgggaggattatgcatgataaggaatrtcaagtttctacataatacagtgcctgccactaagcaagtgccaaagtaaacaaacagcaaagtttatgaccacttccccatattctaattcttagaaaatgtcatcaactatgcagagggcagagatcttgccaccatcatcacctacctgagcacaacagcactgcacagcctcagggatggtattcaaactgcagtcaatgtgaattgcaccctctggagatgtaaatagaccagtcactgtatgtgatgactttactcattttctagagcttgggatatgcttgtcggtttgttgaatggataatgaaactaagtgaatttctaagaagttgagaggtttgttttatattaaaaaaaatttgtct

SEQ ID NO: 704156 - DNA, 901 bp, Homo sapiens
ggtagtcttttccccattgcttgtttttgtcagcattgtcaaagaacgtatggtcttagatgtttggccttatttctgggctatctattctgttccattggtctatgtgtctgtttttgtaccagtaccatgctgttttggttaatgtaggcctgcagtatagtttgaagtcaggtagtgtggtgcctccagctttgttctttttgcttaggattgcctggtatatctgggctcttttttggttatatatgaattttaaaatggctttctctagttctgtgaaatatcaatggtagtttaataggaatggcattcaatctataaattactttggcagtatggccattttttaatgatattgactctttctatccatgatcatggaatgtttttttcatttgtttgtgtcaatgagataattttcaaagtattaattattttgtgctcattattaaatacgagcataatagaataggtcaatcttttctaaaataaaacttaaggaggaaataaaaatacccaaagtgcttgcaattcttaaagtaacttttgtttctaaataaaatatagagaaactctgtggtctaggttatctcaatatttgtcatttttacaagcataataaaaaattatgttatttatagttgtggttrtgtaaaacaggacctgtttttataaaccccagtcagtatccttaaaattttatgggttaataaatatagtacttgccttttaaatttaagtgtaaaacacttgaagttatgagaaaaaaagttatcactactatcataagagactgatatatatgaaaccaaagagtaagtagtgaaagaactaaaattctgaaaatatttttattataagaaagctgcttttgtcataaattaaatttgtatttagc

SEQ ID NO: 704157 - DNA, 901 bp, Homo sapiens
ggtagtcttttccccattgcttgtttttgtcagcattgtcaaagaacgtatggtcttagatgtttggccttatttctgggctatctattctgttccattggtctatgtgtctgtttttgtaccagtaccatgctgttttggttaatgtaggcctgcagtatagtttgaagtcaggtagtgtggtgcctccagctttgttctttttgcttaggattgcctggtatatctgggctcttttttggttatatatgaattttaaaatggctttctctagttctgtgaaatatcaatggtagtttaataggaatggcattcaatctataaattactttggcagtatggccattttttaatgatattgactctttctatccatgatcatggaatgtttttttcatttgtttgtgtcaatgagataattttcaaagtattaattattttgtgctcattattaaatacgagcataatagaataggtcaatcttttctaaaataaaacttaaggaggaaataaaaatacccaaagtgcttgcaattcttaaagtaacttttgtttctaaataaaatatagagaaactctgtggtctaggttatctcaatatttgtcatttttacaagcataataaaaaattatgttatttatagttgtggttgtgtaaaacaggacctgtttttataaaccccagtcagtatccttaaaattttatgggttaataaatatagtacttgccttttaaatttaagtgtaaaacacttgaagttatgagaaaaaaagttatcactactatcataagagactgatatatatgaaaycaaagagtaagtagtgaaagaactaaaattctgaaaatatttttattataagaaagctgcttttgtcataaattaaatttgtatttagc

SEQ ID NO: 704158 - DNA, 901 bp, Homo sapiens
ggtagtcttttccccattgcttgtttttgtcagcattgtcaaagaacgtatggtcttagatgtttggccttatttctgggctatctattctgttccattggtctatgtgtctgtttttgtaccagtaccatgctgttttggttaatgtaggcctgcagtatagtttgaagtcaggtagtgtggtgcctccagctttgttctttttgcttaggattgcctggtatatctgggctcttttttggttatatatgaattttaaaatggctttctctagttctgtgaaatatcaatggtagtttaataggaatggcattcaatctataaattactttggcagtatggccattttttaatgatattgactctttctatccatgatcatggaatgtttttttcatttgtttgtgtcaatgagataattttcaaagtattaattattttgtgctcattattaaatacgagcataatagaataggtcaatcttttctaaaataaaacttaaggaggaaataaaaatacccaaagtgcttgcaattcttaaagtaacttttgtttctaaataaaatatagagaaactctgtggtctaggttatctcaatatttgtcatttttacaagcataataaaaaattatgttatttatagttgtggttgtgtaaaacaggacctgtttttataaaccccagtcagtatccttaaaattttatgggttaataaatatagtacttgccttttaaatttaagtgtaaaacacttgaagttatgagaaaaaaagttatcactactatcataagagactgatatatatgaaaccaaagagtaagtagygaaagaactaaaattctgaaaatatttttattataagaaagctgcttttgtcataaattaaatttgtatttagc

SEQ ID NO: 704159 - DNA, 634 bp, Homo sapiens
ctatattttaattgtaaattaaaaatttaggcacatttccaagactgagcttatatattgggtatcctcttcagaataatgttcataattggaacatttccttttttgtaaatcaaktttgatgcctctttggggcaaaaaagttaggtgtgtattatttgtggatgaggaaataaggtacatatcatcaaatacatattatatcaggtaataaataaaaattattttcagattttctacttgaaaaatgaaccagtatagaaccagtgtagagaaaggggaagaaaatgaactaaattgaagacttatttcatttttattctctcacttcattacaaagtaaatatataaatgaacttggatgaattactagaattattagaatacaaaataatcactttggaaagaaaatgaacattatttttatttgtgtaggaacaagaaagagtataagtatgaaaatacagttaaatatgtttaaatgttgagacctgaggcttctatcattctgattttatgagagtaggactcagacttgggcaggtatgattggaggaataaaagaatttggcaaagattcagtggaggacataaactaaattgaaatatcaatgaaataactgattcataacta

SEQ ID NO: 704160 - DNA, 1239 bp, Homo sapiens
tatataatcattatgagtacacaactgatcaaaactatatacatttatatttaaattgtgacaaattaataacaaagtattatttgtattgcatctgttaatgagataaatgaggcttatttagctaatttcagtaccatggatcaatattaactattgttaagaaaagatatgtatcagtgttaattctatccttatttttttataaatgtgagtgctgagaaaaattatttacacaaataagtaartgaacataaaaagtgttttaaaatagcaatgccacttaactttttgaaatccttcagtgttacatgttaaaatttgatagagatttatcatcaaaagtcatttttagtaatcaatcagattacactcagggctcacacatgagaattgcgctataaaaagactcaagatgttgagaggtaatgcatttcttctataaaatataaaaacaatatttgtaagagaaagttaattgggaattgggaaacggtaaaggaaaaatctatatatctattatggatttgttatcatatagactaattttaggaaaaaataactgtccactgatgctctgaaaaccgatttccttaaagctattcgtgccaatacataaagtccttgaaatgcctttctgaacccaagcgaatgcccatacttgagtttgaagcccataagaagaacatactatggaaccatatagccttggtatagtgagtcatttcaagagaatgttagtgaaggaaaaacctgaagtctggggaactgagcaaataaagtttgaattaggaggaagagtaattctcaagacagcagtgattgccttggaggtctagtagatgagcaagaaccttatgtactgtaagaaggaattgcaagaagttttgtgccatctgaagtagagtgtgtaagacagagggcgttgaataatgaacctagagagctgtttggaaacaaacgaagtcagctttgtaagttaggccatgaaatacagacttacctgtggacagtggtaaactactaaaatgtttttgacagagttagttattttgtttttgtctttttaagaccttcttggggcaataaggaaaatatatcccaggggaatatgtgataccaggaagatcttttagcaggtgcttggggtgaaaaagaaagaaatgatagtttcttgaaatgagctgatggcaaagaagatggaaacaattaagtttgaggactatgaaggacataaaa

SEQ ID NO: 704161 - DNA, 1239 bp, Homo sapiens
tatataatcattatgagtacacaactgatcaaaactatatacatttatatttaaattgtgacaaattaataacaaagtattatttgtattgcatctgttaatgagataaatgaggcttatttagctaatttcagtaccatggatcaatattaactattgttaagaaaagatatgtatcagtgttaattctatccttatttttttataaatgtgagtgctgagaaaaattatttacacaaataagtaagtgaacataaaaagtgttttaaaatagcaatgccacttaactttttgaaatccttcagtgttacatgttaaaatttgatagagatttatcatcaaaagtcatttttagtaatcaatcagattacactcagggctcacacatgagaattgcgctataaaaagactcaagatgttgagaggtaatgcatttcttctataaaatataaaaacaatatttgtaagagaaagttaattgggaattgggaaacggtaaaggaaaaatctatatatctattatggatttgttatcatatagactaattttaggaaaaaataactgtccactgatgctctgaaaaccgatttccttaaagctattcgtgccaatacataaagtccttgaaatgcctttctgaacccaagcgaatgcccatacttgagtttgaagcccataagaagaacatactatggaaccatatagccttggtatagtgagtcatttcaagagaatgttagtgaaggaaaaacctgaagtctggggaactgagcaaataaagtttgaattaggaggaagagtaattctcaagacagcagtgattgccttggaggtctagtagatgagcaagaaccttatgtactgtaagaaggaattgcaagaagttttgtgccatctgaagtagagtgtgtaagacagagggcgttgaataatgaacctagagagctgtttggaaacaaacgaagtcagctttgtaagttaggccatgaaatacagacttacctgtggacagtggtaaactactaaaatgtttttgacagagttagttattttgtttttgtctttttaagaccttcttggggcaataaggaaaatatatcccaggggaatatgtgataccaggaagatcttttagcaggtgcttggggtgaaaaagaaagaaatgatagtttcttgaaatgagctgatggcraagaagatggaaacaattaagtttgaggactatgaaggacataaaa

SEQ ID NO: 704162 - DNA, 749 bp, Homo sapiens
aaaaaattaaaaattagctgggcctggagacacacgcctgtagccctagctactcgggaggctgaagtgggaagattgcttgaatccaggagatcgaggctgaagtgatctgagatcgcaccactgtactccagcctgcatgacagagcaagactcttttttttttttttttgagatggagttttgctcttgttgcccaggctggagtgcaatggcacgatctcggctcactgcaacctccgcctcctcagttcaagtgattctcctgcctcagcctccctagtagctgggatcacaggcatgcaccaccaggcctggctgattttatatttttagtagagatggggtttcaccatgttggccaggctggtctcgaactcctgacctcaggtgatccacctgcctcggcctcccaaagtgttaggattaccgatgtgagctaccgcggctggccaactctgcctcttaaattaaaaaaaaaaagtaaagaaaaaaagattctggaatagaccatcaaagcaaatgcaaaagctggcccctggttggcagtagacaagacactgggcctgcatcaagactctgtgtggcgcatcctggaaggagaggtttgggagagggagttagaaaagggggaaacactacaacagccacaaccctggaggcttaatttcaccccaggtcttcatagcaatcttgttttgtttttgatctccaaaaaggggtcagcytaggatttatgagatactccc

SEQ ID NO: 704163 - DNA, 2850 bp, Homo sapiens
taagcagggttgtaaagcagtcctgctcttttgcctccctttcctgagcttcttttcagttttgacaacttttcttcactcctctgtatacccacagaatgtatcttgataaaatactatgcttaagcattttcaagcaccctatttattagtgttttggtttagagttacctttttttccttttctttaaccccaatcttttctgcttctcatctccaaacgttggagtttaatgattttccaaagaaagcctttacagaaaggtgtgaaaaactcccttgagacttttgggttttaaaagagaagttagctaacacaagcaaatctctgctttgtaaaaaatctgagatttcttgccaatttcccagaactttcttaccttcaataactataagtatagtccagtagtttggaatttcacttctgaaaggttgatattaattgtaatcattcatatataaatttcagaaggaaagaaggaattatagttatggtatataagcacattaatagcagctacacttgttaagtatttttttgtgtgtgtgccaggaactcttctaagtgcttacttatattggcctttaaatcaacctgttaagtaaagaaatatttgaaaaattgagattacagcacatttttgaaattaggaaaaccaacttgtaatacaatagttttaaatataaatacataacatggcccagagaaggacttttgagtactaggtttgagtcttctaaatttatgttgatttcgagctaggttactcaattcatttctttattattaaaataggaatatctagattacctatttattatgagaatgtataataatgtttaataaattacaaaatgtaagctggaggtggtattcttaattagataacttcaggtaagagttcctaaaattttaataaagaaagaaaaaacagatacctttttacagcttttactaatattagaccaaagtctgttatgtgcttttaaaggagtctgttaattcaaactgtttctttataaataatatagtaggaggtgattataagttgcttgatatttcttatgcttttcgtagtaaaatttggaggcccctggatttttgaaaagtaattttgttttgattatgttcttaaagtagtaaaattcattgatggggactactgtttactcttaggcttcttacagatcatccacagtactatatgttcttatcctgctttgtctttagaggattgtgatgtttaatcacggtctttcctaatagatcccattaatttcatcaggcttacttagtgcctttttttattaaatattcttcatcaaataacctgaaaaaaataataattattatcattattattatgtaccaggcactgaactgatcactttatatgcagggattttgttaactagcaaaattacttctcaaagaacgtaacaaaaaatgtttttttaattgcagtcttcttacaaaaccaattttacaagttttattttgcatatcctgttttgaaagatatcattattatctcataagcagaatacttattattctaccacagatgtcagctttgctatttgtgaaattattaaaatatcctaaatacagtgatttttggctattcataccatttccaagagttttggttttctttaatttgtcttttcctactttaatctaagtttttatttctgctttttgttttgtttgagacagggtctcactctgtcacccaggctgagtacagtggcgygattacagctcactgcatcctcaacctcctggactcaagcgatcctcccaagtagttgggactataggcatacaccaccatgcccatctgatttctgatttttatagagacaggatctcatcatgttgtccaggctggtctcaaactcctgggctcaagttattctcctgcttcagcctgccaaaatgctgggattacaggcagagccactgtgcctgtcctttatttatatttttaacataatattttgttgttagacctaatactctacattttaaattattctattctattttacttaaacctatttttcattgtattgtgattgagattttttcttagtttgtagagttaagaaaaccttctataattctatttatttgttagctttttgtagtgtttaaaattatttttctgtattctagagctatttgtgtttacctggaattataccacttttatactttctaatcaatacttacttttactgattttttaaaagaaattatgaccatttttaatggccagtattttgagtcactttcctttaaaatcttgctttttaagaaaaatactttgtcaagcttgttacattgtacagtaagctctatgtaggatgatggtgctagcatcttcccaaactgacttagaattttgactcttaatatactatataagtaagaggatccgtcagcatttacttttagttcttttgcagagatgaataaacatcctgaaatgctgatttagacaatgttttaaaaatgctttgatgcactttggtatatgactgactcttgcttagttaaatgttttgcagcattataacatagttgaattcagatcatcttttaaagcagttgtcagaaaaatgtgggccagcatggtagaatgtattagctcaatacattgtctccattttattatgaagctgctgaggaagctgtgatatacagcactgtcattacagatctattgttaggatggttccacagtcttctttgcactgccattaatttatagcagtaaacaatatgtagccttccaactgcagcaaagcagaatcttttaatgaggtggatgttattaccac

SEQ ID NO: 704164 - DNA, 1183 bp, Homo sapiens
ccccccactaccccaggtctatagaggcctttgcccgagaaaggtggggatagcggcccctgctgacagctctggagaacagcaggggtactgattttttctttttttcctaccattctccctaccttttccaggtggtggtagyggtgcggggggaatgggtgttgacccatgtgcatttattcttcgtgaagcctcttaagcagatgtctgtacttagagaagcgaccaaagagggaacgtggacttattagtggtcttagtcccaattagggaacaggtacagtttccaatataaagaaactcggcctaagtgggactgagaccccgatctccgcacttgcttttctcagccaactccatgactagtaaatatctctccgagaactgctgggccgcccgatgttactttgtttaaaggttgcgactaggatccgtaccatctgcgaagcccccttggggagcaagagccgcggcgcgcagttgatttcggggcgcagcggcagggggaggggaacgtggtgtggcccgacgagttggcacaagcctgtaactgcaagactttgtagctattgaaagttcaagtggtgaaagaaggctgtgcctgccattcttcatgtgatcataacaatagcgccttggaagtggttgcgattttcttcttccataaaccttttgggttctcactggaattgtatgcgtgttatttctgaagtttacttatttctaagaccagtccacaaaatgtgaacttcattaagttttaaaatagatcgccgtcgttaaaaacgccattctctgcactgtagtttatttgcttacttcacatgctttattaacgtgtgtatgtgcgtaattaatagctgtgttcttatcttccaagtgtatttttaaccgcaccggcttctatccaattcatctaactacgtagagcgtccatcgcttctggaatctacctcttgataacagtaatcagaatcagaaaagctcgccgttcacttaccctcatcctttaaaacttttccatttaagaaaatcgatgaacaaaacctttcttgtaactcgctcctgcactacgtctatttttatttatttttctgatttggcaggactcagcaatgctgtccgggattttttttttctttttttttttcctagctagagcagatgtgggggtggggga

SEQ ID NO: 704165 - DNA, 655 bp, Homo sapiens
caggagccctgagcagcagttcagttcagcacctggcccgctgcttccctgctttgcttggaattactgctgagggcactcagggccttgcagactggcatgtggagccaagcttcagtcacggcggactttaaatcccagctgggccactagtaactgtggcagctctccttcctgggtcttcctccctccctgagctgtgaaacagggagatggatcagaacaaactaccctcgcccttgaagggaagtggatggccatccatttatggaaaacttggtcatccgatctggtctgcagacattractaatatactcaccaaacagtggtttcttctggacaaggtattgggactggggagggtgttgtttagagcaactctcttatttgggttttccacaataagcattgattgcttttgtacagaaaatgaatgaacacttccaccccatacagattctagagcacccaaccgatagttcaagatagggggcgagatggagcacagacccctcttaggagcctgccaggcactcctctccccaagcatggaaataaaggaaaatctagaaattccaggcacgtagcaagccttgaaaagtaaatgcgcaacttgacaagcaagaaggtaatagtagcttaagacaatagcca

SEQ ID NO: 704166 - DNA, 1253 bp, Homo sapiens
gggtgcactttgtcttttttttttgagacagagtttcactcttgttgcccaggctggagtgcaatggtgggatctcagctcaccgcaacctctgcctcctgggttcaagcaattctcctgcctccacctcccgagtagctaggattacaggcatgcgccaccacacccagctaattttgtatttttagtagagacagggtttctccatgtccgtcaggctgttctcaaactcccaaactcaggtgatccacctgccttggcctcccaaagtgctgggatgacaggtgtgagccactgtgctcggcccgggactttgtcttttactcggggtgaaggatttatcagagcaaagggcaagggtaatcattaatcaccccccaccctgtgtcggtgatcacacggggatggcagacggggctctcagaatctgccgatcactggcccagctggtttgaagaatgtggtctggtcatggccctgagggaggagagagggtgccaggctcgctctgcacctggcatggtccctcactttcactggcggggagcagcaaaactggctctggcctgcccaggtcagcacacccagggagcacaggtggggaggaggacacacttgtcttaccaggtggaaatgtgacctttagcccctcaggcattttattttatttttattttgtattttttaaattttatgtttgagacggagcctcgctctgtcacccaggctggagtgcaatagtgcaatcttggctcactgcaacctctgcctcccgggttcaagtgattcttccacctcagcctccccagtagctgggattacaggcgcgcaccaccaygcccagctaatttttgtatttttagtagagacagggttttgccatgttggccaggctggtcttgaactcctgacctcaggtgatcctcctgcctcggccttccgaagtgttaggattacaggcgtgagccactgtgcccagctctttttatttatttacttttatttttattttctgagatggagtctctctctgtcccccaggctggagtgcagtggcacgatctcagctcactgcaacctccgcctcccgggttcacgccactctcctgcctcagcctcccaagtagcagggattacaggcatgcgccaccatgacctgctttttgtattttcagtaaagaccgggtttcaccatgttggccaggatggtctcaatctcctgacctcgtgatccacccgcctcggcctcccaa

SEQ ID NO: 704167 - DNA, 599 bp, Homo sapiens
agcaagacccgatctttgcaaccaagcaaacaaacaaaaaccaaaaaacaaataacaaaccaagaaacaaaccaaataacaaataccaaaaccctcttgtttgataaataaacatgacctttacaaagtaacagtaaaattttcatgtgacaatcccaaatatcatagtggatatttgcattttctaaattacaaagttcatttttatccttgacatcctatgcatagtcacactttcttgcytttgcttgtacattttcttctgcttggagtgcttttctctgtcttccctgtctggtaaaacttgtcttgctactcctgtagttccatttatgtatctcttattatatttaccactccagataataatttttacatgtatttcccagacaaactgaactttgagaaaggcaaaggctgcatcttttctgtgaatggctttgtccatcactcatgctagggcttcttggtgcttgacttaattagcactctataaaccaaggttacagatactgcttcaggcctcagaatggctcactttttaatatttgtggtaacaggaaaccataaaaacaaaaatattaccttgatgttacaaa

SEQ ID NO: 704168 - DNA, 613 bp, Homo sapiens
taaaagatataatttccatttgttgacagtggtgaaaacaggaagtttgtgtctgttgattctggggtttcactttgagtaccatggctaagtaacagatgagagccaaaattaatcatcaataaaaaaaatgactaaaaatataaagcatgcctcttcaacagtttttcataagatataaatatcttgaaaccactaaaatgaaaataaaacattacagagaaaaaaaagtcatgtaaaatcccaaacctctattttaaaaaataaatcagtgttatgrggataatgaacttaatacttactatttaattaaactttaagctaattagtctaattaattcatctgataagcatcttaatattgccagcattaagctgaatcttctagaatgtggttttaaatttggagggagtaatttaatgatgcttaatattggttgtttacactgcaaaataaatttgatatgttaatggatgcccaactcccatcgcattataaaatttatgttgattctcactgcttctatcctgcaggctagcctattcagtattctcacaacacactatgttttcttattagagcaaatatcacagccaaaaaagtaatgatttg

SEQ ID NO: 704169 - DNA, 613 bp, Homo sapiens
taaaagatataatttccatttgttgacagtggtgaaaacaggaagtttgtgtctgttgattctggggtttcactttgagtaccatggctaagtaacagatgagagccaaaattaatcatcaataaaaaaaatgactaaaaatataaagcatgcctcttcaacagtttttcataagatataaatatcttgaaaccactaaaatgaaaataaaacattacagagaaaaaaaagtcatgtaaaatcccaaacctctattttaaaaaataaatcagtgttatgaggataatgaacttaatacttactatttaattaaactttaagctaattagtctaattaattcatctgataagcatcttaatattgccagcattaagctgaatcttctagaatgtggttttaaatttggagrgagtaatttaatgatgcttaatattggttgtttacactgcaaaataaatttgatatgttaatggatgcccaactcccatcgcattataaaatttatgttgattctcactgcttctatcctgcaggctagcctattcagtattctcacaacacactatgttttcttattagagcaaatatcacagccaaaaaagtaatgatttg

SEQ ID NO: 704170 - DNA, 1250 bp, Homo sapiens
cccaccctccttgtaaactgtagcagcagaagggcagcccctttggaataagtggaagtacaggggtcgcatggagcagtagggagttcgaagcaggctcaaatctgtcaagtcctagttcagggttattatcccccaaagcactgagaaattaggcagagacagctctgttcagtggaaagaaagtgctttggagccagacgtgactgggctcagatcctggctctgcctgttgtatgctttgcgatctttggcaacacagttaacatctctgggtccttgtttcctgttccataaagtgggaatagtaatatctgcctgccagggctattgtacaataagataaacagtatgaaaagacactagcatggtacctggcacagagtattaatttcatagtattattcttctgacccagagaggtttcagtgtcccccaaagagaacactgcagaaattattgacacatacaccaaaaactttgtaaataactyctcagccacattcgggcctgttgtaaaatcatgtttaaaagttaattattttgtccttcttgcttaacagggtggaaacttgataaaatacacctgtgagttagggtttttgttatttcctacctgacagccagaaagaaaagtctgaaaattacttttttctctttactttgaattttcaagagctgatcaatttttatgttccctaaagaggagaattcaataaggcagtctggaatccaactaataatttttagtcgtgcattctagggtggaccttgatagaatgtttgttccatctttgtgttttatgttcactcttttaaactgggtaactgaatgttgaaatgttagcctgggtaagggtcagagtagcacctgcttggccacatcctacctgggtgagacacagcattgctgtagccttgagtttcctcatcattcccattcaggctggttagcgtgagcctcagttgaccaaactttcaagaatttcaaagtgtaaaattagaccaggtatataaaagttctttaaaaagctgcagttgtatttgaatacaatcaaatggcttttttctacctatgtttataaattggaaaataacatagtaatagaaatagcaatggagggtagctattttttgagaatattctttgtgccccaggaccaaactaatttgaatctcaaaaaataaaatcctactggattaggttttgggtttgttttgccttttactcatgaggaaaaaggggcaca

SEQ ID NO: 704171 - DNA, 1182 bp, Homo sapiens
tgacagagactaaatcagaatccacatttccgtgtgagtccattgcctttcctattatatcatgctcctgctgcmgtggctaaatttaccctgtgaagaagcaaaggtattcttgctctggtaccttgaaggaaatgtccaaactctctggttttataaagatttagaaacaaatcaaatttttgatagttgacatgtaaccacccctcccagagacccctcctttatagctaaccaactcagccaagtctgatacatggaaaggtgctcatgaaagtgtcagggtgctgattatttcaagttgtaaaaatcaattaggaattgcagccacatagaattggagcatcttatggacagaaaagtcctggctgtcatttcattcaaatcctctgtgtcccatatttttttttattcccattcatttctcacagttgttgctacgttcaaataccaaacattatcctttaaaataacttttaaagaaagattgagttcatcctgattagtagtattcatggaatcttgtgtttgatgtgctagttttctttctaatacttattttaaagtattattttaattgccatccttgtaccatgtaagtcatcttacatgtaatcaatggtacatatgttgtggtttgggatgcaacttcctcattattttagttggattctgtcatcttcccattatacttcaaaggggagtattcataccttttcagaagaaatgttttatggtctaatttaaatgaaaataaagatgttatcctagagtcatcttagttcctctgaagtattgtctatggcaaaggagagctgacagtcttattttgaaatcacgccctgagctatttggttattattaaagaatgacagatggcacaaaggatgctaaggtagaaattaaggtttctttgtaggtttggcaaatgttatagcatacaagggctgtttcagtgctgtgattgaacaatgcaaacagtattgcattagcatctaaattttacatcattttcaagaaaacagagtcccggtaacagatggacaagactgatatttatctagcaacaaaggggagtcacaatttgactgctggatacttaaatctcagccaacaggggagatggcaattcagggaaattgaagaggagatagctagtgtcactcttttggagagggaaga

SEQ ID NO: 704172 - DNA, 1182 bp, Homo sapiens
tgacagagactaaatcagaatccacatttccgtgtgagtccattgcctttcctattatatcatgctcctgctgcagtggctaaatttaccctgtgaagaagcaaaggtattcttgctctggtaccttgaaggaaatgtccaaactctctggttttataaagatttagaaacaaatcaaatttttgatagttgacatgtaaccacccctcccagagacccctcctttatagctaaccaactcagccaagtctgatacatggaaaggtgctcatgaaagtgtcagggtgctgattatttcaagttgtaaaaatcaattaggaattscagccacatagaattggagcatcttatggacagaaaagtcctggctgtcatttcattcaaatcctctgtgtcccatatttttttttattcccattcatttctcacagttgttgctacgttcaaataccaaacattatcctttaaaataacttttaaagaaagattgagttcatcctgattagtagtattcatggaatcttgtgtttgatgtgctagttttctttctaatacttattttaaagtattattttaattgccatccttgtaccatgtaagtcatcttacatgtaatcaatggtacatatgttgtggtttgggatgcaacttcctcattattttagttggattctgtcatcttcccattatacttcaaaggggagtattcataccttttcagaagaaatgttttatggtctaatttaaatgaaaataaagatgttatcctagagtcatcttagttcctctgaagtattgtctatggcaaaggagagctgacagtcttattttgaaatcacgccctgagctatttggttattattaaagaatgacagatggcacaaaggatgctaaggtagaaattaaggtttctttgtaggtttggcaaatgttatagcatacaagggctgtttcagtgctgtgattgaacaatgcaaacagtattgcattagcatctaaattttacatcattttcaagaaaacagagtcccggtaacagatggacaagactgatatttatctagcaacaaaggggagtcacaatttgactgctggatacttaaatctcagccaacaggggagatggcaattcagggaaattgaagaggagatagctagtgtcactcttttggagagggaaga

SEQ ID NO: 704173 - DNA, 668 bp, Homo sapiens
catggccatttatgtcacagtgtttccttctacctgagcctggtaatttccaggggtcatcttggttaaattagtttttaattccaaaatattgttgctggaaatgttcccactggccaattcatatctcctgaataataggatttgagccaaaattgaaaagtgccagtaaagtaaatgaggaatatctgccatataacctttggaaacaaacttttttttttttcataacgatttttacaagtgtaagaagttgttactgcaatgcatgtgtctgacattcctaagaaacagaggtactcttcaggacattctccagctaacttgaggtctccctcrccaaaccttttagacatggactgagggctgttttattctatgcactcattttgtgtatctctttcttccacattttgagtataagggaggcttcctgcttgttaatttttctgacatactcaagttgtacagaatgtaggaaaaaactatttcttccttatactcaaagtatatagagagagccattaataaaggtggaaaaaggaaatgctagaggggccttcaaaatggctgtgtgggccatgcgtggtggctcacacctgtaatcctagcacttttggaggccaaggcaggtggatcacctgagatcaggagttcaagcccagcct

SEQ ID NO: 704174 - DNA, 585 bp, Homo sapiens
atctcttgaacctgggaggtggaggttgcaatgggtcaagaytgcaccactttacttcagcttgggaaacagagtgagactctgtctcaaaaaataaaataaaataataaaaaattagctgggtgtggtagtgcactcctgtggtcccagctactcacgaggctgaggtgggaggattgcttgagcccaggaggttgaggctgcattgagctgtgatcacaccactgcactccagcctgggtgaccaagtgagatcctgtctcaaaaaaataaatgagtaaaataaaataatggataaataaaagccatcccccattttccaaagccctcctcatgagcagtgctgaatcacaactaagaaccattgctctagcacaaaagtcaacaaacttgttctgtaagagatagatggtaaagtttttcagctttgcaagctgtatgattactggcacaactatgcaattccatcattgtagtttgatagcagccacagacaattcctaagcaaatgagtgggactgtgttccaataaaactttatttaaaaacacaattggtgggccagatttggcccatgaactatata

SEQ ID NO: 704175 - DNA, 575 bp, Homo sapiens
ctcttctccacctggaggctatcacgcgcccccttcaaaatgctcctccaagtttcctcttcctggacacctcccctgaccctctcaggttagtcagggctcccacgatgtcctggttttaccctcgccagaacactggccattctgttgtaacatctgcttccatttctggccctggcccctggcaatgaggatggtgagagcagagatttgtcrtgttagattgatttgctaattcactgggctctactttgtccactgtcttttattttttattttgtgagatggggttttgctcttgttgcccaggctgtagtgcaatggcatgatctcagttcactgcaacctccacctccctggttcaggtgattctcctgcctcagcttcctcagtagctgggattacatgtgcccgccaccacacctggctaatttttgtatttttaatagagacgggctttcgccatgttgagcaggctggtctcgaactcctgacctcaggtgatctgcccaccttggcatcccaaagtgctgggattacaggcgtgagccccacggctggcctgaccattgtct

SEQ ID NO: 704176 - DNA, 479 bp, Homo sapiens
ggtgtctgtctgtctccaccacaggctgcaaagtccttgaggacagagctgttttctattcctcaatgcgttcggaacacagctgtaaacacatagcatctcaaaactaatttttgaatgaataaatgaaatctaaacctcagagattaaaaacaggtaycaagaattaatcaggccaaatatttctaaaaggatgggaaaatcactggcatgtgaatactaaactccatcagcatgctaactatttttccaaatagcacaaaattctgttctctgtctttgaccctgccttgattgagtgccctgatgcttacattctcacgcactgcctgcgaaatggtcacagctccacaactcataaagggtttcaaattttctgcatgataacatcagaattgctagttgacaaaggaaacaagtcaattaattgatggcttactatacaactttctctttctcgcccacacacactcacaaag

SEQ ID NO: 704177 - DNA, 614 bp, Homo sapiens
tcacttgaggccaggagttccagaccagcctagccaacctggtgaaaccctgtctctacaaaaacaaaaacacctaaattctttgctaaggtagaatccttgtcagctgaagtcattacctgcatattctaggtcaacagcccacctctgtaagaagggggacagagtggrgctcagtgcctctgctagacatcctacacttggagagcctcctgccaagtatgctgagagctggaggcaggtggaaggagtgtaaggtttggagccacacagagctaaagacccacagtgatatcaacatttattaacatcaagggcttatcagctgtataagcttgaaccattcactgtgggtctcaacttctttatttgtgaagtggtcaaaatcatatctatttataggaacgtgtggagattaaaattataatgtatatattcctatcaaaaggggatctaatacccctgactctctgcctagttattttattttattttattttattgagatggagtttcgcttttgttgcccaggctggagtgcaatggcgtgatctcggctcactgcaacctccgcctcccaggttcaagcaattctcctgcctcagcctcctgag

SEQ ID NO: 704178 - DNA, 614 bp, Homo sapiens
tcacttgaggccaggagttccagaccagcctagccaacctggtgaaaccctgtctctacaaaaacaaaaacacctaaattctttgctaaggtagaatccttgtcagctgaagtcattacctgcatattctaggtcaacagcccacctctgtaagaagggggacagagtggggctcagtgcctctgctagacatcctacacttggagagcctcctgccaagtatgctgagagctggaggcaggtggaaggagtgtaaggtttggagccacacagagctaaagacccacagtgatatcaacatttattaacatcaagggcttatcagctgtataagcttgaaccattcactgtgggtctcaacttctttatttgtgaagtggtcaaaatcatatctatttataggaacgtgtggagattaaaattataatgtatatattcctatcaaaaggggatctaatacccctgactctctgcctagttattttattttattttattttattgagatggagtttygcttttgttgcccaggctggagtgcaatggcgtgatctcggctcactgcaacctccgcctcccaggttcaagcaattctcctgcctcagcctcctgag

SEQ ID NO: 704179 - DNA, 801 bp, Homo sapiens
ttttgattttcttctaacattcataccttttcttgtgtgatcataccagttaaaatctccgactagttttgtaactatggtgactacagcattcttgtttaatgcatttaatttaatttattcacagaatgataaagaagtataagcttttgcagactgtagaaaacatctaatccagctttttaaatttcgacatgtaagaatggggaccagaatactaaaatgacttgcttaaatttatatagttcatttatgccatggcttctaccggaattcccccttgacttgcattcaagctctttagtactctaaactacttttctttacaggacaatcagtaagtccaatagtctcactctgctttgtcaaaatattgttatttgattcacacgctgctcaagcttgccagatgcacacacacacacacagtggaatgttcactcttcactatcaaactcagtgttcctcataactagcaaaataaataaagaacaaatctttttactctggcctgctatttattatgcatatttatttattacatatatatcagattacatacatagactttagtttactaaaatacagattatataaaaatatcaaatcaaktcttctctggcagacgttcagtttatatctcgaattcaaataaacttgatgcccattagtgtagtttcatacgcaagtcgaggttggtctatatgccatggccattcctttcctggaaacaggttatttgactgcaagagttctttttatgaagatggatctaacgatttttgaagttccataagacaa

SEQ ID NO: 704180 - DNA, 630 bp, Homo sapiens
aatatttataggtctttcctagattacatgcaaactaagtttgagtctctgtggaaaaacattgaaggaaaccaaaataagaaaactatgattatctctaatccttataggctatacgagacctgagggaaaaccagatgtgacttagggcaacatctgtatacttgctgttcaaagttaaacatcagtaggaagtccctcaatctcacaggaatgaggctaatgatcttttcagaaaagccagaaaggaaaatatagtctaaaacaaattccttagaaagtagtggttcatatcacaaaataatgcttcatattatacaatgattcaggagtttcttagatgktaagtatcttagttcattttacattattttgtatatctaaatctatccatgtgcaactttgaatgagcatctcttctacctaaaacaaagtacctatcttttaatttttacaattaacaaaaagcaaactaaagcacttaacgaggttaagcatcttaggtctaagattaaaaataatgacagaacatgcacaaaactcaatttctgaacctcctatgcagtaagaccccaacaaatggcaatataaaaactaactactaaaaggctgtgaagtccaggcacagtg

SEQ ID NO: 704181 - DNA, 461 bp, Homo sapiens
aaaaactttaatgctagtattgtacagactacttctgataataagatgtaacaacccccttaggagtaattgaatggtttgagaagtttgttacaaagttaaggtggctttatttaaatctgtgattgagtcagtgattctctgctctggctgtaaaataaaatcatccggggctcccctttttaaaaaattgaggtaaaattcacctaacaggctgggcacggtggctyaccctgtaatcccagcactttgggaggccaaggtgggtggatcatgaggtcgagagatcgagaccatcttggccaacatggtgaaaccccatctctactaaaaatacaaaaattagcctggcgtggtggcacatgcctgtagccccagctgcttgggaggctgaggcaggagaattgcttgaacccgggaggtggaggctgcagtgagcagagatcgcaccactgcactcc

SEQ ID NO: 704182 - DNA, 2033 bp, Homo sapiens
gaaaaataaaaggatgtaatatccgcccataaatcagtccacaatttaactaggaacacgataggaaatttccaacatccttctactttgcttttttttaaagattatcatgggatgtcagtgttaattaaaagcaacaactcccttctgagattcttcggtaatgatgtggccttatatctaaaactatatttttcattagaaaatataaacaaaattcaggcaccataactacttaaactgattcaaactttcggaaacggctcagagacagaattttccagtcaatggaattacaaagaagaaaataatgcaattttgttgttttattttgtgaacactctataattagatagtatttttttagtatattacctcagaatactaaagagattagcattaaaaaaattatacaaattctttaatcaaccttgagttacaaaatgcaaatcatcagtagacaatcaaggattttgcagacaaaggcatgatctaatacacaggcaaagaattccacattaaggcacascaatattctcctttaatggctccgatgagattttactcaccttccaaaggaatgcaaatacttgtgctgtaatacaatttggttttattgtttgaagcgtctcagcttgcagacacatcatgcacatgcattataacaagctatagtcaagctgagtttaacaaagtaatttggttatttcagaaaaagggaaagatgaataaaatattagtattctaagagattactaaaaagtggcatgattattacttaatctttcaaatgattttaaaaggaactgtgagattaaatgtgcaaatttttttctttgttcttactaacatttgataaccaacaatcaagtttccagtattactgctgcatacattaacacacattctaaaacttaaacggtagtttaccaacttctcatcaagtgaaaagtgagaactatagagatatttttttacctttcaaaaacttaatgctaagttttaagataaatatatcaatttatcatttggctttaacattactgttttgtcttttttaagagatggaggtctccttatgttgcctaggctggatttaatcccttgactcaagggatatccacacctcagacgcctgagtagctgggactacaggcttgtgccactgcacctggctgtttttgtttttatgttattaaaaagcatgtgaaccaagaagtatagacaatctctgaaaaaaaaacacgtacaatgttaaattaatagatttttgccaagattagtatgtcataaaaatagttttctttttttcttttactgacccactggtagataaaaatagttttaaaagtaaaatataagagagtttttaaagacagaaacatttgaaactacaagctgtgaatccagtcacgtgacatgaaaatattaaccacactgggaggaaatgtttaaaatttacagactcaacaccaggaagtataaaaccacttattaaaacactttttggctgggtgcggtggcttacgcctataatcccagcactttgggaggcagaggtgggcagatcacctgaggtcaggatccagcctggccaacatggtgaaaccctgcctttactaaaaatacaaaaattagccaggcatggtggcacgtgcctgtaatcccagctactcgggaggctgagacaggagaattgcttgaacctgggagggggaggttgcagtgagccaagatcgcaccactgcactccagcctgggcaacagagcaagacttcatctcaaaaacaacaacaacaaaaacaacacttttaatgaagcaggaccaaaggaaaaaaaatcggcagtttcacagtaatgaatgtgtattactttagatgctttaactaaaaagaccttagcgatgccacccagtaaacaagaaatgacctgtgacttgtcaatagggtagttactccctcttctttgtcctccaattgtaggaagacttaaggcaattttatgcttgaatcctgctgggtcagattggtcgt

SEQ ID NO: 704183 - DNA, 587 bp, Homo sapiens
cttcatagatctcatctttgaggtttaaaattataaaattagccttagcaacttaaaaatatttgccttaaaggtaagataactataattgctgtaaatctatgtaacactcaggatgtggcagtccaagttttaattcatttgcaaggaatagcagtaacaaggcattgcacttttagacagccaatttaattttttaaatattttatttatttatttttttcactgcaacctycctccctcacttaagcaattctcctgtctcagcctcctaagtagctgggattataggcgcgcaccaccatgcccggcttatttttttagtagagacggggtttcaccatgttggccaggttggtctcaaactcctgacctcaagtgatctgcctgcctcggccttccaaagtgctaggattataggcatgagccaccgtgcccggccaatggcaccctgccaatgatggccaattttaatgtccttctacatttaaggccccagaagcaaatcatatattcaacatctttatgtaatgaaacatcgtttcctgttttctgtgaattactcaagtagaatgcacggcatttga

SEQ ID NO: 704184 - DNA, 1108 bp, Homo sapiens
actctaaatttctatattattggtttcattcatcagggaattttttatgtttaaggccttatttatattattcttttaagagtgatctgttgatagtttttccttacttttctactgagccatcaatttttttaaaattaacttctaaaaactccttatatattagagaagctgttgtttgcaacacaatggtggtattctccaagattaacacttgtcattagaatttgtttatatctttttgacataaagattttttcataaatgttattttattttatgtgtttgactatattatatattacttatattttgtggcatctatatttttagtcataattttaaaattcttcctyattagaaggtttaaatgaattctcctatagtagttcttttacagtttcatgtttgacatcaagtatttcatttattttgcatctatcctggtgttaatgtgagacatgaattcaacttctgtgattcctttctagtttaattgcatcataaataaagtgtgctctagacactactccaccttttagaatttactatagttttattatggcccaatattttatgaatgttctaagaaagaaggcccaaactttctttttagtggacagaacttgattcatatcactcaaagatgtcttatttctcatattattttggtctttcatatctttatttttttgtctatagaaatgtcacaaatctgaaagaaataaataagatttcgtattgttatgtgtttctactgttccacaaatctctttatttatgctttttaaatgttgctgcttagttattgagccatagatattgttattggtttatcttcattaaatataaactgacttttctatgataaaaagcccttctttggttcatttaatgtttttggacttgaatttcaaattgaccactactttatttttgtcgccacttgcctggtatattactaccaaatattttattttcaatgtttttgagtctttttaaaaaagtatatttgttttaaatattatggggttgagtttggctatgtggtccaatgtgaaaatatacttttaaaattaggctttttcaggcctattatttttaatga

SEQ ID NO: 704185 - DNA, 1992 bp, Homo sapiens
ctgaaatcgctgcctcctacaagtttcaccagtgcatacagttagatacagtaattctactaaaattatgcggttggaaatgtttgcataggaacattcttcattcatcaagcatgtttcgatctcttttgtgctaggcactgaggacacatctagtgagcaaaataaacattatcacttcctttggcttgtagtccagtggggaagaaagaaattaaccaaataattaaaataatacacaattaaaaataatataaagcattataaagaaaagtacttcttgctttaagaatgccacattaggggaactgacttatacagagtaagagtgtgttaggggaagttgtcaggaaagttatcagaaaggtctttcctgaggatacgtctgaactaagacctgaaggatgactgctgtgttaataccatggaattccatatagcaattaaggacacatgaagaaaaacatgtattgaaatagatggccttctaaatctagtgtttgggaaaaatcaagttgcaaaatgatattatgatatattgaattattttttaactttttttgtatgccctgttctttttgccatgtggctttgtagtaacttcctctagaattgtggattacatatccttgccccgctgaaactaggtttagctgtatcattggctttggttcgtgaaaagtgggcagaagtgaccatgtgtcagtttcaagggagacctcagagacatggcgtctttcttcctatcctcttatattcaggtgatcttctgtgagatgagcaaggcccaggtagcctctacctcttcatcccaaacccagaacaaacacatatggaacagacatgaacacagccacacccagaagacccacagcctactctgcacagctacctgtctgagcccatctgattaaccaaactttagctgacttgcaacctcatgagtttgggaaaaaatgcttattgtgaatcacctagttttggggtagtttgctagatagcattgttgtagcaataatcaacaacacagttatacaatataataccatttacgtaaattttgaaaatctgtaaaacaaagctatgtattatacaygaatacacatataatttaatatcgtaagaaaaggaatggaaaagagatgcaccagaatcacaatagtcattagggtacagtgctgcctttgacagtatctgaagtgtttcatttcttaaaaacaaaaccaaaacccaaagtgtgattggcaagcttttagacgtcaatagggctagacggtagataaacaggctctggttcaaatatatatatatatatatatatattttttttttttttttttgagacggagtcttgctctgtcgcccaggctggagtgcagtggcacgatctcagctcactgcaagctccacctcccaggttcaggccattctcctgcttcagcctcccaaataactgggactacaggtgtccgccaccacgcctggctaattttttgttgttgttattgtatttttagtagagatggggtttcaccatgttagccaggatggtcttgatctcctgaattcgtgatctgtccgcctcaagctcccaaagtgctgggattccaggcgtgagccaccgcgcccggcctcaaatttaactttaccctggggtccatactgctttgctgttcaattttcacccaccacacccttgccaatttaatttcaaattgctttaaattgaggctgaacactatacaaatttggggtgttgcagatataatttatggggactagctggagagccaaaacttttatcagattataaatgttaatggaactatctatatataagtgattgatggcataatttgaccccgctaattgattgtttttcacagaattacctctgcttcttgaagttctggtactgtcatccatcacttccagaagatgagaagaatgtgttaaatactttcactgaagggagtatttcctgtgacttct

SEQ ID NO: 704186 - DNA, 1426 bp, Homo sapiens
cattcttaaacttgaacaaggacattcagacaccaggaaaaactaattagtttaacccttgataacagaataactgacttgattaggaattgagcatgggtgtagcaatgctcagttgtactggctcacaagagcagagtccattgttaaaatttcagaaattctgcaaactggttgatgtcatagagtcattgttaaaaatttaattatgtagactcacaaataaattacatcaaaaacaaagctaaaaatacttgttattatttcctcatgatgtcctacattttactatctataccttgagattatttgcatttactatatctgcacagcaaaaatactatgcaataatgtgccactgcacatcttttcccaactccacattcrgtgatgtcatgttagcagattgaaattggctatagttggtgtatttacaccatggaaatcagcaaacactaaaaatcatggctggatttattgtttcttgaatatttagacttaagaaagtgatggagaaaatgttgatagtgcagattaaaccttaagatgtgttgtatctgttgcattgtgaatagtacaaagaactgacaaaatgttagtatttaaaagctattatctcatttagcaaagaaattacatcagtgacaaacactggagttcttagatctacatacattgttttccaaagagtcagttgttaaacatttaccacacaactgcactaggaatactttgattttaatagacttccaaattaatttttgtaattttatgtatgtagagtgcctagtttgatagaatgatttggtgtcactgaagcctgaagattgggctaatgattacattagagggtaacaatgatataacagaatttttgaaatgtaattataatgccagggagacttattttatccacagtatagctgcatatatatatgttatagttattttagagagaaaaaaaattaatgctgaaaaccactattttcttttaagcaaagtgtatcttgtcaaataaatggatctatgaatctgatgaacaggattagatatgcaaatgtggaccggaaactgaatgagagaaaaagactgagtgctaaatccccctataaaaaatagaaatataagaccttgagtttttgataacaatctttaataagagaaagcataatgtaatagggatgccaaagaagtcaaagcaatatttagtgtgactttaatgataagaaaaaactgagcagatatagccaaagacttataagaagagggaagttcagtgtttaagatacataatctcacttcatgccacttaacctgagtgctcctcgaactttaatgtgcatataaacttaattccaattctgtaggcttgacgtaaaacctgagttttgcatttttatttttttatttttatttttattttttc

SEQ ID NO: 704187 - DNA, 1716 bp, Homo sapiens
gttcaaatcttcctgttatgagattgtcagacttataaaatattatccacatggcgcagttttgaacagtgaaagagaagttgaatcaaaatttaaaagctcagtgcatagaamttttgggtcctaggagacacacaagaatttcccttttaaggaaattggctacgtattgtttgcaaacccctattctggtaaaaaaaaaaaaaaaaaaaaaaaaaaaagtaaattccagttccaaggttgaataacttttttcttagattagaatggtactcatttgagcaaaaagcactactattacatgtgatctaggacaatactaatttatcttctctctggccatattgaggaaagtggaaaacaaatcacacagtcccactctccacatgaacgccagcaatcagctaaacataataaacctgcaagagaatatttttatattatcaaatttgtttatttcccaaaatatgtattttggaaaaaggtatgtattttggttacctatattcaaaattagtcagaattcataagagctatcaacaaataacttaagcacatttcctctattttatacctcattaatgggaagacatcatggtataaagtaaattcgtgggtatctaagatgctcagaaaatgtatactttctctataataaggtatcatcaaaggctgtttctacttaaagtcctgttgcattttgaactccccctttcaaatatttttcactttctttaaatccccaactttgttcctatctaaagatatgactccatctcttattttactgagagaatggactccatcctttctatctcaaatttcctgctcctcaacatctctggcttggggccttcgttctcttcatttgtggtaccatagttctcaacgctgggtgcacaattaaataaaaacctggagagcttgaaaacaaatactgttgcctaggcaccctctagactaattagttaagaatatggtttgaggaccactgacctgatcttttcccctaaaagaaatccagttattcacctgtggtcaaggtcctaagtgagaaggcattgattcaccactctttctcatctccatcgtttttcttttccactttttctcatgctaccaagcagctcatttcatcacatcctcaaaaatcagtccaagaaggatctttaaagggagagagaatcccccttcatagaacacaggtagttgccgatgctcccgctagctttcttatccagttgcaatggcttaacaaagccatacttccagaagccaaataaaaccaaagatacattagctggaaataaaaaatgatcatgaaattgatcatgaaaggataatcttgctagggataatgtgtttaatagcagagcaccttctctcaagataaaaaacgtggtttcttactacatttatgtgataggagattcactgtaagaaattatctttagtcaactttgttgcttttctcttagctagtgaataaaaaccttatttactgataattgtcattacagtagatgacatatacgcttaggatgggtatttcatcttgagcagagtagacaagccatgccattaaacatgtaaaagagtggctttaaaaaaagtggatctcatggagttggagagtttcagaatggtggttaccagaggctgggaagggaggtgaggaaggagggatgaaggtaagttagttaaggagcacaaaaa

SEQ ID NO: 704188 - DNA, 1716 bp, Homo sapiens
gttcaaatcttcctgttatgagattgtcagacttataaaatattatccacatggcgcagttttgaacagtgaaagagaagttgaatcaaaatttaaaagctcagtgcatagaaattttgggtcctaggagacacacaagaatttcccttttaaggaaattggctacgtattgtttgcaaamccctattctggtaaaaaaaaaaaaaaaaaaaaaaaaaaaagtaaattccagttccaaggttgaataacttttttcttagattagaatggtactcatttgagcaaaaagcactactattacatgtgatctaggacaatactaatttatcttctctctggccatattgaggaaagtggaaaacaaatcacacagtcccactctccacatgaacgccagcaatcagctaaacataataaacctgcaagagaatatttttatattatcaaatttgtttatttcccaaaatatgtattttggaaaaaggtatgtattttggttacctatattcaaaattagtcagaattcataagagctatcaacaaataacttaagcacatttcctctattttatacctcattaatgggaagacatcatggtataaagtaaattcgtgggtatctaagatgctcagaaaatgtatactttctctataataaggtatcatcaaaggctgtttctacttaaagtcctgttgcattttgaactccccctttcaaatatttttcactttctttaaatccccaactttgttcctatctaaagatatgactccatctcttattttactgagagaatggactccatcctttctatctcaaatttcctgctcctcaacatctctggcttggggccttcgttctcttcatttgtggtaccatagttctcaacgctgggtgcacaattaaataaaaacctggagagcttgaaaacaaatactgttgcctaggcaccctctagactaattagttaagaatatggtttgaggaccactgacctgatcttttcccctaaaagaaatccagttattcacctgtggtcaaggtcctaagtgagaaggcattgattcaccactctttctcatctccatcgtttttcttttccactttttctcatgctaccaagcagctcatttcatcacatcctcaaaaatcagtccaagaaggatctttaaagggagagagaatcccccttcatagaacacaggtagttgccgatgctcccgctagctttcttatccagttgcaatggcttaacaaagccatacttccagaagccaaataaaaccaaagatacattagctggaaataaaaaatgatcatgaaattgatcatgaaaggataatcttgctagggataatgtgtttaatagcagagcaccttctctcaagataaaaaacgtggtttcttactacatttatgtgataggagattcactgtaagaaattatctttagtcaactttgttgcttttctcttagctagtgaataaaaaccttatttactgataattgtcattacagtagatgacatatacgcttaggatgggtatttcatcttgagcagagtagacaagccatgccattaaacatgtaaaagagtggctttaaaaaaagtggatctcatggagttggagagtttcagaatggtggttaccagaggctgggaagggaggtgaggaaggagggatgaaggtaagttagttaaggagcacaaaaa

SEQ ID NO: 704189 - DNA, 599 bp, Homo sapiens
tatactcttttaaattccaaaacagacccacacctgtcagtattatcactggtattacaaaatgaccttaaaaggcagtgagtaaataaagacactttaaataaacagtgctggataaataaccatataaaaatgtggttacccaatttgtcctcaataagaaaaactacataaattgaaaacacaagtagatactacctatacgtaccgaaatggccaaattggaagacagatgatactgagttttgataaaggtataaagcagctggaatcctcttacatgttggtgagagtataaattggcacaaatactttggaaaattatttgacagtatcttttaaaaaattgarcatagacataatttataattatctacatattgtccctaaaggaatgtgtatttgtttgccaacagacatgcacaaacatgtttatagcagcataactcataaagggccaaatgttaaaagtaacctaaatgtttattaattacagtaatttcatatatggaatcaaatcacaaactgcaactactcacaataaatggatgaatctttaaaaatataataatgtcaaaagaatccaggcatgaaaatgg

SEQ ID NO: 704190 - DNA, 856 bp, Homo sapiens
atgctgacattttaacatttctaatcattactattgtgcaaacaaacaagtttcctctaagtcatttaggagaagacagtcatttaatattaaagaaatagaggtttttgcttttttttttggccaatataatagctatactgggctaggtatggtggctcatgyctgtaatcccagcactttcagaggccgaggcaggtggatcacctgagttcaggagttcaagaccagactggccaacatggtgaaaccccgtctctactaaaaatacaaaaattagccaggcatggtggcgggcgcctatagttccagcaactcaggaggctgaggcagaagaattgcttgaacccaggaagcggttgcagtgagcaaagatcgcaccactgcacttcagcctaggcaacaaagcaagactctgtctacaaaataataataataaaataataatatttatatggtaggtcccattcatgtttttaaatatcatggtataaaactcaccagaacactgaatacttttagagttaaaaagtaaacatccagaaccaactgaaagtgctctcgatggccaaaaatggaacaatttgagcaacaaaataaagtaatattggattataaaccagtgaataaaataaatttctacaaatccatactaatataaatgattgaataaattaataaatggggagaagagacaagtctcctgcccagaagaatcccaaatattttatctggattccctgccatcaaggggggggagcataactccccgctccttaaaagtgcacttcacatagtgacttccctccaaagaggatagcatgagaagggggaagggaggggtggagtgggtggg

SEQ ID NO: 704191 - DNA, 584 bp, Homo sapiens
tgatgagcaaataaagggatagaggcacattctattagtttaaaaayatggggccctggaacaacttaatatctacatgggaaaaaaacatgatctctacttcacaccatacataaaaattaatttgagatgggtcacacacatagacgtaaaaactaaaactataaaatatgtagaaggaaacataggggaatgcctttgcaatgttgggacaggtaaagatttcctaggttacagaaagcactaaccattaaaaaactaataaattaaacttcattaacattaaacatttctgttcatcagaagacactgtgggggctcagaaagtgatgcccccaagtgaaggcttcagaagcagcctcaaaagcaaagttcctctggctctctcctgctttcctgtctttcacctctcattcttcttcaagacaagccacagaaactagaatttctcttctgcaaagtggttcataaaaaccagaacccaaaaatccccaaagccagccataaaacataaaatactactctaaccttcccctgcctttttgagtaagaactggacataaagaaattctcttacctacttt

SEQ ID NO: 704192 - DNA, 584 bp, Homo sapiens
tgatgagcaaataaagggatagaggcacattctattagtttaaaaacatggggccctggaacaacttaatatctacatgggaaaaaaacatgatctctacttcacaccatacataaaaattaatttgagatgggtcacacacatagacgtaaaaactaaaactataaaatatgtagaaggaaacataggggaatgcctttgcaatgttkggacaggtaaagatttcctaggttacagaaagcactaaccattaaaaaactaataaattaaacttcattaacattaaacatttctgttcatcagaagacactgtgggggctcagaaagtgatgcccccaagtgaaggcttcagaagcagcctcaaaagcaaagttcctctggctctctcctgctttcctgtctttcacctctcattcttcttcaagacaagccacagaaactagaatttctcttctgcaaagtggttcataaaaaccagaacccaaaaatccccaaagccagccataaaacataaaatactactctaaccttcccctgcctttttgagtaagaactggacataaagaaattctcttacctacttt

SEQ ID NO: 704193 - DNA, 627 bp, Homo sapiens
agtggtaggaaaggatggagggcaaggagaaggtattgtcttgctccccatttgtgattctgaaaagtggtcacctctctgattgcaactgtatcattttctaggccagaccacaccaatgagactgctcagtgctcaggaaggagactgtaaagtttaggatttcagtatggcatgaaaacaagttgagccagatatctgtcatagcagcagaagcaaaagtcaaaccaatggactgaaagaagggtcagtaggaatgggaattgaggtgaagtctagccagcctctgttctgcccatgacagacctgagttccagtacacacaagctttagttgtgagtgccagaagagtcagctgctttcaggaagactagggytgtcatcctaaaaatcagaggaccctgatcctttccttctgccatgaggttaaccaactgctctcagcatacatcttggcatactgctgtcccaagttcatgagaggctctgctcattatttttttcagtcatgcctctctttgtgcttcagtatatataatttattttgactatcttcaagtttactaatgttttcttgtattgtatccaatccagtatgaatcttattcaatttttttttactttgga

SEQ ID NO: 704194 - DNA, 545 bp, Homo sapiens
tgcagcagctccttacacctttatcagatactgtcttgtgctgctctcagttttctggaccatacaaacgtggagggcaacggtaacacctttgatctattttgtatcttccaaagctgtgtcagaaacatagtagatgatccatgcatgccacttcttggccataactcttcacatctgtgtttggctttatggtttgtaaattctttcatttatgtagtcttcttagatcctcaagataactcagtgaagtatgcttgcttgctgtttttaatctcaacttaacagatttaaggaaatggtaattgaataggtaattgcaaaacccagggtcacccaggtgataaatgatacatccaggaaaagaatgtgttctctcccctatgcaaatgattgataggtggattgacttccatgctttagcagatgtgtcaaatttcacatccgcattaacacttctaatcctgtaacgtaattctgtctttttawagatgtcaaactggttttatctcagaaaagggaactgcaaaatactttacttatgc

SEQ ID NO: 704195 - DNA, 1420 bp, Homo sapiens
cgcctggctgagggtatctttttgaactttaaagttcaatagttatggcctctccaaaaaaacaagaagcagtcagaagtcaactcaatagaatagtatgtgtagaaaaaatatgtgcttcatgggaagttgtgatgatggttttttctcttgcttttatttttcttaaccccagtaacctgaaattggccacacttacacacaaaagaatatatcttaataaaaaattaacttctgacctatagtaaaaagtggcagaaattaaaagaaaaatgtattcaaatgcaattaaatttaaaattatgctactttattctcctctcacaatttatattttaaaaatgtttatgagtctgaaataaagcaagatggtggccaaggagaagaaagctattcccaaatgtgggacttgcccctgcagacctagtctccatccttcactgtcagtatagtcattgccctgaagatgacttttcatggactgactcaatgggctctcttgccttccagtttcctgttgtaaggtgatgtatacaggagattggaaggcaggaaggtgagttccaggtgtttattctaagagttgctgcaataaacacctggaactcagctgcattcttccacccatggccatggcacctgcagggtcattgccctactaaacactcccaccctttcccactcacccctccaggtcaaaggttagtgtcagccccacactgtgctagcccaacatgacttcactgcccctgagcaggacctcctaacattgcctgaacatttatacaaaacagttctttccttaaacccagttccctcatttgagtaggccggaaccctggctgagacaccagagagctttataccaaacttctcaagattcttgacacagagggatggggcactggggtcagagaaagtcaagagaagagcaagaaaatagcagcaaaagcagtttctttgtcatttcctgaagcttcagagactgyccaggaagaagagggtaagggcataaggccaagcgggggaagatatgattctttagacaaaaacatgaatggagggaaagggccaaaataataaaattaacaagaaagctgccattccttaataacttactacctgcataacattgtgtttcaccgtctacttgcattatctcatgtgatttcacaaaagcccattttccaggtaagaaaagtggatgtaagtaggttactttacttggtcttggtggaaaaagctggatataatggcagggtggtctacgatgagagcccaagaccttaactgcactgatgccactgtacccacactaagactctgagaagccctaacaactgttgtgtgatgaaaaggaatagggcctggatgctctggaaatcttgtgccagcccaagaatctgcagctaggctttaa

SEQ ID NO: 704196 - DNA, 1420 bp, Homo sapiens
cgcctggctgagggtatctttttgaactttaaagttcaatagttatggcctctccaaaaaaacaagaagcagtcagaagtcaactcaatagaatagtatgtgtagaaaaaatatgtgcttcatgggaagttgtgatgatggttttttctcttgcttttatttttcttaaccccagtaacctgaaattggccacacttacacacaaaagaatatatcttaataaaaaattaacttctgacctatagtaaaaagtggcagaaattaaaagaaaaatgtattcaaatgcaattaaatttaaaattatgctactttattctcctctcacaatttatattttaaaaatgtttatgagtctgaaataaagcaagatggtggccaaggagaagaaagctattcccaaatgtgggacttgcccctgcagacctagtctccatccttcactgtcagtatagtcattgccctgaagatgacttttcatggactgactcaatgggctctcttgccttccagtttcctgttgtaaggtgatgtatacaggagattggaaggcaggaaggtgagttccaggtgtttattctaagagttgctgcaataaacacctggaactcagctgcattcttccacccatggccatggcacctgcagggtcattgccctactaaacactcccaccctttcccactcacccctccaggtcaaaggttagtgtcagccccacactgtgctagcccaacatgacttcactgcccctgagcaggacctcctaacattgcctgaacatttatacaaaacagttctttccttaaacccagttccctcatttgagtaggccggaaccctggctgagacaccagagagctttataccaaacttctcaagattcttgacacagagggatggggcactggggtcagagaaagtcaagagaagagcaagaaaatagcagcaaaagcagtttctttgtcatttcctgaagcttcagagactgcccaggaagaagagggtaagggcataaggccaagcgggggaagatatgattctttagacaaaaacatgaatggagggaaagggccaaaataataaaattaacaagaaagctgccattccttaataacttactacctgcataacattgtgtttcaccgtctacttgcattatctcatgtgatttcacaaaagcccattttccaggtaagaaaagtggatgtaagtaggttactttacttggtcttggtggaaaaagctggatataatggcagggtggtctacgatgagarcccaagaccttaactgcactgatgccactgtacccacactaagactctgagaagccctaacaactgttgtgtgatgaaaaggaatagggcctggatgctctggaaatcttgtgccagcccaagaatctgcagctaggctttaa

SEQ ID NO: 704197 - DNA, 653 bp, Homo sapiens
gtgttttctctatgctaatggtgtggagaagaaactaacaaaatgtcaaaagagtcaactccaaacccacagtctatgaatggcttccttagcagtgaaggtcctggcctagaaagtttctgaattttggcatcacctgcctgtttgtttcacatagttctatgcccagacccagtctccttatattgttgttagtaacaattatatcgaatattaagtgggtgaagagaccccatccaagtttctacattaatttctgttttcaaatttctgtttttagatatcctgaaatcttttgatcaacacaaaaacctcgtgcttcaacctatccttaattcttttggacactcctttttcactttcctgttacttgttagagaatcactatcttctaagtattcccactagacagccaaaaatattttgacaagctttctgaggtwtgtactataaaaattatagatattaggggattttaaaataaatttagagactgtggtttttcaagctacacatactcctaattctaaaacaccatgatgcaataaccctccccctacctccattaagaataatttatctacatggaaggccaagtggatgttgaagggcttttctaaatttcttctgcctaatttgacctcatagaataa

SEQ ID NO: 704198 - DNA, 653 bp, Homo sapiens
gtgttttctctatgctaatggtgtggagaagaaactaacaaaatgtcaaaagagtcaactccaaacccacagtctatgaatggcttccttagcagtgaaggtcctggcctagaaagtttctgaattttggcatcacctgcctgtttgtttcacatagttctatgcccagacccagtctccttatattgttgttagtaacaattatatcgaatattaagtgggtgaagagaccccatccaagtttctacattaatttctgttttcaaatttctgtttttagatatcctgaaatcttttgatcaacacaaaaacctcgtgcttcaacctatccttaattcttttggacactcctttttcactttcctgttacttgttagagaatcactatcttctaagtattcccactagacagccaaaaatattttgacaagctttctgaggtttgtactataaaaattatagatattaggggattttaaaataaatttagagactgtggtttttcaagctacacatactcytaattctaaaacaccatgatgcaataaccctccccctacctccattaagaataatttatctacatggaaggccaagtggatgttgaagggcttttctaaatttcttctgcctaatttgacctcatagaataa

SEQ ID NO: 704199 - DNA, 1790 bp, Homo sapiens
gggaggggagcaacacacactggagcctgtcaggggggcaggaggagggagagcatcaggactaatggctaatgcatggggggcttaatacctaggtgatgggttgacaggtacagcaaaccaccatggcatacgtttacctatgtaaccaacctgcacgttctacacatgtatcccagaacctaaaataaaatacaattttttaaaaaaggaaaaggtttctggatgtagtttttatggatgtgggcaatttattataatacttaactgatttgtctctgtattacagtgttctttacgtttttcttgccagcaccacaggcctctttgtggttgcccctttctaatgctcctcaagacaacctgctaatataagcaaagagtaaatgagtgaggagagcaccttctcatgtcaggaagcctatggagttagatcacctggatttgctcatttcctggacaaaaactgcccttttaatcctcaatttcctattaaggactggttcaacattatcatttcccagggagagtcttcaacttgaagtgatcactcaatcactaaaagcctccaacttgaagtgattgcaaaaccactacagctgcacctttcttatgcatttctyttattgccttttggattggactttatgccttatttttttctccatttccaagtgtgtcttgcctagaatgtagcacacagtaggagctcataaaatatccactgaaattgagttgaacaggagagataaggcaaggaaactcagtggatcaaggccagctcttgccaagagttccaaacttcatctttgtacctgagctgcatatttctatggccttgatgaattccttggcagcagaatgttcaacaactgaaacatttatgaaaatttaagcaaatgggtcaataaagggaacaaaacgaagcccacacagtctactcttgtgctcttttgcttttaaagaagcttgtttgtgttatcacttcaacggtttgataaacaactgtgccttctcacggatctgtcccctgtgtttgaagtggtaaaatgtgatgattagtcatgggtaaaagctgtatgcatctttccaagctgcacggcaatacgtgtgcaggaatttgaggtaagtagagatgggtgcatggatatcaacctagaatgacaattttaatgtgtgttcatctacttggaattttcaggtttgtccataccagactttaaaaaaaaagaacattcagataacttagtgatttctttatttatttatgacaacaggaaaatcttatttttaaatacttataaaaatccagagttgccctcaaagcatttggtctgggaggtgtgtatcagaggagttgccttactttatcacccactcctacccaccccaggctcttctcacaactatgagattctatgaaacacataaagcctctgtattatttccttttattgtcatattcctgcagtttactatagaagactattggactggaagtcaagagagctacgctctagtgctggcttggctgttaacttgctttaatgttgagtaagccgcactctgtctttgggtctcagtttcttcatcagtgaaataaagaaatttgtctgtatgaattccttgctatggtgatagttttatttaaatccagttaattatgaaaaattatttattcctttaaactaaacttgtaatcacataattttagcaatgaccatgggattcagatttcttagatgatgtctgaatgttcttgtgagtgtgtgtgtgtgtatgtgtgtgtg

SEQ ID NO: 704200 - DNA, 1335 bp, Homo sapiens
gggcaaaccgagttaaaaaaaaaaaagagagagaggtttagtacactgaggttcatccatggaatagaagaacgagaacctgatcccagatcttctagcatttaatagattagattagaataatctaagtagtctgttagattaatacattagaatattagttatatttcattggaacatgcaccatgtgtattttatgcctcagtgtatcaccagagtatacaatgtcataattccaccagtgtgcatactacagttagaaaagctcagccttagaacagctaacaaacagcaggttctaaggaaatactgcttattgaatcaatcaaccaatggtctcattttaaaagactggcactgattggtctgtgctattgctttagttgtctccytcatgtttatgttattgttattgagggtcttgctatatttgcataatcgtttgttttttatgctgatgcaaatcaaagcccatagtaaaaaagtactcatttcatctcatgttaagttatttgtaggcttgaaaataaagagtgatttacatgaaaacctttatcttgatacatagcaaatatttctcttttaaatcccagaagaaagaagtaaaccaaattcaattttaaatagtgctagaaatgttgaacatgttttgaaatgaaggaaaagcctttagataaaatgtgtaaatagtctaattttaaattttccagatttaaacaattagaatgatcatataataaatcttatataatagtcttgtttgtagagtatctaaccccaatttattataatatgtgaaagagactaagggcaaaaaaaaaaaaaaaaaagaaaaacaagaaaaacaacccaacacattttgaagcaggaagcatatctagatttttcagttcccaagtatctgaaaagaaatttcccaaattacctgtgttgaggtttgttcaatctgttagagtgctatcagtactggaggattcgaggaaaacctgtttcacgtgggtgataattgtagaagtgaatgaggtagggagagattggcattgctgcctcttcctgcctgcttggtaaaggactctttggtgcatttagttatcttctgaacagcctctgaaagtttctggattctttttctgcagtctagtccctttgggttgcttctcaggctaatggccaatccacaaacaagaaagaaacaaaaacctaaccacagaatggcagcatgcctttacttctatcacgtagtttaaagtcccactttcaattatgtgtgctttttcaatcattagtaatggggcttgtttcaggtaaaaagccaggcagagtatgcgctaaaga

SEQ ID NO: 704201 - DNA, 1335 bp, Homo sapiens
gggcaaaccgagttaaaaaaaaaaaagagagagaggtttagtacactgaggttcatccatggaatagaagaacgagaacctgatcccagatcttctagcatttaatagattagattagaataatctaagtagtctgttagattaatacattagaatattagttatatttcattggaacatgcaccatgtgtattttatgcctcagtgtatcaccagagtatacaatgtcataattccaccagtgtgcatactacagttagaaaagctcagccttagaacagctaacaaacagcaggttctaaggaaatactgcttattgaatcaatcaaccaatggtctcattttaaaagactggcactgattggtctgtgctattgctttagttgtctccttcatgtttatgttattgttattgagggtcttgctatatttgcataatcgtttgttttttatgctgatgcaaatcaaagcccatagtaaaaaagtactcatttcatctcatgttaagttatttgtaggcttgaaaataaagagtgatttacatgaaaacctttatcttgatacatagcaaatatttctcttttaaatcccagaagaaagaagtaaaccaaattcaattttaaatagtgctagaaatgttgaacatrttttgaaatgaaggaaaagcctttagataaaatgtgtaaatagtctaattttaaattttccagatttaaacaattagaatgatcatataataaatcttatataatagtcttgtttgtagagtatctaaccccaatttattataatatgtgaaagagactaagggcaaaaaaaaaaaaaaaaaagaaaaacaagaaaaacaacccaacacattttgaagcaggaagcatatctagatttttcagttcccaagtatctgaaaagaaatttcccaaattacctgtgttgaggtttgttcaatctgttagagtgctatcagtactggaggattcgaggaaaacctgtttcacgtgggtgataattgtagaagtgaatgaggtagggagagattggcattgctgcctcttcctgcctgcttggtaaaggactctttggtgcatttagttatcttctgaacagcctctgaaagtttctggattctttttctgcagtctagtccctttgggttgcttctcaggctaatggccaatccacaaacaagaaagaaacaaaaacctaaccacagaatggcagcatgcctttacttctatcacgtagtttaaagtcccactttcaattatgtgtgctttttcaatcattagtaatggggcttgtttcaggtaaaaagccaggcagagtatgcgctaaaga

SEQ ID NO: 704202 - DNA, 1335 bp, Homo sapiens
gggcaaaccgagttaaaaaaaaaaaagagagagaggtttagtacactgaggttcatccatggaatagaagaacgagaacctgatcccagatcttctagcatttaatagattagattagaataatctaagtagtctgttagattaatacattagaatattagttatatttcattggaacatgcaccatgtgtattttatgcctcagtgtatcaccagagtatacaatgtcataattccaccagtgtgcatactacagttagaaaagctcagccttagaacagctaacaaacagcaggttctaaggaaatactgcttattgaatcaatcaaccaatggtctcattttaaaagactggcactgattggtctgtgctattgctttagttgtctccttcatgtttatgttattgttattgagggtcttgctatatttgcataatcgtttgttttttatgctgatgcaaatcaaagcccatagtaaaaaagtactcatttcatctcatgttaagttatttgtaggcttgaaaataaagagtgatttacatgaaaacctttatcttgatacatagcaaatatttctcttttaaatcccagaagaaagaagtaaaccaaattcaattttaaatagtgctagaaatgttgaacatgttttgaaatgaaggaaaagcctttagataaaatgtgtaaatagtctaattttaaattttccagatttaaacaattagaatgatcatataataaatcttatataatagtcttgtttgtagagtatctaaccccaatttattataatatgtgaaagagactaagggcaaaaaaaaaaaaaaaaaagaaaaacaagaaaaacaacccaacacattttgaagcaggaagcatatctagatttttcagttcccaagtatctgaaaagaaatttcccaaattacctgtgttgaggtttgttcaatctgttagagtgctatcagtactggaggattcgaggaaaacctgtttcacgtgggtgataattgtagaagtgaatgaggtagggagagattggcattgctgcctcttcctgcctgcttggtaaaggactctttggtgcatttagttatcttctgaacagcctctgaaagtttctggattctttttctgcagtctagtccctttgggttgcttctcaggctaatggccaatccacaaacaagaaagaaacaaaaacctaaccacagaatggcagcatgcctttacttctwtcacgtagtttaaagtcccactttcaattatgtgtgctttttcaatcattagtaatggggcttgtttcaggtaaaaagccaggcagagtatgcgctaaaga

SEQ ID NO: 704203 - DNA, 2156 bp, Homo sapiens
tgtgctatgcttcatgttgtaataaggaagatgaaagaactagggctaacaaataactttttcaatggtcaatttaaccctataatttattctacattttggcactccaagtccatacgtattcattaagctgtcattctagtcacatactttcattcaagaatcttcttatgccattccagtccaatgctggcagatacctctgaataattaatattaagtaccatttttaataaaagccctcagggtcatatgtctaytttgaacaaaagttcaaagagaaactaaataaaatacattttgtcagtcactaatccttcaatgtcttctatttaaaccatctaacttttactccccaaatgaagttgattcttcactggcaattttcctgttcctgttatagttctgacagttctctgaaacttcaactttgatcatgaaaagagatgctccaaaatgtaaatcaggtatcctcactatactaaaaactatacagtgtcaaaatagaaatatcagaaaccaaagttctctgatcagacgctttctatgaaatatgaaatagctaaaccaactctaagctgtgcctcaaatttatatgcttccaagctattcaaatataaaacaagcactaacaaatgcgcaaccttgtccatcgcaaggctaataaatcaaaatcaccaaggtaagttaactgcattttcagtgggtgcagatttatcatcagaggcatgataatcatgcaaccactagaaaaagcaatgtgttttccatggccttggtcataattcaccaacaacactgacttgtaacgtttcactatatcactctgggcacactctaaaaaacgatttcaggactttgggtcttctgaacacgcatgtgttcatctggtgatttttttggcactacaatttagtatgaaaactataaacacctgatacctaaagaataaggcagtggataagaaaactgaagaaaagcaggacttaaatgtctttaaaggtttccgaaaatgaaaagctgactggaaacctcagttattccaaatacagaagcctccacattttcaccctttcagcaatgactatagcccttacatctgacaatttcttttagttgaattcactacaacaggaatgtcatcaaggttgatataaagtcagagaaggttcacgcattctgttctgtaagtagttttattttgatttccacaagtggagaaaggcttgactgccacaaatgtttccaagaaggacaaagtggttaaaagatactgatatctttccaggttttcagagattaatagaaagtatagaaaatcacataaggaacacaagataaaggaaataagttgttgcaaagatggacaagatgtcaaggtatacttacctaacttgcacctttgctcccaagtttagaatgtgaaaaaattgaaattgcatttttaaaatatttaaatggagattttttaaatcctaggacaaaaggccaagtgtccagagataaaatcttgaaaagtttgactatttgaagaattgcataaagccaaaagcctgaattggaatcctgattgcgatccttcctggatgtgtaaatttgggctagctatataatcactcagagcctctggtgtttgttcttattgttgtttgttttatttttattttttggttgttttggttttggtttttagttgtgaagtagagatcataatgtatatcaagagcatgaaacatatgcaagaaagttcatgccattaattattaactctctcttgaagtaggttatgggtctttgtgagaagacaaaaagcagagacagagagtgagcaagagctccacatttattgtggaccatgagttctgaagacagtccagaaagtgaccattgtcgagcttttctgactgctgggtgggaaatgaatccattggaaaactcaaggttctaataatagtagtagctaatatgctagacacaacaatctaattgaggtggttctatcattatctattaggattcttattctacttctgcataaatcaaaggtcagataaattaaggagttttctcaggttataggcatcaaatggatgtgtaataaaaccaaaagcaagctcaagagctggcagcaatggtcatagagtgggttctgtcca

SEQ ID NO: 704204 - DNA, 614 bp, Homo sapiens
gaggctctgctaaaaatgactagctaaaaagaggtagaaatgcaacttcccactggtgcttgatacagggggttatcacaagctccatatttggagaggcagaggagacagacatgtcttaccaccacgccctagccacaccaacactgactcagaaacaggtttgaaatatcactatcaaaggggcaggagccccaaggaaccaatataagatctggttctggactgggaacttaggggcaactacaaaactgtgaawcagaaagtggtgagcattagaagtaaataaaacataaaaatataataaaacttactactctacataagcctgaaaattattatgaaataacttaaaaattatttaacatatgtccaaaactaacactaggaaagacagccaataagatcaataagatcaacaattggaatagtaatttactccataggaaacgaaaacaataaaaaaaatgaaaaagaatttaaaataagtaggttaagactctaccaagagacagaggaggaaaccatctctctaaaaaagaatataaaaatatgaaacaaaatagccagaaacaaaatagagatatgaaatagaacaaattggaatcctttaa

SEQ ID NO: 704205 - DNA, 605 bp, Homo sapiens
tattctgaaagtttttgatgtctatgaagttttgacttgcaaaatattctagtagtttacaatttctcagtaggcttatttaaactttgtttattattaagaattgaaccagttccagacaccattaccaatgaaatcaggcccaccatagcagctgaagtcgaccatttattacatgcacttcatttgagtcttattaatgctgacatctgttcaagtcttcattaccatattaccacaactggtcccttgtcacatttatcctgattctttgtagcataaacacaaaagagaaaaatacatttccaactaatgataakgttatttataaatgagatatattcaaagaatgattttccacatattggacacatgctattcatttctcaattttatttttacctttagacaaaaaaattttaaatactgaattataaacaagatttaaaattttattcatgaaactaaaagtatgttttaatacacagctatacaagacaattacttaagcatacatttaagcaatgtaattaataaaatattttctttgtgagtttgagatgttacttttatgaattttgcaatagcctaatgaaagaataaaa

SEQ ID NO: 704206 - DNA, 605 bp, Homo sapiens
tattctgaaagtttttgatgtctatgaagttttgacttgcaaaatattctagtagtttacaatttctcagtaggcttatttaaactttgtttattattaagaattgaaccagttccagacaccattaccaatgaaatcaggcccaccatagcagctgaagtcgaccatttattacatgcacttcatttgagtcttattaatgctgacatctgttcaagtcttcattaccatattaccacaactggtcccttgtcacatttatcctgattctttgtagcataaacacaaaagagaaaaatacatttccaactaatgataaggttatttrtaaatgagatatattcaaagaatgattttccacatattggacacatgctattcatttctcaattttatttttacctttagacaaaaaaattttaaatactgaattataaacaagatttaaaattttattcatgaaactaaaagtatgttttaatacacagctatacaagacaattacttaagcatacatttaagcaatgtaattaataaaatattttctttgtgagtttgagatgttacttttatgaattttgcaatagcctaatgaaagaataaaa

SEQ ID NO: 704207 - DNA, 1575 bp, Homo sapiens
gggtgtatcagagattttagtgaagttcaattattaccaataatttcaaggatatcagtaatcactaggaagaggtaaagcagtgagaggtttcaaactgtctaacgtatatgtacattttcattcttactgcattagaatgtgctctagattaacatgtgaggccatattacttacacaaaggtgcttttctgatcataaaacataaacgttttacatgcaggttcattatttatgctgtcttttgtccattgatccccagttatcacaagcaattcaacctaagtgcatccagcaaaatggataccttaggttaggattcccgctagaaaataccattttttttgtcaaatatgttagcatactcacgaggacatctgaacaggtcagttacttactttcttcccaaagacattccctattctaaagggagagaatggattgtacacctgctctttacctgttgacttcttatgagtcagataggtcatttcagtgttagctaatgaagggcaagactaaggtagacagaggttaagataaattaaagagttagaattcctaattaatatattcttaaaatgccgcaatgcgttgataactagacaacagttttctggtcagagttgtgaaaactggaaaagtaaatactgttcctccacgcatttaatgaaggtgacaccatctcctcatatttctgtttcttcctttttcatagatgtcagcagcaaggttggctgtccataaattttagtttctaaaacacagagcrcagcctttaccagggaccaaagtgagtaatgtttccttgggttttaaagcttcccagtgtggactataaaactacaattataaatatatgcttttatagcaacttattttttgacaattgcttagggaataacccacattgtaaaagcagcagcatattttgctattcattcatgttattaatttaacatgatttaattaacgtttataaagttcctacatatctgtcactacactaagccataaatctacagaaattagaggttagaccttgtctgttcagtaaagtcagagatggccttcctgagaaaactacttttaacagacctgaaggatgtgcaggatttaggtacactacaaagtagaaagaacattccccgcagtgaggccatcatgtggcaagaccttaagtcctgagctgggacgatgcccactgtatttgaagacctaagaaaggtaaggatagttaggtcagagtgactgctaaacagcaaggcaggatgtgagatttcagagtaggcagtttctacaactcggaaggctggctctctgatgagaaatgagagtgggtgaagtggtaatatttgaacagagagctacataaagtaagagaatgagtcacgcaaaggaataggagagatgcattccagaagaagagaatgaaaaaagcaaagggtctaaagtagaaagtttggcatttgagagaaacaacaataaagtcaatgcatatttatttatgttgtaatagttttgcaactgataaagaatttaattttaaaaatgataataaaacaatgaatattt

SEQ ID NO: 704208 - DNA, 646 bp, Homo sapiens
tcctctatgatcaaaaataactatttttaagaataatcacttataatgtcaattttatttctgtgcaagctatttttgttgtatatatataattattttgactttaaacttgattttaaagcagttttaattattttattrttataaactttattcctaaagtttattcctataaactttattcctaactgttctaaaataagatacctataaacacatgcacacagagttgagattaactggcgagtcatgatttatacctcaatagtaacccacagaagtaactgtgattggccactttcatattttcagctctgctgtttttgacctccattatttcaaataatatgcatttatttctgtctagtgagtgatttatcaagttggcattcttattgacttcttattataaaaaatagcaagaacaaattttctcatactgttctagtaccatgtatagtatacctatttccctttcctatttacttaacaaaattttgacagattatgggtatttatttaactaaaaatattcggaaattttacttcttaaatattaataaaatgaacattcttcatatggaatataccaatattgcttgacatcctgtccataatttaagatgtgcacatgagagtccctctt

SEQ ID NO: 704209 - DNA, 1379 bp, Homo sapiens
  misc_feature 760, 761, 762, 763, 764, 765, 766, 767, 768, 769, 770, 771,772, 773, 774, 775, 776, 777, 778, 779, 780, 781, 782, 783,784, 785, 786, 787, 788, 789, 790, 791, 792, 793, 794, 795,796, 797, 798, 799, 800, 801, 802, 803, 804, 805, 806: n = A,T,C or G
  misc_feature 807, 808, 809, 810, 811, 812, 813, 814, 815, 816, 817, 818,819, 820, 821, 822, 823, 824, 825, 826, 827, 828, 829, 830,831, 832, 833, 834, 835, 836, 837, 838, 839, 840, 841, 842,843, 844, 845, 846, 847, 848, 849, 850, 851, 852, 853: n = A,T,C or G
  misc_feature 854, 855, 856, 857, 858, 859: n = A,T,C or G
tcagaatctgtactgtgggaaatgctattgaataatagaataagttgacaccaaaaggaaataatcatcataatctgtactgagggaaatgctactgaataatagaataagtttttcttcaatacaaaaggggaggagggagagaaagagacacagagaggaaaggcagggggagagacagagagagagagagagagctgtagagtatatttaaaagacataacaactttcataagaagataagaatcgttacatagaatgatacaatgtctcacttcaaaatgatccaatggtgggagatctatctggagacctattacaggaaagaagattggctatcaattgatatagctccaactgggtaatcgatgcacacgaggggtcatgacactgttctacttctgtgtaggttcacacttttctaaaattcatgagttaaagttatgggatagaaaaaaaaaacatttctcagagaaaatattttaatcatggatgtcctcattattaagcaaggtataaacaaatcaatcagctcaagagtttaaaaatgaataacatcaaaaaacttcaaagaatataaagtaaatttaaaaattaaagcagatagtaaggatttcaaaagtatgatgacttctatgtcacaaatagtctttagtaaagtaattaattcataattgcctctgtatcctctgtgaaggcgattaagtccagcagtcttaaaatctagcttaacaacaaaaaatccttctattggaattcnnnnnnnnnnnnnnnnnnnnnnnnnnnnnnnnnnnnnnnnnnnnnnnnnnnnnnnnnnnnnnnnnnnnnnnnnnnnnnnnnnnnnnnnnnnnnnnnnnnnaagctgctgcatcaaggaagcatcgtatagtacttcacagtatttagtaaaaaaaccaaaaatcttcctgttttaacttttagatccatgaagctgagcctagaaggaaatcatgcaacagccaagacattrtatccggagttccttctcctctgatggctttgttgttgggtcgggaccatttgcctgtttccttggaatgagttccctagagctcttaatctcttgctcacaatcagacttctttggggccaactcaccagttcatcagataggatcagatatgtttgaaactcagcagaggacacagcttatattctttcgtagaaagcttcttagtcatgaaaaaatttctaataaatctgttctacaacttatgtaacctcaactaaatcctagcagtggacaatgagaagacaatagtttattctgatattcctccaatactatttataattatttaaaagcagaatatggaatcatgtggctaaagggactcaggtagcagcaccgcaatatc

SEQ ID NO: 704210 - DNA, 1030 bp, Homo sapiens
tactatttgaaatctttcataataaatgtaaaaaggaaattatcagagagcttcataggttcaacaatgcttttggtaaaccaaacttcacctttttttttttttttttgagtttgtaattagtatgatcatcgagggaaagatgggacaaaggaaaagagcatggcagaaatgggcatatgggctttgaggctgacagccgtggctcagcctcctgctagccacgtggcaagtcactgaacttccgagtctgggtctccaggtctgtaacagcaggagagtacagtctcatttgcatggttgtggggaggattagggatgaagtgggccaagtgtccgagaacagcacctggcccatcctaggggcttagatctggtagtgttttattattgttagagacagagagtgatgaagggtaaaaatctgccccagggctctcgtctataaccctttcttctctatatgaattatagtgccaagggttatgtaaccatggagctaatttattattttagaaacagaactcttaaagaccagatcagaccactttgagatttacaagaactgtaaccagtttattgctttttgaaaaatgaagtaaggaagaacttacaaagaaargcatattaaaatggtgggatgccattttatacctattgaattgacctccttccttaccccaattaatggtaatatccaatatcaatgagtttttttggtgaaacttttctcatatgtatattagtaaactctttgggaaagcatttcggcagtatacgttgagagccaccaaaaggcccatatccagagatttagtaatcaccctttggaaggtgttctaaggaaataattcagaagaactgttatatacccactaaaaattactctgtaatagcatagaaaaggcttatgatgagcatgctaggttgtacctatcttatgatcacagctatgcagtccttaccataaatgtaaacggaggctggaaaagagcatgaagaagggaaaacagctaatgtgttagggttg

SEQ ID NO: 704211 - DNA, 1030 bp, Homo sapiens
tactatttgaaatctttcataataaatgtaaaaaggaaattatcagagagcttcataggttcaacaatgcttttggtaaaccaaacttcacctttttttttttttttttgagtttgtaattagtatgatcatcgagggaaagatgggacaaaggaaaagagcatggcagaaatgggcatatgggctttgaggctgacagccgtggctcagcctcctgctagccacgtggcaagtcactgaacttccgagtctgggtctccaggtctgtaacagcaggagagtacagtctcatttgcatggttgtggggaggattagggatgaagtgggccaagtgtccgagaacagcacctggcccatcctaggggcttagatctggtagtgttttattattgttagagacagagagtgatgaagggtaaaaatctgccccagggctctcgtctataaccctttcttctctatatgaattatagtgccaagggttatgtaaccatggagctaatttattattttagaaacagaactcttaaagaccagatcagaccactttgagatttacaagaactgtaaccagtttattgctttttgaaaaatgaagtaaggaagaacttacaaagaaaggcatattaaaatggtgggatgccattttatacctattgaattgacctccttccttaccccaattaatggtaatatccaatatcaatgagtttttttggtgaaacttttctcatatgtatattagtaaactctttgggaaagcatttcggcagtatacgttgagagccaccaaaaggcccatatccagagatttagtaatcaccctttggaaggtgttctaaggaaataattcagaagaactgttatatacccactaaaaattactctgtaatagcatagaaaaggcttatgatgagcatgctaggttgtacctatcttatgatcacagctatgcagtycttaccataaatgtaaacggaggctggaaaagagcatgaagaagggaaaacagctaatgtgttagggttg

SEQ ID NO: 704212 - DNA, 879 bp, Homo sapiens
tgaaacattaggagcctgtcattctaattatgcaatttaagattcggtgttaaagttgagatataaactttaagatgaagcattaattgattgtttggatgcctgaccattttaaaagcactgtcttatttctttgtggtagaaactgggttcacttttttgatgatgtcaaataaagccaaatgtattatttaagttggggacttccatttgagagtgctgatrggaactccaaatataatggtgattagaaaaagtactacatgaacatatttgtaccctattgcaccggaatcttgtcttcaatataatgacaatggactctttaccatattactgcctgtattagagatctaccttcatatatcaaactaccttatatattaacccactgggttatttagtatccaaataacataggtctctgccttatgcgggatttcatacttcaggaaatacagcattgtgcaagtttgctgtgtctgagatcccaattttgtgctactttattgtcaactttagaggaatatagaatttactatgatgttcccctccggttgcattggggaatgggataaaatgataatccttggccttcccaggattcttttttttttttttttttttttgagatggagtctcactctgtcgcccaggcaggagtgcagtagtgcaatctcagctcactgcaacctccatcacctgggttcaagcattctcctgcctcagcctcctgagtagctgggattacaggcgtgcactaccacgcccagctaatttttatatttttagtagagatggggtttcaccatgttggtcaattggtcttgaactcctgacctcaagtaatccacccaccttggcctcccaaagtgctgg

SEQ ID NO: 704213 - DNA, 604 bp, Homo sapiens
tgtcgaattgcaatcctcagtgttgtaggaggggcctggtggaaggtgaatggatcatgggcgtggatttctcccttgctgttcttgtgatagtgagtgagtcctcatgagatctggttgtttaaaagtgtgtarcccttcccctttcactgtctttcctgctctggccatgtgaggacgtgcctgattccccttcaccgtctgccatgattgaaagttttctgacgtctccccagtcatgctatctgtacagcctatggaaccatgagtcaattaagcctcttttctttataaattacccagtctcaggtatttcttcctagcagtgtgaagacagactaatacactatcctgttactatttatcagtttatttatgttccttaatatctgtctgcccttccacattccagacctaagaggacgagaagctagtctgccaactcactatcaaagccacagggcctaatagattgaaggatccagaatagattatttaaacacagatcaattcttcatttaaacatgaaaaatctgacattttgtgggttctaaactagtgttcatcatctggaaaaatatttgcttagcaaaatcaaaccatc

SEQ ID NO: 704214 - DNA, 1321 bp, Homo sapiens
acattgctttcttagaatgtcccccaacacctaggatctgggaaggctgtgtccataaacccacagggcaacaatcagccaaagctgcccctttgacaccaccattcctggtttcttcatatgcacccctcctggctcattgcatttccggcctagcccttgtaggcatttgggcttgcaatccttgaccctagattgttgcctaggcaggcaagccaagacatcattcattagctgagtgggtatagtcttctcctaagccctcctccgtttttctttggaaggatttagagggctggctagagtttggcttgaaaggatttgagcaaagacacttgtgggcctttgaactgaagatcccgatggacgaaggaaaagtggcccaggagggctcttgagcatctaatccatttggggctgtcattgcctctgtgctttgtaaaataaaggataacaagaaccctatgaaagatgccatcatccctctggtggctccaaagcccaagcccactagacattctgaattgtgaatgctggctgctcaagggccctctcgcctctctcttctgtggtcctcgatgatcccctggtcctggatccttgccaagaaggaagagaaaaatgcctctccaagcctgaagtcatctccctatctcaggtccaattagcccagagcactggggatgctgtrtgtgtgagcagccagggcagagagtgctttccagcccacaggcaggtggaccaggaggaggccagcatttgttttcagtctaaaggagagcccagggtggggaccacaggcagctcccatcctgcctctcaagggtaatctgggaggatgagaaaatgctccatggctacaatacctcagtttccctcccttcttagactatgacctccccaggctgtgaagatgaactgctgaaaacaaaccaaccaccatctggttttcagcctcaatttggagcaaaagcagaggagtagaccagttggctgcacatctccccaacaccctcccacccttttccctttttctctcagacttgttcctagaactcaagcttgtgtgtagtacaagaatgttttgaaatatttgatgatgtgcttattcttccttgctctccccttttaggattctctctctctctctgtcttccacaaagtcttgctattcaaagtgagactgtgaggccaggcgtggtggctcaggcctgtaatcctagcacttttgggaggctgaggcggatggatcacttgagtctggagttcgagaccagcctggccaaaatggcgaaaccccatctctattaaaaatacaaaa

SEQ ID NO: 704215 - DNA, 634 bp, Homo sapiens
ggcagggagggaatgggaaaggattaaccccacctacctcttctcccaccctcagaactcccgagggctcctccccaagaccaaggcacctaatgtatggcaggtcctttgggatgccccacaccatgccccctgggtctgcttctcataaagctcagactctcgcaacagcatgccacctcaagtgcacccactttctgctcaggatcgtccttgaagacagggagccctctcagccagtgcatatgtgaagcccagaaatgcagggcagtgaaagccctcacaggcagctccggttctgtggggcctgggagctgatggacagatactgcccagtgaatggctccaggcatcttgtacccatctcagaggtcctagcagaatctttgtctcagacaacatacccttaaattgactctccctgctttcctgtcctctttccctgctccctcgctccgagtcctgagaccagctctgccacaggttgggttctctgcaaggagactctgakatggaatatggggtgcaaggtgtttatcagggaatcaatgcctgtgaaaggaatggggaggaagtagatttgggcagagggagaagctgagatgtgatgcagggatgcaggatcagccaagcc

SEQ ID NO: 704216 - DNA, 589 bp, Homo sapiens
aaaaaaaaaaatagaagaattaaattggatcaagcgctccaagatcctgtctctgacttcagcctctctcgtttacccagtgatgcatcacgctgtgttctaatggcttcctaatgggcaacttaatctgtcattaaacccactcaccaagcgccccttgccagactcctcggccattggtctgcttgctgagccacggcgtctgtggggtggccccgtcctcagattggcaggggttctaaaaggaagcgtatcctttcgtctggggtcccaggctcaaatgccgacggggccagagaggtaagaaaggtgagcagggctgggggctgggactctgcggccgtctaacgggcagcccctgctcggcccccctcatcgctgacttatggggatctgggcccagaacttcccatttcttgacacaagtcggagatgtagaagtgtatgtataatcttccccttttaaaaatgtcagcatctatttaaaaacattttttttaaacactgggcaggccaaataaaacatggcagccggcagctttggtccccactgtcaactccttctcagagagaccccgagatamccccc

SEQ ID NO: 704217 - DNA, 633 bp, Homo sapiens
tatttcctagcaaccaaggaaaaccatttctcctctgtcagcaggaatgctcagatttatgtaagctacaaatgcccgttatcaccatattaaaccatatagttgcaggcggtatttacagccagctaatcgtggcactctatcctggcagcccccaagctggcaagtttcccatttggagccccccaaaactatgattaggtggatgctgagtactaatttagttaacagcagtgcctgacaaagctactaaccatctaattatgaaggaagattactkataccattaattgagtggttgtaaacctctggtaaagtcagatggtagtaaagtccattttcaatttactaggctattaaaagtatttctgactataaaataaacagacacaaagcatactaaacaggctaatatggaaacataaaaagaaaagggagaagcttgtcatgcaattagtggtcgtgattagctgtgccacagacccagcggtggaaattaaagattaatttatgacagtgctctggcaaaggaggttttctggcgactgctctgcctacaggtgggcgaggcgcttgtcatttcaattgccaaaaaaccacctccagcttaggcgaggcttcgggcttccttgg

SEQ ID NO: 704218 - DNA, 2342 bp, Homo sapiens
tacattggttttatcacttttcccactattttattttaagatgacctgccttgtttaaaacactgtattcatcttagttaaattagattccatttgtaaaataattaacaaatgatttgctctattgtacagtgcgtttataaactgagtcagtatctcaagatttgatccccattatcatcatctgtggccctatttgttttataaatgtattgtctttttccatgcctgtcacatctctattgctctttcatttttctctttgtcccttatagggagcattgcctatctctagattaagcaaaagttgcatcataaaaaagcacaataacctgctcaatctttctcacacagagaaatgtttgttaagtaattaaagtgtagatgatgatacaaagagcttgattaaattagatgccaaagtacccttgtgattcagaatatgaatggtatttaatttctttgaaatcattaattgctgagtgagattaattaatgccaatattccagaagatgttccagtcagtaaactgtatacaacgtgcaaaagattcagaactctgaagggcaacattattctataattaagaattaagaattaattcacattaattactggggagaaatactttttaagaattaatgactgagaaaatgtttttattttttatttagaaaattattttgtgcatgagcattaccgcaagttttgcaagaaacataaatttaaagaaacaattatgtgcacaagatgaatttaataacatcttgatatattccacgattgcggttttatttggtaaatctttcaaggcacaccatttaaagagaataaatgagtcttggaaatcttgtaggtaagggtaaatattaggatgcatccagttacatttacacacacatacagttacatttacacacacatacacgcatacagactgagtcacgtgtgtgtatatatatatatgaatttaccaattgatgttaactaatatttataagagccagttggattgatatatattgttgaacctgaaaaatatttattatatacatgtttaaaatacagaaataaatagcaattgcactaggcatttgaaactgtactaaaatataagctgtgaacattttgtgatcattacgaattcttacactgaataaatatttttatttttacaatattaatatgtttgatacctgtgtatatttttttacaatgtgttattttatttttgtcatagagtcatgtcatgcataataacattttagtcaaagatggattacatatacaaaagtggtcccatgagattataatagatatttttacatacttttctacgtttaattatgtttagatacataacctcttaccactgtgttcttattgcctgcagtattcagtacagtaatgtagtgcacagatttgtagcctgggagaaagaggctataccatataacctaaacgtggtaggctgtacaatctaggtgtttgtaatactctctgtgatgtttgcaaaatggtaaaattgcctacgaatacatctgttaaaacgtatccctatcattcagtgatgtgtgactgtactaaaatgctcaatgtaagtttcaatgccctccataaaattgttgtactgtgaaatacaaatctctcacccatggcctgaatatgtttgcaaactaagcagatcatgggaaggagaatgtgctggcaccgctgggatgattttctcactctacatgaataatatctacagacttcgtgaatatgagccacttgcatagagttaaagtaggcatctctttgctgggaaaattatcaaatgggagtatgaagtgtttttacaagatactcgtttgtttgtagctggtaggcctacagtggctcttggtaatggttgaggttgctaagatttggtggaagaaggcaaaatgaaatggccacttatatggtatatggtatatggatcacttatttctgttgagttacaaactcagctggctatttctcctatgttagttatttggagaaaaaaaaacgtgatggtaattttggggtaacaaatacaatatttgatgaaagcaaatttattgagggttagacaaactacaagatactttaggctacaaagtcaacacgagagttctggcccaaattgtgcagagtttgcgtccagctgcacagttcaaaggaagaggccatgtaagaagattctcacttctgacaccaactgccagttcagggrtttcccctgaacaccctcagtttcaagaatttactagaaagactcacagaactcattgaatgccattgtactcatggtttataatagagaaagggtaga

SEQ ID NO: 704219 - DNA, 587 bp, Homo sapiens
attttgaaatatgaaaagcgttaatacatatrtttaaattaatttttttgtttttgttgagcagaaataagaggcataattgctaaatcctcatttgccccacatttttttttgtattggaataagaaggaaaggttgtgagagttaaatagtacttaataacataattttacagactaatattcatattattgacacctattatttattagaatgttataaacaaaacattaggcttaaaatatggccttctaacaatcaatttactgcacgaaactcctaccaaagcaggttattaaaactagtttgtgtttatataaatagaccttcctgtatttgcaataaaaagacctgtattaatggcacagtctccaattagaatttttaattcaataagcatttattgcaaagcactgtattgcagcgacagaaagatgactaaaacacattatttgtgcaacgtagcaatttaaaggaggaaaaagggaaaggaagaacatcatgtgtacacaactgattgggaaagaaataaactgggcagtatgtggggtaaagagctttgcatattatggactgcccatggtagt

SEQ ID NO: 704220 - DNA, 1927 bp, Homo sapiens
ggcctcccacgttctgtttttcttgtctgggttacagtcactatgatgatctagctgcagctgctggatgatctcttccagctgcagatttgatttgctcctactagtccctaattgaatttagtcgcttcccttctctcctccacatcagcagaggcctcccaatcttaaagtcccagtctgcctctgtccctgtgtccaagggcagaaaagtccatattttgggctctgaagttcaactagattaaatttcagtcattccagtcaataatctaaaatagtttttataattaatggctaactagttctagtctttgacttgctaggaattacttgagtctccatgtcttcctatcatcttaacagacaagagcagaatgagttggaatgctaaaaaaaaaaatgaaatttatcttttctttaaatacaagaaagatcttgtgtccaagaaagattacaaaattacggtattagagtataaatagctagaattaatagagtgattttccctaacccagaatcttttcctctttgtcagaatgttggatgaaaggacacagagttgagagaatgtgataattcttaacccattgctaagggtgtaaccatgaaatttctttactgtaaagttaaagcttcgggttattacaaacccaaaggagtttgttaagacctggcaacaaaatcaataaaggtgaaagcaatttacatcaccctggatgatcgcaatttttttaatagtcccaaagtcaccatatttgccattagtctatatctgtaacatggacatctgaggacaatgtgactcatatggctgaggatctccaaaatacaataaaatctaaactcactcctaagaagagtaggaggagcatgaaaagtactgtgtgtctcgttagtatggcaaatgaaagtatacaatttttgtgactacttagctcaccatgtcatcgaccccagacacacactgcccctgagtgtcttcctctgtaaaataacgacacctcggcatggctaataaataaaagtttggagccatcctggttgaagagggcaggatagaaacagtattctggtattcagtctcccctttggtttcctccatttcttccttgtacccaaaatggccaccttggcagaacccaaaggttctacagcacacagagtgaccaccaacaagccatgcagtttctaaggcccctccctcctataacagccttcacttctatatgcctgggaggtgtttataaaaattgacactgcttacctagcttcatataccggcacagcacacagcaggtgcttcataatgttgagtaaattgaatttcaactagtacctgtttgctcaatgttctaataaaactttcagaagagcaaatattctaggtcctagattactgatttttcagcaaataggaatagaacaaaattacaaaccaatgtttaaaattagggtatctctaaattttattgtatgatttttgcctcctgttattaatacccacttaggtctcacttagttcctatttctgaatttccctcataactcatagattatgttctgcttgtcgctatgtggcagaatgtaaagaggactttctttattgggctcactctgacctgggttctaatcccagctctcacgtgtactatctatgggactttgagcgaaactttaaccttcatcgtttcctcatctgaaaagaatgaaacagggaaataaggaacagggaaaaggctgatttgaggattatatggaataatgtrtcatggatagcaactgataagtgttccataaatgacaactgtaataattatttttagttgatccaaaaatgaagaagcgatcacatagcatacccaagaagactattcctccttttaaaaagaagtctattaaggtatcatgagggagagatatttaa

SEQ ID NO: 704221 - DNA, 612 bp, Homo sapiens
ccaccagatggtataatcatctacaaaaaagaaaaaaaaactcatttaattcaaagagtgagaattatataaggtacatttttctcaccacaaagcagaattacaatactttttttttaagtactgtttggaaattagaagaggaaaattacctttaaataaacttggttagaataagaacccraaactataattacagatcatttagaaaacaccaaaaataaggatacaacatgtaaaaacttagtaaatatggccaagctgtataatcaaagaaatttactttaagtgattttattattaatttctagaaattaaaataaattaacaaaacaatttgctctataaattagagtaaaacagaacaaacttcaggaaaacaagcagaaattgttaataaagtagaaatcaataaattaggaaatactgaaatagaggtaaattcgagtttataaacaaattcaaaagctgtttatttaaaaagaacaatagaataaacaatttagacaaatataacttaagaaagacataagagaaaaaacacagacccctctgaaattagaaaaaaagatcaaactacaacaatgaagataatttttttaatttgaaaaa

SEQ ID NO: 704222 - DNA, 624 bp, Homo sapiens
aataagttgaaatattttattgtgatgatgtatctaaaattttctccctgaggatttatcaattttagttttatgtattttcagggtactttatatcttgatgcgtttgtaatgttgtaactcttagatcaattgaaaattcaatacacacatgcaattcttagctggtatccacttgtaaatctttttctttccattggtttccagttctctccacttgatttgggattgtttcttataaacaaagtacaaaaaatcttttaaaaattaatcagatgacttctttctctaaacttatattatttacatttattgtgtttagtaataagtctgagcttatattttactatgcatattttaaatattttgctgctttaaattgacttttattgctttcattttttgtttgtgttattccactwttttccattactgacttacagtttggaagttatataaactttttatttcttaacattgattcttctgattttatctcatgtacttaacaaagtttaatacacatcagtaagactgttgaaaaatatggctctcttaagcagtaggttcctgagaacagtaactcaggccacacttttcctgctttatgttctattctgcatc

SEQ ID NO: 704223 - DNA, 958 bp, Homo sapiens
taaactttaatgaagtttacctttattaaaactgtcattgactaccagatttcgctataattttctatagctaggaatccaaaacatagatgcagagagctgtcagtacggtagcgtggctttgtgaatgttctttaatctgagtaccttgtaagctcccccaagaggtagattttgagtgaattgctgcatgtaataaatcaagttatgtgcaggcaaagtgaggagattcaatgaagtatgatagataactattctaataattgtagttcattgkcttatactactgtacttttttccatctagaatacatatagtcattcctatttttctattctttaaaacaacccaatttctaatatttgaagtcagaattgtagagtgattaagagtgttgattctggaaacaaaccacctcatttacactacttactagctcaatgatcctaggtgagttattttacctctatttctctttgataaaatagagataaaaacagaacttaggctggacatgattcctgcctgtgattccagcacgttgggagacagaaacgggaggatcacttgaagccaggaatttgaaaccagcctgggcaacatagcaagaccgtatctctacaaaaacaatattaaaaaacttaagaaaatagaacctgccaatattttagttgtagagattacatttattgatatatgtctaatattttgaatattgcctggcacaaaaaaaaaaaccttacatggacatgttgcctcttattagtagtgatttggatccagaaaagaccctacctaacagacattaaatatatgtatcaaattttgtgtcacgtaaagtgctattaatgaaatagactatggtaggcaaaatagttccttgaagatgtctacttcctaacacttgaaacttatggagaggaactttgaagatgtcgttagacttatggacttgaaa

SEQ ID NO: 704224 - DNA, 1252 bp, Homo sapiens
ttttaaaaaaattctcatactttcctgatttgacttaaagaaactactggttcttcattgttgttatttcaaggcctacggctgccctcttcactttgtttttttttaaaactttgatgaaagtttactaaattccttttttaaaaaaagtttcccctgtttctgggacaaagagaaaagcaaaacaaacaaacaacaaaaatcaaagtttcttgcttttctgggtcatcacaatttgaatgtaaaaacaagattttcaaatactttttattttgaatgaaattcaaatgaataatcatcttggccttctgcttttttgtaaagcagcagaggaaaattctaggagaacttagcaactcatttgaatttcttcccctcctttgcctgaatctttgcctctcgtgrtctacatgtcagagctcctactgtcttgtttctccaagtagatgtcttctctttggaaaggccctcaggctccatagttgttttctttgcatgatttcctacagagcttgagcacttagcaaacactcttgatgatgcccctctgtgcctttaaatttaatttatgaatcatctgtatactagagacctgctgttctgtgtcagctgcgcacatggtattttctgctgttcagagccacagtgctgcgctctcttccatagcaacttacatattacaggaaaattacctcaatgagacttcaataccagagcagaactataaaggaggtatctgaaatagctggcatttcatccactcagttcctgagatagggaagctttgtgttttcctttacaatttttttgcctttttacttcatattttattttattgatgtataataattgtagatatttatggggtacagagagatattttgtttcatgtatacaatgtataacgatcagggtaattagcatatccatcatctcaaatagttatcattttttgtgttcagaatatttgaaatcctctcttctagctatttgaaaatataaataaatcattgctcactatggttaccctatagtgccacagaacatcagaactcattcctcctatccagctgtaattttgtatccactaaccaacctctgcctcccttcacccatacccttctcatcctctagaatattttcttaaacaagatcagttccttggtttttagcgtgtctcttttcatcttttcttaaatttaacatattgttaattattatctttattatttataaaatatataaatgaata

SEQ ID NO: 704225 - DNA, 590 bp, Homo sapiens
gagacactagaactttgacgttatatgggtttggcaagcatctggttcttcaacttatcaaatataatttgtatacacaatttaaccttgctatatccccactttgaaccatactataaggctataataaccaaaacagcataatattggtatgaaaacagacacatagaccaatggaacataatagaaatcttagaaataaaaccacacacttataatcatctgatctttgacaaggctgacaaaaayaagaatagggaaaggatgctctatacaataaatggttctgagacaagtggctagccatatggtgattaattcaactgatctctcacctctcactatatacaaaagatactcgaagtggataaaaatttaaaagtaagaccttggactatagaaatactggaagaaaacctaggaactacccttctcaacagtggccttgacatgtaatttttgcctatgtccacaaaagcaattgcaacacaaaaatggacaagcgggacctaattaacctaaacagcttctggataagaaaagaaactatcaataatgtaaatacacatcctacagagtgggagaaaata

SEQ ID NO: 704226 - DNA, 736 bp, Homo sapiens
aaaatagaacagaaacattgcacatgcacatgcacttgaattgtacacttcttctatcgtatcaacttcatgtaccatgatatgctcgccattaatatgcactaaagctaacttgctagcctgccgcaattttattgttgcagcaaaacaatagtggtggattaacccatcacctcaagtttagcaatacatcctggaccagttatagatatgcattaatccacaacttaaaatgtaaaatatcaaggagctgggccaatccaggcatatgagtcaagaacacagcacttcaaacatatccaaactgaaactggttcttttctctgcctagaaaggtacttaacaatgggttctgaatatcatgttgactgacaggtatgtcatataaagaaggaaatcctcttaaatcttacctccttaaaaatatcaggtttaacagaagagtatgatgtgtagatccctactagatagaagcctgaatacctaacccattatataaatagtatgtattgtatagtatataaaggctgcgattttctgggctgctgcctactttttatgttttactgttgtcttcatgtaaaataactgtatggaaatggtatacctaaagagacaaaaygggtgaaatttaaatcaaccaactaaagaataaacagtataggttaaaaaggatacatgttaacaaaatgatgacacacagcagaataaagaaaatatatgaagaatacacatc

SEQ ID NO: 704227 - DNA, 1346 bp, Homo sapiens
aaactaacacaagaacagaaaaccagacaccacgtgttctcactcataagtgggatttgaacaatgagaacacatggacacagggaggggaacatcacacaccagggccttttggggggtgggaggctaggggagggatagcattaggagaaatacctcatgtagatgacaggttgatgggtgcagcaagccaccatggcatatgtatacctatgtaacaaacctgcatgttctacacatgtaccccggagcttaaagcataataataaaaaaaagaaaagaaaaaaataagatttctcaccattctacatgtttttctctttaggctttttgataaggcagtgtcctcataataaaagacatgtgccatgatctggccagttcagagtaaggtgggataattgctatcttatttactttattattgtagctcatgttattattgtggaacttctttgatccttgactgatacatggaacttctgacatttgctgacattccctctatagtttcctgcttctaatgaataatattaattttattttgaaaagttggggttgggagaaggtaaaggggagatggatgtgaggaactggcatacgtgactaacacaaacttaatgtacatctggcataatcatcagttaattcaatgtagtttcatttttgacttggttagtatcctacaaaataaatatattaatactaagtttgaaaatgagtatatttcttgcaatagaccagagatttgtggggtttgggatagcactaaatgaatacatgttatgttctatcatactatggtattattttcaataactgaaatgagaaaataagtatattttgaagaagtgaatagaaagcacttatatctgatttctgctgagattttttcaaagttactaaataaaagcagcatttgtgacttagggtgaagcttatgaaataggggtctttatatgattttttgtctttaaatgttaagactactctgaatggatagtttaatgattctaaatggaaactagaaaagcaggtctaacagtaaccagatgtcctgggatttagaatggcatgctaaaagtagmaacctatatgaagcttttgaaaactcacaatgcttgtcatttcttattttcttttatgaactatttcaaaagtataataaggcacgaaattaatgtaataaataccaaatacccatcacccatattttaaaaacattagcatttgccatatttgcttgaattttgtttttacagaaattagtcattgcagaaatagttgaagttcccttgtgtttacagttccaccttttgtccctagaggtaaccactcttctgaag

SEQ ID NO: 704228 - DNA, 1388 bp, Homo sapiens
tatttttttatttttatttatttatttttttgagatggagtctcgctctgtcgcccaggctggagtgcagtggcgcaatctcggttcactgcaagctgcgcctcccaggttcacgccattctcctgcctcagcctcccgagtagctggtactacaggcgcccgccaccacgcccggctaattttttgtatttttttaagtagagatggggtttcacygtgttagccaggatggtctcgatctcctgacctcgtgatccgcccgccttggcctcccaaagtgctgagattacaggcgtaagccactgcgcccggctgttttatttgtaaaagtcagtggatgacaaaacaatttcagatgacagggtccacttggctttccttccctctccttagaaccgagcaccttccacagcttttaccccggacacgtgttttttggcgcatctgcagaatccctcaaaacttaattatttataacaaaacaaaaaacaaaaaaacagcgtaacaagatgcattttcaaatagtgagttcatctgaagcaccttctcgagcaagaggttttgttccaggggctgtgggaataatggtagttctggcaaaatggaaatgtgactggccactcacacagtcctaagatctcctgcttaaaagaagtgtgataatgtgcgcttggggagagtgaccgcattcttcttacaatacagtcctaccctggaaattgtgactgaaccagaaaacaccccaggccgtggcttccgctggtcagatttagggaagatatgaggaaaggaaacctagagaaatcagggggaagagagaaaatatgttataatggctaaataagcccaaacttatcagttgtgacaacgtaaacaatgaaataaaaatcaggatgaaacataatgactcagaaagttttaaaattaataaaagagaagaacgtagcaatattccaacagataaattagatctcaagatgaaaagtattaaggacagagacagccatttcatattaatacaagtgaaaatgcacgaaggagatataatagttttgacgttgtatgcacctaatacaatacctttgaaatacagccgttcctttgaattacaaggagaaattgacaatcctggagagattttgacacatctttcctgtagcgggctgaatggtggctccaaagacatgtccccatcctaatccttggaatctgtaaatattaccttatttgtaaaaagggtctttgcagatgtaattaatttaagaacactgagatgagatcatcctagattatccaggtggttcctaaatgtcattgcaagtatctttttaagagagaggcagagaattgacacagagggggaggccatgggaaggggaaggtagac

SEQ ID NO: 704229 - DNA, 630 bp, Homo sapiens
ttatttatttaggggcctattttccttttgatgaagtcatactacttttgtgtatctttattgattagatttttgtactgttctctattttctgatctctaacctttttatcatattagcctacagatggaaaccaagtcttactttcctcaaatgaaacttctcttgatttttctttttaaatgttaacatgatttctttccttttaataatgtcttaaattttaagaacattttttggtaacaaaacaataatattttgaaagtagtaatagtcaaaagcttagaaaatataagaacacttggaaataaaaaattcttagtctgagcatgtggctcatgcttgtaatcccagcaccttggaaggccgatgcagaaggatcacttgtgtccaagtgttggagaccagcctgggcaacataggaagaccccagctctaaaaataattwaaaaaaattagtcaggtgtggtggcgtgcaccatggtccgagctacttgagaggttgaggtcggaggatttcctgagcctgagaggttgaggctgcagtgaaccatgaaccatgatccagccactatactccagcctgggtgacagagcaaagccctgtctcaaaaaaaaaaaaaaaaaaaa

SEQ ID NO: 704230 - DNA, 1511 bp, Homo sapiens
atatatttttttgtttttcaattaagaaaataaaaaacattaaaaattgctgtgatatttactttaagaaagctaagcattgcagaccttcttggtgctattggtatttgttacaaaccatagttgttacccagtcacaatcacacatagtaccaactctccaatcttacatatattctcatttttcttgggaaaatacctaggtgtaaatttattgaattatgtagtaagtgactgtaaggaacttctgaactgttattaaaaagatctgcatcattcttattcccaccagaaatgtatgagtttttgtggtgctggatgcttgccagaactttgtgttgcctatttgtttccttttgttattctagtagatgggtaggggtatccagtgcgatttacatttttatttccycagccacaaaacatgaagatttctgttactcaagaaaactgactgatggtcagttttaactgggtaatagtttaaaacttttcaacttgattcttctaagattatctaacacgttatacataaagtaatatatattattattagcagaaatataatgagtttatacttcaagagtagggaactacttaaggagataaatgtaacatctgttaatttatttgcagtcagcctaatttaaaattttaaagcataataggtatttattttgttggtggttttgttttctaagaaatagtaagtcaaaactaataaaaaatcaactggttacattttcattataagtagtaatttatatgcaatattagaaacttcaaatattattttgtattggtgtacataaaaagtaattgtagaattaattattgactatttttcctttagtagtcaaaactattcatttatgattttaagtgtgcttggctttaagtatatactgactgcttaggaatttagctcttctcatacttcaaaacactttgaataaatagtaagtgcttttgaaaatacttttctgtgcatgttctgatggctagggactggtaataagttacatgcctgtgtcaagtgcaggtctggtgtagaattactatcaactacattgataaatgatgcaatttactgtagtattctgatttttttaataacattacactgctatgtagagtacttcacctatttttttttctgatggaggaattgacactgtcaagtgaatataaataaagttgaaaatactttgatacacaatccttgagataatttatacataatttttgataattctgactccctaaattcttttttcttcgattatagaaactgatcaagtgcatgtatttgcttgaatatgcacatattgccagcatttatccattcaattttgtatttatacactggagcctcacctattctatgtagataatttcaaagaattcaaataaaaaaaacaggatggtgacaattcattattttgactttactgtcttaggagacaatgatggtgttctattaaagtgctactcaaagtatgttttgtggg

SEQ ID NO: 704231 - DNA, 1150 bp, Homo sapiens
ggtgagggctgaacacttctcaggatgacctgcctgcagagaggagccacaactccagggcctcccctctcagctgagagctgagcactgaacaggatgacctgtttatagaaagaagcgacccactgcaggtctcctctgatctgttctaacactcaataaagctcctcttcatcttgctcacattccgtttgtctgcatacctcattcttcctggacttaggacaagaactcaggcaatagtgccactggccgcagaggtttccagccagaaaagcaacaccccaaagatcttgtaacagttctatgtcttaaacacctttgcatcttttctctaaacttagttcaatgcctggcaaacaatcaccgttaataaacaaacaaaaaaaaattaaataaaaaatgaagaataaatgaatgactaaatgatggtatcacacatctttagttacattgcatagccaatgctattttatcaatgagttttctttgccagctcgccttgatgactgaagaaaaactacctttctctttttcatctttttctctcagattgccagctgaactttttaacacttctgggctaaccagagcttctttttcttttctgatcctaataattaaaatcagttattctcactcttgaggatgcatcagaatcacctggagggctcgttaaaatacatatggctgggccccactcccaatttcttattcagaaagtttgagttgggaactaagactctccatttttaataagctcccagatgatcccatgctgctggtccaaggactacactttgagaaccaccggattagtcaatcacctagggaaattctgtgcccagttgctcccttggttgttaataattagtgctcaaggggtccataaaagagaaatggagccagttacaacatttttcgtctttctagttgcaaagagagttgaaatcatcagtgactacaaatggaaagtctgagtgaacacatgaatcaaactrtattccttttggccaaatcccaaataaaagggatcattaataaagagaagggaaattggaaaggctgtatcctggtatactaaggttgcccaaaatttctctataaacaagaaggcacacctccccatcttgctgcctcctaaaccacc

SEQ ID NO: 704232 - DNA, 1448 bp, Homo sapiens
  misc_feature 593: n = A,T,C or G
gtttatataactaaaaaaaaccaaataatatattagggaaggctcaaccatttagagaatggaatgtcttatrtgtggctcacttgatatcttcttaaacaaggtggtcatctctagcctgaatgaactgtttaacaaggagaatgtttgacacaagaacctacgtaattttccgtagctcaattccttactgatgagatttcaaacaacaggactggtttggggctacctgattaggagtctagaatatgtctgtcagatttgtccttgatgctcaaattaggtaagatctcaaaagatagaaataaaactaaagtagttttaaaagcagagaataaaaatcctatacagaaaagtgtgataccttttgtaatgtaaatgcaggattggactcagtgcgagaaatgaaggaaaagaacaggaggaaatctgttacaagctgaatatgggtcagtaattcactgccattgtttaaaaaaatctgcatcatgatgactatggcttatattatttctatgtttgtgaatggccaaggtactctaagaactaaaaggtaagactaaagaatgttaaaaaaataatcccaataatangaaagaaaggaaaagaaggccgtagatgagtacaggtttaaaacatttcaaaagagagctgaaaactgccttgtatagacacttttaagaataggaaaagatttttaagtgagggggatgttgatcatttccactttatattgagatggaagaaaaatgggcttggtgaaaggaaaaagacattttggtgggctatcagagtgatagatattatgagagacaaagagaatagtaaaatgaccatcctggaaagcttcactaagataatgaatggtcatttttctttaagatttaagatatttgcttgcttgaaaaatacttaacagctgacttgaattgtctgccagttttgtgactctaatttgaagtttgccaaaaactctttaaaatatattacaaattttaatttaaaataaatggagggaagagctatacaacattagtatctgtgagactcctattaagatgcattagaaaaaaattacttttataataatttattaattggctcaaaatttctctttattgcatttttctggagatatttatctttccctgaacccattcattcatcttgccttggatctatttatttaaggacagagaggatgccgtggggactgttgcagggtaatgggcagatgggctgacttcttgcttattagtaagctgggatgatctgactctaaacttcttcctaagggatagaggcacttaaaatgaggtttactcaatcatggaagtataattaaagtaaagatattatttcatctccctccctcccaccccatttctatttttttggtattcttgtttgacttgatgacttagtgttatcactgatgaaaccttaag

SEQ ID NO: 704233 - DNA, 973 bp, Homo sapiens
tgaataaataaatggatgaataagtaaacaaatgaggtttttaaaacatacatacattaaaatatttttaatccaatattacattttgataggactagaggtaactcttttttcatttgggcttatctctatgtttgaaatgttctttgagggaaatatattggttttgtagtagagagaacaatttttaagtggatagtgattaaattgattgacattacaggaaacacttctctcagagtacttatatttaccaaattatacaatcttactgatatcaacaatttcttcaaataagaatcacacaatacagttccttcaaaaagagaaaccaggcaaaataaaagcaaaaggtaaaagccccagaagtagtttcacattttcttcaattttttcaccttttgccatgtgaggattattctcttatttgctaacttctgcctaattcccaaaccaaagtgctggcatattataccacaagcacgtgtgtgtgagtgtgtgtgtgtgtgtgtgtgtactctcaacaatggggccttaggaaacatagaatctaaaacctttgggctcattaatgaagatacagtgagaattaaaagcacatccctactccataaagaaaaaacatttttaaaatacacagttragtatttccaaacttgatttaccacagcactgagttactctgcattactttacagaagacacatacagtcaaatgttgagaaatccaaatcctttcccaagccacttatcatcaggagtggtccaacactgagccagagaatatgccctgtgggtcctctgacccagctgaagtctctagaatcatgggatgctcatgatcgggaaataaaggataaacatgtttttaaaaggcaggttagttacatttatgaaaaatcttctcgatgtatttttctccaatctccagacatatttcagggctctaaatttcctggtgtttacaggtttt

SEQ ID NO: 704234 - DNA, 973 bp, Homo sapiens
tgaataaataaatggatgaataagtaaacaaatgaggtttttaaaacatacatacattaaaatatttttaatccaatattacattttgataggactagaggtaactcttttttcatttgggcttatctctatgtttgaaatgttctttgagggaaatatattggttttgtagtagagagaacaatttttaagtggatagtgattaaattgattgacattacaggaaacacttctctcagagtacttatatttaccaaattatacaatcttactgatatcaacaatttcttcaaataagaatcacacaatacagttccttcaaaaagagaaaccaggcaaaataaaagcaaaaggtaaaagccccagaagtagtttcacattttcttcaattttttcaccttttgccatgtgaggattattctcttatttgctaacttctgcctaattcccaaaccaaagtgctggcatattataccacaagcacgtgtgtgtgagtgtgtgtgtgtgtgtgtgtgtactctcaacaatggggccttaggaaacatagaatctaaaacctttgggctcattaatgaagatacagtgagaattaaaagcacatccctactccataaagaaaaaacatttttaaaatacacagttgagtatttccaaacttgatttaccacagcactgagttactctgcattactttacagaagacacatacagtcaaatgttgagaaatccaaatcctttcccaagccacttatcatcaggagtggtccaacactgagccagagaatatgccctgtgggtcctctgacccagctgaagtctctagaatcatgggatgctcatgatcgggaaataaaggataaacatgtttttaaaaggcaggttasttacatttatgaaaaatcttctcgatgtatttttctccaatctccagacatatttcagggctctaaatttcctggtgtttacaggtttt

SEQ ID NO: 704235 - DNA, 619 bp, Homo sapiens
gctaagtgtgtgtgtgtgttggcgagggtatgttgggtaagggcttgtgggtattaatcataaatcacattttaaattttaaaatgtattcattttatagcaaaaaatctatgtttatatttttcaaagatcattttacctcattaatatcagtgtctgtttttacttctgacttttgaacagaaatagcatgtaactttgaattatcaacaagttcttcacaatcatttgttgtctttccagtaggaaaagagttgtccttgaatgttctggattaagaaatgggaagaaaaaaatcatttaaaaatcatttatatctacatatataaagaacacctacaactcaacaacaaaaagcaacccaattaaaaaacaggcaaaggacctgactagacctttctgcaaagaagatacacaaatggacaataagcacaagaaaagatgcttaatatcactaatcattagggaaatgtaatccataacacactgagatactacatcacctcatacccattaggatggctattaaaawaaaaagaaaataataaataataaatgttggctagggttggaagtacaaggagagtacagaccaccaagcagatttaacctaaagaag

SEQ ID NO: 704236 - DNA, 919 bp, Homo sapiens
gcagatatgtgaaccacgatctcattttccacctctccgctccatgtaccccatgctcccagcacacaatttttcattagtccttaaacaagcaatgctcttggcagctctttgctttgtacatgctgtgcagctgcccagagcatccttaccacatctccttacaacactctaacaactcctaaagacccagatggagttccaacccttctgtgaaattttttcccaaatccctccgtttcatcatcttctatccctcatagcctctgtaaaagtctctatgagaccatggaccacttttaccgtggtttgcttgcacttctatctctgccagatcacctaccaactctacatgggcttggaaaagagacgtaagtgttccatatattacccaaatatggtctccccaggatcacccacagcatataatttttagaatttttttcttccaccacatcatatcataatatattaagtgtctccctatttgacattattgtggctccataattttgtcacagctctagtttactttttgccatgttgttttaatgatattttttcatgcctccttaagattacaaagaagccttcatacgttttctctatgaaaagtaaaatattgagaraagaattggagaacaggagatttataatttcaaagttgagcccccaaagcaagtatgaaaaggtattcaaaatttgaaagaggaaagaaggactagatttatttttgtgtgttagctcacggtattgatttttttaaccaacggtggttttgggtaagacagaagccacagctgaactgatgaactaaagtcctattcaactttagatatttctcttcaataatctcatcctttttctcctttctttttactttcacaaagcagggggctatactggttcaatatgagag

SEQ ID NO: 704237 - DNA, 1190 bp, Homo sapiens
gtctgcatttatataattagaaagcatcataatataaaataatatttccagaaaacaaaatatgttactaattattttaagtatgagtgaatggtgatgcttaaggaaaactaattttgttaagtaacaaaattgcctacagacagaaatttagttgccagaaatgtataatctataaacctgttacacaaatttctaggattttaaaagcttgtagctagtgtattaaattactgctacccaattacatgactttttattgcttcatcaaaaggaaaactgattctaaatagtataaatgactaaataaataaagataaaattgtaatgaaatctaaacacaaaacaccaccacaacaaggttctttagaattgaaaacaggaaaattccttaatccatctctttgcccctcctgaattgatataaatggctcatataagaaatggagaaaaaattgaaaatattaattagtatttgtttccaggtgaattgtgcacgtaaaaacagctartagcagcaacaaaaaaagagaagggtcatcttcacaattaaaaatatagaacccaatacttttcaaattatatgtaatgacgactttaatctagcaagaccatttcttaatagcacatatacacttaaaagaatgtaattaatattgtataaattcttatgatgaatttaattatagtctttaggatattgaaacatgaaataaagaaaaagtagaaatgctttgtctaaaattatgttaggagaaaaaatagtgttgtttaggaattacctgacttaaaggggcctatagaactccctcaggctaagttacattaaactaatgctctattatcgattatcgtcttcttaagcaagatacaaagtacaaattataggtaaagccaagtatttacaggtttaaattgacatttgtaaattaaaattacaaatttaaatttaatctacagattcttcagattaaattacaggactggaagataagagatagctttattcatatatctgatatatgaccttggatgtttgtaataatacggggtctctttctctctatctaagttctcaaccttcagaattgtttttctctctacatagccattctctaccacaaagtagttggagttctttacctggctattattttccataataacattgaaaactacaaaatctttta

SEQ ID NO: 704238 - DNA, 3053 bp, Homo sapiens
actctcatatctttaaagagtctcatgaacttgaatataattccagaatgtctttacaaatacatctctctggagatatgccctactgtaaactctttctggatgggtctgtgaaaagagtaaagaagtagttaccagcttctgtaacagtcacgttttttatgttttcccaacacttgctcacaaattttgttatggctttccctagtcccacttgtccagcagagatagaaagatacatgcacaattttaaagttgcaaaacagcaaaggccatgaaaatcacattcaaatgttagttttagagcttgtcctgtcttagtgcataagtgctgcaatcagatacagtgggaagtgattggtggttaccaacttaaatggaattagactttaaaaatagtctgaaatagagccctggaatggatttttcaaaaacaaggacaatcatttctaaattttatgcctgactgtccgtgcctctagagggagtcattcacaattcattaattcttgtcttgaagtggtttatttttatggccaaattttgaaactcgttttttaaatgccttcagatttttaatggcatcaaatgttattgtaaagcatagagattcaacttagagtaaaaagcattctaaccacttcaacaatcattctactatgaaaccacatttcatggaattgaaaatatgccaagtgtgaaaaatattccatttgaatgtttgaaagatcaaccttacactgtaagaattaacaccaactttatttcaaaaatgtggctactgttttcttaagaatatacatacatatagtgtacttgggtttatttcctaggaatccagagtacttacagagtgaggtgacactgtgaagtgcacaatcacaaagcattctcaggttcctggtgtcgctctcaaatgtttattcccagatgcagacagatggccttccttttcagactggggcaaagtagcaatgcaacagctttggcctaactggagccaaaaatgatagtggcagtgtatgggtctgggtttagcaaagaaaacaaaaagtaccccaagtatttaaaacaaaatgaatttaacacagggaattatctacatacgttttggaaggacaagaagaacaaagagaagtaggtgaagtggagggagctaaagtaacagaaaagaagaaggggtggcacttttttgatgcaaagcagttaaaaccactcgtctggagcccatttgcctgcacctgccactgtgctgttggtgacactcataatcagtcctggactgctgaagatgcatcatgtccgtcaaagctggaacctaccagaaaggggtggcccctacccatgwtcttaaagtcaagaatcgccccactcccaatgcaacccccccagtactgaagtcagaagcagaaagtttcgctctcccagtaacttctccctcaagtgcctcctattggcagaacctaacaagaatccagcagacgtgagaggctgataaatgcaatttgtagactcctgttccataaatataaacaacagagtccagaagagagaatgggacttgagaatatccagacacaagaagaaatatgctgttctacctacaatggctttattttctagagttagaagtgactgtctgctccaggcatatattttctttctttctttctttctttttttgtttgtttgcttttgagacggagtttcgctctgtcgcccaggctggagtgcagtggcgccatctcggctcactgcaagctctgcctccccggttcacgccattctcctgcctcagcctcccgagtagctgtgactaccagcgcccgccaccacgcccggctaattttttgtattttttagtagagacgtggtttcaccattttagccaggatggtctcgatctcctgacctcgtgatccacccgtctcggcctcccaaagccctgagattgcaggtgtgagccaccgcacccagcctacacgcatatattttcaatggttcctttttggttcctgcagcacatagggataatttaagtggataatttgtcccatcaaattgacatgatctagtaggtctacagagaagagaaaagtagtatggaaaatttcaccaattccatcttactaccaacttgtgtaaaggaaagggaaagcagaggttaacattaggcgggaagcatttgctgcgggacatttctttgaaacctaaaacactttatcaaggaacttgtcatctcagtggaggacaatccaattgttattctcctgatttcttgctggagtagaaaaacatcaccctggagaatggaaatgcagaaagggaaagagaccacgtccattaggaaaatgttcatttatccttgggaatatttagctcaggttggaagcaccacatgccccaaatagagaaacttgcataaggctcaatgtaacataaacatgaatgtattaggctaattttgaagtggctgccctacctcacattctgttcttagaaaatctgtccagacctaagcatctgttgagtatccacttttatgctagccatacctaattgaatgaatggcaggcagttgactgatagtcagtacaaatgatggctgtgcagtaactaatcagattctgtttcctgagaattatactaaaaatacaagaaagattgttgacagctggaggaggtacatttgagaaaggacatgtaatgatgggacctgagtcagtacactgagaaaggaaactgtagataagcagaggaagatgatctgcagggagtatagtagaagaggcaacccaagggtatgcacagaaggcatgcaggagggaggaaaggagatagaaaaggaagaaagagaaggatatctgccccatccataatgtgttatgtctcagttctaggcaccataaagcctggctgaacatcataatttgccggaggcatcagtatttttagaatgtatcctacctccttttgagtttgctcagttgatttccaaaggagtcctaactaaagcaacaaaattacagagccaagatgtacattgaaaacaa

SEQ ID NO: 704239 - DNA, 1186 bp, Homo sapiens
tggtcttgaactccttacctcaagtgatccacccgcctyggcctctcaaagtgctgggattacaggcatgagccatcatgcccagcctaagctttttttttagttcccccaaattcacaagggatccagagttggaagatatttctgacctcaggagttcaacttgaagtcaaaacttagatgaaacgaaaaaaattgcctgtggtattgattatttgtgcaccagaaactgtatgaatgtgccagatgccttccacttgctccttgagaccctctctccactctccactcacccttttctctgtcccagggcgttggcttgcaggaacccctctggctcctgatgggtatagtcagcggggcatgctctcaggagatgagagggagggaagagaatgaggcccaggtgtttatttccccacttccatccttgcaggttgctttaccctggctgctgctcctctcacgttggtcctctacagattgatctcctattaggattccctaaatctctctgtattagtctgttttcatgttgctgataaagacatacccaagactaggcagtttataaagaaaaagaggtttaatggactcacagttccacgtggctggggagacctcacaatcatggcagaagggtacctcttacacggtggcagacaagagaatgacagccaagtgaaaggggaaactcctcacaaaattatcagatctcgtgagacttattcactacaatgagaacagtatgggggaaccgtcccccatgactcaattgtctcctactgggtccctcccacaacacgtggaaattatgggagctacaattcaagatgagatttgggtggggacacagccaaaccacatcattcgccttcctcatatctttgagccctgagtgataacacatcttcgtcttccgttattatccctgaggaagctcactgatagctttgatgataattcctttatagactaccctcaaattatcctatttttttctttttaacttttactttagattcagggggtacatgtacgggtaaattattctaatatgagtgtgtgtctgtctctccctgggtctctcactgagaagcactggcaggtatcatatttttaatcatattggcatttctactgctcctaggcaggtacttttgcaccagcctatagttacaactcc

SEQ ID NO: 704240 - DNA, 1186 bp, Homo sapiens
tggtcttgaactccttacctcaagtgatccacccgccttggcctctcaaagtgctgggattacaggcatgagccatcatgcccagcctaagctttttttttagttcccccaaattcacaagggatccagagttggaagatatttctgacctcaggagttcaacttgaagtcaaaacttagatgaaacgaaaaaaattgcctgtggtattgattatttgtgcaccagaaactgtatgaatgtgccagatgccttccacttgctccttgagaccctctctccactctccactcacccttttctctgtcccagggcgttggcttgcaggaacccctctggctcctgatgggtatagtcagcggggcatgctctcaggagatgagagggagggaagagaatgaggcccaggtgtttatttccccacttccatccttgcaggttgctttaccctggctgctgctcctctmacgttggtcctctacagattgatctcctattaggattccctaaatctctctgtattagtctgttttcatgttgctgataaagacatacccaagactaggcagtttataaagaaaaagaggtttaatggactcacagttccacgtggctggggagacctcacaatcatggcagaagggtacctcttacacggtggcagacaagagaatgacagccaagtgaaaggggaaactcctcacaaaattatcagatctcgtgagacttattcactacaatgagaacagtatgggggaaccgtcccccatgactcaattgtctcctactgggtccctcccacaacacgtggaaattatgggagctacaattcaagatgagatttgggtggggacacagccaaaccacatcattcgccttcctcatatctttgagccctgagtgataacacatcttcgtcttccgttattatccctgaggaagctcactgatagctttgatgataattcctttatagactaccctcaaattatcctatttttttctttttaacttttactttagattcagggggtacatgtacgggtaaattattctaatatgagtgtgtgtctgtctctccctgggtctctcactgagaagcactggcaggtatcatatttttaatcatattggcatttctactgctcctaggcaggtacttttgcaccagcctatagttacaactcc

SEQ ID NO: 704241 - DNA, 1186 bp, Homo sapiens
tggtcttgaactccttacctcaagtgatccacccgccttggcctctcaaagtgctgggattacaggcatgagccatcatgcccagcctaagctttttttttagttcccccaaattcacaagggatccagagttggaagatatttctgacctcaggagttcaacttgaagtcaaaacttagatgaaacgaaaaaaattgcctgtggtattgattatttgtgcaccagaaactgtatgaatgtgccagatgccttccacttgctccttgagaccctctctccactctccactcacccttttctctgtcccagggcgttggcttgcaggaacccctctggctcctgatgggtatagtcagcggggcatgctctcaggagatgagagggagggaagagaatgaggcccaggtgtttatttccccacttccatccttgcaggttgctttaccctggctgctgctcctctcacgttggtcctctacagattgatctcctattaggattccctaaatctctctgtattagtctgttttcatgttgctgataaagacatacccaagactaggcagtttataaagaaaaagaggtttaatggactcacagttccacgtggctggggagacctcacaatcatggcagaagggtacctcttacacggtggcagacaagagaatgacagccaagtgaaaggggaaactcctcacaaaattatcagatctcgtgagacttattcactacaatgagaacagtatgggggaaccgtcccccatgactcaattgtctcctactgggtccctcccacaacacgtggaaattatgggagctacaattcaagatgagatttgggtggggacacagccaaaccacatcattcgccttcctcatatctttgagccctgagtgataacacatcttcgtcttccgttattatccctgaggaagctcactgatagctttgatgataattcctttatagactaccctcaaattatcctatttttttctttttaacttttaytttagattcagggggtacatgtacgggtaaattattctaatatgagtgtgtgtctgtctctccctgggtctctcactgagaagcactggcaggtatcatatttttaatcatattggcatttctactgctcctaggcaggtacttttgcaccagcctatagttacaactcc

SEQ ID NO: 704242 - DNA, 646 bp, Homo sapiens
taagaattaaaaataaaaaaaattagccaggcatgatggtgcccgcctgtggtcccagctatttgggaggatcacttgagcccaggaggtcgaggctgcagtgatctgagatcacaccactgcactccagcctggatgacagtgagaccgtgtctcaacaaacaaacaacaaaaagaaaacaagacagaggcaattaataaatagtatctgttactaytactattataaaaagcacagcctttatcattgtatctgagtaataatagttatacatgcatattttcggaatgttacaaagaatataccataaaatggagataacacaataaatgccacatggcattagcattaggggtttggtgaaatgatattcatgagggcaactttcaaacctataaagagatatacaggctgggtgcagtggctcatgcctgtaatcccagcactttgggaggccgaggtgggtggatcacatgtggcatgtggccaggagtccgagaccagcctggccaacatggtgaaacctagtctctactaaaaatacaaaaattagcttgtaatcctagctactggtgtggctgaggcacgagaatcacttgaacccaggaggcagaggttgcaatgagccatgatcatgccactgaa

SEQ ID NO: 704243 - DNA, 877 bp, Homo sapiens
tcacatgctcaccaccagctcccaggtcctcagcctgtgcagggcctgtgtgctccacacagacgtcctcttcagatgatgctcccacgtcttggctgtggtcctttctggaaattgcccttggccacagagagctgcctcgcccaagcrtttgccctcccaggggctccctgaggccaatgcccagatgatgcaaggataatacctttcaatttcatataggtcttaagatcatctggcccagaacgccccatcggatccactgaaactcattgtgggtgaccttctccctccacccagtgctgccttcttcccttactcgcagatcatctggagagaactccctaagagccttctgcccatgactctagaaggccacctctaaggccctgagtcccttagttgtctttggtctttgcccctccaaacacagcccactcatttgacttcctaggcacccactatccactaaaatgcagccatcctgtatcccagtgactagaaaatgggtgctgatgggttaatatggtgtccaataaaaatatttaccatgatgggagctgacacatgcacagctagcagtctgcaaagcacattgacgtatgttttttcagttgcaaggcagaatagcatggtggtttctgaagtgactctgcctgaatttgaatttctgtcccaccacctatgagtcttgcgactttgggccagctacataaactttctgttgctctatttccctatctgtaaaatggggataatagtcccttcttcagagaatgtttgttagaattaaatgagtcaatacatataaaggtctcagaactgccctggcatatggtaagcacatagtgtgccttagctgttagtatttgatcct

SEQ ID NO: 704244 - DNA, 616 bp, Homo sapiens
tttaataaaatatcttacagttctcatattggctaataaatggagtaggcaggagaaagacagacaggatgacaaagaggagattagagcaagttgagacttttatttcatttggattcagttgtgttaaactagcacacactggtcccatgctgaattatttacttttttaagtattcaaataaaaatattgaccctcatgttcaaggctgttaraggtaagattcagacaacataaactgaatagagaaaaagagcaattacaagtggtcagatttcttggactattacaagaattgcttccaaataattacatacactttaactccatttatatttgagatgattgaaaataatgacatgtaattacaatctatccaccaaaaccccattctattgtgacattaagagcttgtcttttcttgataatctaatagaagtaataaaaagtaacatgctagaataattttccagacagagaacagagacaaaaacttcagcatattattcttttgtttactaccctatcagggcatataaattatatcttggaagagagtggccacacctttgtagaatcaggttgtggaaataatagatacaggatagtaatcca

SEQ ID NO: 704245 - DNA, 616 bp, Homo sapiens
tttaataaaatatcttacagttctcatattggctaataaatggagtaggcaggagaaagacagacaggatgacaaagaggagattagagcaagttgagacttttatttcatttggattcagttgtgttaaactagcacacactggtcccatgctgaattatttacttttttaagtattcaaataaaaatattgaccctcatgttcaaggctgttaaaggtaagattcagacaacataaactgaatagagaaaaagagcaattacaagtggtcaratttcttggactattacaagaattgcttccaaataattacatacactttaactccatttatatttgagatgattgaaaataatgacatgtaattacaatctatccaccaaaaccccattctattgtgacattaagagcttgtcttttcttgataatctaatagaagtaataaaaagtaacatgctagaataattttccagacagagaacagagacaaaaacttcagcatattattcttttgtttactaccctatcagggcatataaattatatcttggaagagagtggccacacctttgtagaatcaggttgtggaaataatagatacaggatagtaatcca

SEQ ID NO: 704246 - DNA, 618 bp, Homo sapiens
atttgcgtagataaaactgagataatttgagacaccctattaacattccagaaagactcaagcaccataataaacaagtaatttggaaggtcttattttctagtttcattttattcaattttccaggataattatattacaatattttaatttgtcatttcttacaatctgcccctttctttcaaaattaacaatttttaaaagatgttaagtaatattggtaacatcttacacatacacacacatacatggtggcaaattcattaaatcaaattgagatacaaaaaacttaactaaaaatagtgttacattttagagtttatattccagtttactggcaaatacttattttatgccaaaaaaagtctgagataaaactgaaataacatttaaggtagacttacgcctcaacaaaaccagtctatagttatgaccaatgtgaatygtaatcctttccaaagtaactatcttttgaatattgactgcaagaacaaaaaataaatagtcaaagtaagtcctatattaccagagttttgtaaaattatcaatgagaaaaatgcatgagatagttacatgtgaaaaacaatactagttttttccataaaccataaacttgtg

SEQ ID NO: 704247 - DNA, 618 bp, Homo sapiens
atttgcgtagataaaactgagataatttgagacaccctattaacattccagaaagactcaagcaccataataaacaagtaatttggaaggtcttattttctagtttcattttattcaattttccaggataattatattacaatattttaatttgtcatttcttacaatctgcccctttctttcaaaattaacaatttttaaaagatgttaagtaatattggtaacatcttacacatacacacacatacatggtggcaaattcattaaatcaaattgagatacaaaaaacttaactaaaaatagtgttacattttagagtttatattccagtttactggcaaatacttattttatgccaaaaaaagtctgagataaaactgaaataacatttaaggtagacttacgcctcaacaaaaccagtctatagttatgaccaatgtgaattgtaatcctttccaaagtaactatcttttgaatattgactgcaagaacaaaaaataaatagtcaaagtaagtcctatattaccagagttttgtaaaattatcaatgagaaaaatgcatgagatagttacatgtgaaaaacaatactagttttttccatwaaccataaacttgtg

SEQ ID NO: 704248 - DNA, 3019 bp, Homo sapiens
tcagctcacaacaaagcatycactgaaataggcaaggctaacaacttttgaaaaacagactcattccacacacgccaaacagttgctgctgcctcgttaggctagtatctcactggtaaaggctaactaaatatcatctaaggccatatgttttaaaaatttagtttttacattttgtttcagaatcatttaaagtaactgaaaataacaggcctcccaaacagatatcaaattccttgctagaatttaaattttacagacaatttcctgatatatcacctacatttttgcatatttccagtggttcttacgagctgataatgaaagaaatgagagatgaaagttaaaatatgaatagacacaacatgtcaatagatgcaatttggaatatatgagtcactgttaggcttcataataggaatgtacagaattattcatctttagttagcaaaaagaagtatcttgaaaacattttgagactatattaatgaagctccatggaattaagcatttaagcttttccattcactgaccgggcaattcaaatattcaaagaggtagaatgcaacataggcaagctttattcaatatatagttatttagcataaacataaccagtgtattaattcatgtatgtgtgtctttattcagattatacaaattgaaaaaaaaactgaagtgaagttcataaagatactactatatatgataaatatattcatatcattttaataaagtcaaggaaataagcctttaaagattattcattccaagcatctgcccttagaaaaaaatcaagtaattcatttcaatccaatgaaaaaaagataatctcagttagacattgttctctgtgtaatatcagttgttttatagtaggaaaatcagtaaatattgatcacttataatgtgtaaggaaaaactaaatgttttatgtaggttattacatctttaccaaataccatggagatttccacatggcataagtgatgattagagaggtcacgtcacttgttcaaggaaacacagaacaggtctgctgaataggtgtgttgatctaagataatcagttctaattaaatgagctatatttgtattttcttgcataattccccgataactaattgattcaaaaataatatgaatcagagaaaaatacctatcactggaagcccatgttctgtcccaactaaacaaaaaaataaacaaaaaccatacaataatttgtcttgaaacatgatgggttatattctgaatcagaggaggaagcatgtctttttttgtcccctacagtaccacatggcttatcatattgcaggcattaatacatatgtgtttgataagtgattaaataagcatcaatacaaatatgagaggggacagagagagagagagagactgccagagagaaggtagatggagagagagagggagcaaaatgagaagtcataaaaaaaaaaactgaaggagtcatttgcaaagtgttaaaagataagccaattgaggtcaaggaattagatttcatctattctctttatacattcttattatgcatctgcagtttctaacactgtattaggcaggagaaattcaatggtgaataagacaaggcaacctgtttcctcatagagagtagagcccaaggaaaggagagagaataaagagcaattaccattcagtgtgttaagtgataggaaagggaacctgtgggattctaagaggaaatgaaacaatggcaaccaaactatatttggaaatcgaataaaactttccaagaaaactaacattgaggactaaatctaaggattgagaagagtgaaattgtaagaaggaattattggttgggtgaggtggctcagcctgaaatcccagcactttgggaggccgaagcgggtggatcaccagaggtcaggagttcaagaacagcctggccaacatggtgaaaccccgtctctactggaaatacaaaaattagccgggtgtggtggcgcttgcctgtaatcccagccactcaggaggctgaggcaggagaattgcttgcacctggaaggcagaggttggttacagtgacccaagattgtgccactgcactccagcctgggcaacaagaatgaaactctgtttcaaaaaaaaaaaaaagaagaagagattattaaaaaattgcccatttcagagttttcagatataatatttccttttcccaggtagatctgtagtagtctatatggaatgttgattcaactcagaagtttgtgtaagattcagaggagttaagggaaaagatcaattattattgtgtggctattcaattgccagactctctccatctcttctcttttcttcctacacaaacatgtgcttgttctaacctttttgttattgattgaacttcctctctgatggtagaaagtatgttgtattatacaaataatttttaggaaaattatctgtctccagctgtgagattacttgataatacagtatgcagataatgtctctattggcatcaatgtttattatttcaaaataaagattaaaaatgcatttgataaaattatgaaaaaacccttttatttataatctcaaaataagtaagtgtgcaatatagcaaaaaatgtgaaatttcatcatgtactatgcagaaaactactctgatatatgagctgtcatgtcaaattatttaaaatatttttctatataattaattaccttcattatcattaagaactccaaaattcaacattctcccttagtatttaatgattttcaatattgtgtgaatgctttgtcctttgaatcctgacagcacttatgtggtatatgctctcttgatattcttggtctatgtcatcccaatgaagaatggtgcttgaaggcagatactgtcctacacaactctctatctgctatgatgtttagtccagtggcttattatgtgattcaaatcttacaatatttgaaaattacaaaatgaaaagataaacctgacttctttaaaatatttttccacaaaatgaca

SEQ ID NO: 704249 - DNA, 3019 bp, Homo sapiens
tcagctcacaacaaagcatccactgaaataggcaaggctaacaacttttgaaaaacagactcattccacacacgccaaacakttgctgctgcctcgttaggctagtatctcactggtaaaggctaactaaatatcatctaaggccatatgttttaaaaatttagtttttacattttgtttcagaatcatttaaagtaactgaaaataacaggcctcccaaacagatatcaaattccttgctagaatttaaattttacagacaatttcctgatatatcacctacatttttgcatatttccagtggttcttacgagctgataatgaaagaaatgagagatgaaagttaaaatatgaatagacacaacatgtcaatagatgcaatttggaatatatgagtcactgttaggcttcataataggaatgtacagaattattcatctttagttagcaaaaagaagtatcttgaaaacattttgagactatattaatgaagctccatggaattaagcatttaagcttttccattcactgaccgggcaattcaaatattcaaagaggtagaatgcaacataggcaagctttattcaatatatagttatttagcataaacataaccagtgtattaattcatgtatgtgtgtctttattcagattatacaaattgaaaaaaaaactgaagtgaagttcataaagatactactatatatgataaatatattcatatcattttaataaagtcaaggaaataagcctttaaagattattcattccaagcatctgcccttagaaaaaaatcaagtaattcatttcaatccaatgaaaaaaagataatctcagttagacattgttctctgtgtaatatcagttgttttatagtaggaaaatcagtaaatattgatcacttataatgtgtaaggaaaaactaaatgttttatgtaggttattacatctttaccaaataccatggagatttccacatggcataagtgatgattagagaggtcacgtcacttgttcaaggaaacacagaacaggtctgctgaataggtgtgttgatctaagataatcagttctaattaaatgagctatatttgtattttcttgcataattccccgataactaattgattcaaaaataatatgaatcagagaaaaatacctatcactggaagcccatgttctgtcccaactaaacaaaaaaataaacaaaaaccatacaataatttgtcttgaaacatgatgggttatattctgaatcagaggaggaagcatgtctttttttgtcccctacagtaccacatggcttatcatattgcaggcattaatacatatgtgtttgataagtgattaaataagcatcaatacaaatatgagaggggacagagagagagagagagactgccagagagaaggtagatggagagagagagggagcaaaatgagaagtcataaaaaaaaaaactgaaggagtcatttgcaaagtgttaaaagataagccaattgaggtcaaggaattagatttcatctattctctttatacattcttattatgcatctgcagtttctaacactgtattaggcaggagaaattcaatggtgaataagacaaggcaacctgtttcctcatagagagtagagcccaaggaaaggagagagaataaagagcaattaccattcagtgtgttaagtgataggaaagggaacctgtgggattctaagaggaaatgaaacaatggcaaccaaactatatttggaaatcgaataaaactttccaagaaaactaacattgaggactaaatctaaggattgagaagagtgaaattgtaagaaggaattattggttgggtgaggtggctcagcctgaaatcccagcactttgggaggccgaagcgggtggatcaccagaggtcaggagttcaagaacagcctggccaacatggtgaaaccccgtctctactggaaatacaaaaattagccgggtgtggtggcgcttgcctgtaatcccagccactcaggaggctgaggcaggagaattgcttgcacctggaaggcagaggttggttacagtgacccaagattgtgccactgcactccagcctgggcaacaagaatgaaactctgtttcaaaaaaaaaaaaaagaagaagagattattaaaaaattgcccatttcagagttttcagatataatatttccttttcccaggtagatctgtagtagtctatatggaatgttgattcaactcagaagtttgtgtaagattcagaggagttaagggaaaagatcaattattattgtgtggctattcaattgccagactctctccatctcttctcttttcttcctacacaaacatgtgcttgttctaacctttttgttattgattgaacttcctctctgatggtagaaagtatgttgtattatacaaataatttttaggaaaattatctgtctccagctgtgagattacttgataatacagtatgcagataatgtctctattggcatcaatgtttattatttcaaaataaagattaaaaatgcatttgataaaattatgaaaaaacccttttatttataatctcaaaataagtaagtgtgcaatatagcaaaaaatgtgaaatttcatcatgtactatgcagaaaactactctgatatatgagctgtcatgtcaaattatttaaaatatttttctatataattaattaccttcattatcattaagaactccaaaattcaacattctcccttagtatttaatgattttcaatattgtgtgaatgctttgtcctttgaatcctgacagcacttatgtggtatatgctctcttgatattcttggtctatgtcatcccaatgaagaatggtgcttgaaggcagatactgtcctacacaactctctatctgctatgatgtttagtccagtggcttattatgtgattcaaatcttacaatatttgaaaattacaaaatgaaaagataaacctgacttctttaaaatatttttccacaaaatgaca

SEQ ID NO: 704250 - DNA, 3019 bp, Homo sapiens
tcagctcacaacaaagcatccactgaaataggcaaggctaacaacttttgaaaaacagactcattccacacacgccaaacagttgctgytgcctcgttaggctagtatctcactggtaaaggctaactaaatatcatctaaggccatatgttttaaaaatttagtttttacattttgtttcagaatcatttaaagtaactgaaaataacaggcctcccaaacagatatcaaattccttgctagaatttaaattttacagacaatttcctgatatatcacctacatttttgcatatttccagtggttcttacgagctgataatgaaagaaatgagagatgaaagttaaaatatgaatagacacaacatgtcaatagatgcaatttggaatatatgagtcactgttaggcttcataataggaatgtacagaattattcatctttagttagcaaaaagaagtatcttgaaaacattttgagactatattaatgaagctccatggaattaagcatttaagcttttccattcactgaccgggcaattcaaatattcaaagaggtagaatgcaacataggcaagctttattcaatatatagttatttagcataaacataaccagtgtattaattcatgtatgtgtgtctttattcagattatacaaattgaaaaaaaaactgaagtgaagttcataaagatactactatatatgataaatatattcatatcattttaataaagtcaaggaaataagcctttaaagattattcattccaagcatctgcccttagaaaaaaatcaagtaattcatttcaatccaatgaaaaaaagataatctcagttagacattgttctctgtgtaatatcagttgttttatagtaggaaaatcagtaaatattgatcacttataatgtgtaaggaaaaactaaatgttttatgtaggttattacatctttaccaaataccatggagatttccacatggcataagtgatgattagagaggtcacgtcacttgttcaaggaaacacagaacaggtctgctgaataggtgtgttgatctaagataatcagttctaattaaatgagctatatttgtattttcttgcataattccccgataactaattgattcaaaaataatatgaatcagagaaaaatacctatcactggaagcccatgttctgtcccaactaaacaaaaaaataaacaaaaaccatacaataatttgtcttgaaacatgatgggttatattctgaatcagaggaggaagcatgtctttttttgtcccctacagtaccacatggcttatcatattgcaggcattaatacatatgtgtttgataagtgattaaataagcatcaatacaaatatgagaggggacagagagagagagagagactgccagagagaaggtagatggagagagagagggagcaaaatgagaagtcataaaaaaaaaaactgaaggagtcatttgcaaagtgttaaaagataagccaattgaggtcaaggaattagatttcatctattctctttatacattcttattatgcatctgcagtttctaacactgtattaggcaggagaaattcaatggtgaataagacaaggcaacctgtttcctcatagagagtagagcccaaggaaaggagagagaataaagagcaattaccattcagtgtgttaagtgataggaaagggaacctgtgggattctaagaggaaatgaaacaatggcaaccaaactatatttggaaatcgaataaaactttccaagaaaactaacattgaggactaaatctaaggattgagaagagtgaaattgtaagaaggaattattggttgggtgaggtggctcagcctgaaatcccagcactttgggaggccgaagcgggtggatcaccagaggtcaggagttcaagaacagcctggccaacatggtgaaaccccgtctctactggaaatacaaaaattagccgggtgtggtggcgcttgcctgtaatcccagccactcaggaggctgaggcaggagaattgcttgcacctggaaggcagaggttggttacagtgacccaagattgtgccactgcactccagcctgggcaacaagaatgaaactctgtttcaaaaaaaaaaaaaagaagaagagattattaaaaaattgcccatttcagagttttcagatataatatttccttttcccaggtagatctgtagtagtctatatggaatgttgattcaactcagaagtttgtgtaagattcagaggagttaagggaaaagatcaattattattgtgtggctattcaattgccagactctctccatctcttctcttttcttcctacacaaacatgtgcttgttctaacctttttgttattgattgaacttcctctctgatggtagaaagtatgttgtattatacaaataatttttaggaaaattatctgtctccagctgtgagattacttgataatacagtatgcagataatgtctctattggcatcaatgtttattatttcaaaataaagattaaaaatgcatttgataaaattatgaaaaaacccttttatttataatctcaaaataagtaagtgtgcaatatagcaaaaaatgtgaaatttcatcatgtactatgcagaaaactactctgatatatgagctgtcatgtcaaattatttaaaatatttttctatataattaattaccttcattatcattaagaactccaaaattcaacattctcccttagtatttaatgattttcaatattgtgtgaatgctttgtcctttgaatcctgacagcacttatgtggtatatgctctcttgatattcttggtctatgtcatcccaatgaagaatggtgcttgaaggcagatactgtcctacacaactctctatctgctatgatgtttagtccagtggcttattatgtgattcaaatcttacaatatttgaaaattacaaaatgaaaagataaacctgacttctttaaaatatttttccacaaaatgaca

SEQ ID NO: 704251 - DNA, 3019 bp, Homo sapiens
tcagctcacaacaaagcatccactgaaataggcaaggctaacaacttttgaaaaacagactcattccacacacgccaaacagttgctgctgcctcgttaggctagtatctcactggtaaaggctaactaaatatcatctaaggccatatgttttaaaaatttagtttttacattttgtttcagaatcatttaaagtaactgaaaataacaggcctcccaaacagatatcaaattccttgctagaatttaaattttacagacaatttcctgatatatcacctacatttttgcatatttccagtggttcttacgagctgataatgaaagaaatgagagatgaaagttaaaatatgaatagacacaacatgtcaatagatgcaatttggaatatatgagtcactgttaggcttcataataggaatgtacagaattattcatctttagttagcaaaaagaagtatcttgaaaacattttgagactatattaatgaagctccatggaattaagcatttaagcttttccattcactgaccgggcaattcaaatattcaaagaggtagaatgcaacataggcaagctttattcaatatatagttatttagcataaacataaccagtgtattaattcatgyatgtgtgtctttattcagattatacaaattgaaaaaaaaactgaagtgaagttcataaagatactactatatatgataaatatattcatatcattttaataaagtcaaggaaataagcctttaaagattattcattccaagcatctgcccttagaaaaaaatcaagtaattcatttcaatccaatgaaaaaaagataatctcagttagacattgttctctgtgtaatatcagttgttttatagtaggaaaatcagtaaatattgatcacttataatgtgtaaggaaaaactaaatgttttatgtaggttattacatctttaccaaataccatggagatttccacatggcataagtgatgattagagaggtcacgtcacttgttcaaggaaacacagaacaggtctgctgaataggtgtgttgatctaagataatcagttctaattaaatgagctatatttgtattttcttgcataattccccgataactaattgattcaaaaataatatgaatcagagaaaaatacctatcactggaagcccatgttctgtcccaactaaacaaaaaaataaacaaaaaccatacaataatttgtcttgaaacatgatgggttatattctgaatcagaggaggaagcatgtctttttttgtcccctacagtaccacatggcttatcatattgcaggcattaatacatatgtgtttgataagtgattaaataagcatcaatacaaatatgagaggggacagagagagagagagagactgccagagagaaggtagatggagagagagagggagcaaaatgagaagtcataaaaaaaaaaactgaaggagtcatttgcaaagtgttaaaagataagccaattgaggtcaaggaattagatttcatctattctctttatacattcttattatgcatctgcagtttctaacactgtattaggcaggagaaattcaatggtgaataagacaaggcaacctgtttcctcatagagagtagagcccaaggaaaggagagagaataaagagcaattaccattcagtgtgttaagtgataggaaagggaacctgtgggattctaagaggaaatgaaacaatggcaaccaaactatatttggaaatcgaataaaactttccaagaaaactaacattgaggactaaatctaaggattgagaagagtgaaattgtaagaaggaattattggttgggtgaggtggctcagcctgaaatcccagcactttgggaggccgaagcgggtggatcaccagaggtcaggagttcaagaacagcctggccaacatggtgaaaccccgtctctactggaaatacaaaaattagccgggtgtggtggcgcttgcctgtaatcccagccactcaggaggctgaggcaggagaattgcttgcacctggaaggcagaggttggttacagtgacccaagattgtgccactgcactccagcctgggcaacaagaatgaaactctgtttcaaaaaaaaaaaaaagaagaagagattattaaaaaattgcccatttcagagttttcagatataatatttccttttcccaggtagatctgtagtagtctatatggaatgttgattcaactcagaagtttgtgtaagattcagaggagttaagggaaaagatcaattattattgtgtggctattcaattgccagactctctccatctcttctcttttcttcctacacaaacatgtgcttgttctaacctttttgttattgattgaacttcctctctgatggtagaaagtatgttgtattatacaaataatttttaggaaaattatctgtctccagctgtgagattacttgataatacagtatgcagataatgtctctattggcatcaatgtttattatttcaaaataaagattaaaaatgcatttgataaaattatgaaaaaacccttttatttataatctcaaaataagtaagtgtgcaatatagcaaaaaatgtgaaatttcatcatgtactatgcagaaaactactctgatatatgagctgtcatgtcaaattatttaaaatatttttctatataattaattaccttcattatcattaagaactccaaaattcaacattctcccttagtatttaatgattttcaatattgtgtgaatgctttgtcctttgaatcctgacagcacttatgtggtatatgctctcttgatattcttggtctatgtcatcccaatgaagaatggtgcttgaaggcagatactgtcctacacaactctctatctgctatgatgtttagtccagtggcttattatgtgattcaaatcttacaatatttgaaaattacaaaatgaaaagataaacctgacttctttaaaatatttttccacaaaatgaca

SEQ ID NO: 704252 - DNA, 1260 bp, Homo sapiens
tgcagaccctttcaataatttgccactctaccaatttatgaaataatagggataataataagagcttgagaaaaatcctattcacatacattgaaaggaacttgaaggtaagttttaactgcatgattccttgcattttctttttatagctttaaaaacattatcatttattcattttctacatatagaaattagggaatgttgtcatatttttttctagttcttactgatattacacatttgaaagagatttcacaccagcaaactaatcatagagcccccacatcatttacttcatttcaattttgaaaatatcatgtttgctttttgttattgtttgaacaaaaacattaatggcaatttattattgtgaattatttatatttgttttttccatgatttcttcattatttgcatgtcatactcttcaaacttacctcatctgaggtggaatttaatcaagatattggtagaagtcatacmtgtacctgaaacagttaaaaagataatgtgcatattatctgtattttgtcctctcacgcaactcgctaaacaattttttctctctcatgatttggcatataaacactaatgtttattatttggaagataaaaattaatgtctaaagaaatgttctaatagttctgaaaaagaagagaattttcacagagggtagattatttactgttctaagtgaagattacaaatgtcaaacatgaaaaagtcatatcagaagtcaaaacgcaacaaataagaagagaatctacagatgagaatttgcgttctaaaaacagaccattgagagacagagagcatcagtgagagcgagagagagagacagggagggaggtaagtgatagtaattcctagaaagggtaaaaagctaaaggaaaaataatgtcaattaaaataatcttgcaactgagttcaaaaaagacagaaaatttcttcaaaaataaatgtgaatatttgttcactttggacatctcattaatcaattaaaagtactttagaaattttatttacatgatttcttttttgtttgttttttattttttattttttattttatttttaattttattattattatactttaagttttagggtacatgtgcacaatgtgcaggttagttacacatgtatactatacatgtatttgcatgatttctatagtaacttcagaaattagaaaactccataatttcattttataaagtaccattaaaaatgtaataattgtgtaaatatatataaga

SEQ ID NO: 704253 - DNA, 1260 bp, Homo sapiens
tgcagaccctttcaataatttgccactctaccaatttatgaaataatagggataataataagagcttgagaaaaatcctattcacatacattgaaaggaacttgaaggtaagttttaactgcatgattccttgcattttctttttatagctttaaaaacattatcatttattcattttctacatatagaaattagggaatgttgtcatatttttttctagttcttactgatattacacatttgaaagagatttcacaccagcaaactaatcatagagcccccacatcatttacttcatttcaattttgaaaatatcatgtttgctttttgttattgtttgaacaaaaacattaatggcaatttattattgtgaattatttatatttgttttttccatgatttcttcattatttgcatgtcatactcttcaaacttacctcatctgaggtggaatttaatcaagatattggtagaagtcatacatgtacctgaaacagttaaaaakataatgtgcatattatctgtattttgtcctctcacgcaactcgctaaacaattttttctctctcatgatttggcatataaacactaatgtttattatttggaagataaaaattaatgtctaaagaaatgttctaatagttctgaaaaagaagagaattttcacagagggtagattatttactgttctaagtgaagattacaaatgtcaaacatgaaaaagtcatatcagaagtcaaaacgcaacaaataagaagagaatctacagatgagaatttgcgttctaaaaacagaccattgagagacagagagcatcagtgagagcgagagagagagacagggagggaggtaagtgatagtaattcctagaaagggtaaaaagctaaaggaaaaataatgtcaattaaaataatcttgcaactgagttcaaaaaagacagaaaatttcttcaaaaataaatgtgaatatttgttcactttggacatctcattaatcaattaaaagtactttagaaattttatttacatgatttcttttttgtttgttttttattttttattttttattttatttttaattttattattattatactttaagttttagggtacatgtgcacaatgtgcaggttagttacacatgtatactatacatgtatttgcatgatttctatagtaacttcagaaattagaaaactccataatttcattttataaagtaccattaaaaatgtaataattgtgtaaatatatataaga

SEQ ID NO: 704254 - DNA, 1260 bp, Homo sapiens
tgcagaccctttcaataatttgccactctaccaatttatgaaataatagggataataataagagcttgagaaaaatcctattcacatacattgaaaggaacttgaaggtaagttttaactgcatgattccttgcattttctttttatagctttaaaaacattatcatttattcattttctacatatagaaattagggaatgttgtcatatttttttctagttcttactgatattacacatttgaaagagatttcacaccagcaaactaatcatagagcccccacatcatttacttcatttcaattttgaaaatatcatgtttgctttttgttattgtttgaacaaaaacattaatggcaatttattattgtgaattatttatatttgttttttccatgatttcttcattatttgcatgtcatactcttcaaacttacctcatctgaggtggaatttaatcaagatattggtagaagtcatacatgtacctgaaacagttaaaaagataatgtgcatattatctgtattttgtcctctcacgcaactcgctaaacaattttttctctctcatgatttggcatataaacactaatgtttattatttggaagataaaaattaatgtctaaagaaatgttctaayagttctgaaaaagaagagaattttcacagagggtagattatttactgttctaagtgaagattacaaatgtcaaacatgaaaaagtcatatcagaagtcaaaacgcaacaaataagaagagaatctacagatgagaatttgcgttctaaaaacagaccattgagagacagagagcatcagtgagagcgagagagagagacagggagggaggtaagtgatagtaattcctagaaagggtaaaaagctaaaggaaaaataatgtcaattaaaataatcttgcaactgagttcaaaaaagacagaaaatttcttcaaaaataaatgtgaatatttgttcactttggacatctcattaatcaattaaaagtactttagaaattttatttacatgatttcttttttgtttgttttttattttttattttttattttatttttaattttattattattatactttaagttttagggtacatgtgcacaatgtgcaggttagttacacatgtatactatacatgtatttgcatgatttctatagtaacttcagaaattagaaaactccataatttcattttataaagtaccattaaaaatgtaataattgtgtaaatatatataaga

SEQ ID NO: 704255 - DNA, 606 bp, Homo sapiens
cggacgggaggaagaaacaactccagatgcgctgccttaagagctgtaacactcaccttgaaggtttgcagcttcactcttgaagccaacgagaccacgaacccaccagaaggaagaaactccgaacatgatcagaaggaacaaactccagacacatcacctttaagaactgtaacgctcaccacgagggtctgcagcttcattcttgaagtaagtgaggccaagaacccaccaatttcggacacaatatgatccgtgatatagaaagattacgctatggcagtgaactaggagggggaggaatgggagttaggaggttggtgcagcatgtagatgaggaatgatgagccstaggacagagcagaggtaatgggtatacttggcaatgacagagactgtgtggagtgagagatcccttccaaagatgtttgcaagtagaatcaagacttggtgactagcttactcaccagttggtggggagtgaaggaggagaggtcagaatatctttgtggtttctggcttgggtggtaataagtagtcatatgggagcagttcctctgcagtgaatttaggacaggggttaatcacattgtcagtgctgacccc

SEQ ID NO: 704256 - DNA, 660 bp, Homo sapiens
atcacaacttcacttttgttgtgctcctgccaaaagattcataacctgcatctcatcactaggaaactcacatcaaaagacatcgtacgaaacaatgaaaaattatttaaatttaagaggcccacgctcttaaaaataatactgtcatgaaagataaaagaggaaaaaaaaggctggaaactgttcttgattacaggaaactaaaaaagacatggcaattaaatgtaagacgtgatcttgaattgaacccccgtcaattggcaaaatttagatatgtattgtataatggatacctgcattgaattagtgttaaatgtcatgaaattgatcgttttattatgattttataaaagaatacacttaggaaatgctcattgatgtattttggagtaaagaagtataatgcctgcaactatctctcaaatgactcctgaaataatacgaataggtgatagatagatagatagatagatagatagayagacagacagatagaaagatgggtatggaatggtaaagcaaatgtggcaaaaaaaattgataaatctgcttgaaaggtatataggagttgtcttgtgctgttcttacaagccttctatgacaaaattatttcaaaataagtagttaaaataaaaataatttagaattttagaacttcag

SEQ ID NO: 704257 - DNA, 903 bp, Homo sapiens
ttaggtctgtaactatgtaattgttcaacggctatttttaagacactatgaaatcaaagttaagttctaacgtcttcatttgttatgtgcctaacacctagcagtatgctagtttcccaamaataacttatttgaaagaatgaaagtaactcgcttaattgtcataacaatgatcattttataattgagggtactggagcttagagaaattaagtaacttcaccacagtaaaacaactaatgaaattccacctcagtctatcttgtttctaagtgcatctcttaaacactgtgttattccacactatttgggcaccaacagccatcacttcaaagtccacagatgctcaccaaccatcatactgaagacaaattagtgccacctcgatttcctcaatgcagttacctttgcctactaaagtccatggtctattaccaaatgcctatttcactctgcgtaacactggcataagaggagacgtacgacctttttttccctttaaaaccttaaagttttttacaaataactactaagcttattttcaacttaacaacttgtaaaaaaaacatgctttgattttatccacttctcttctatggattaatgagattataaaatctgttaacacttcagaagaaattgtattaaaccaacagaggaaattatctactttgggaacctggccagattaattgttaaaatcaaagatctaaaaatcatgctaacattgctagaaagtcctagaatggtgcttctgtatactctcattcctgatccctcatgtacagagaggaaaaaaacattattatgatcattatcttggggaatacttcctagattttagaaagtagaaccctttataacctttcataggtctttttattgtctacattcactcctcta

SEQ ID NO: 704258 - DNA, 903 bp, Homo sapiens
ttaggtctgtaactatgtaattgttcaacggctatttttaagacactatgaaatcaaagttaagttctaacgtcttcatttgttatgtgcctaacacctagcagtatgctagtttcccaaaaataacttatttgaaagaatgaaagtaactcgcttaattgtcataacaatgatcattttataattgagggtactggagcttagagaaattaagtaacttcaccacagtaaaacaactaatgaaattccacctcagtctatcttgtttctaagtgcatctcttaaacactgtgttattccacactatttgggcaccaacagccatcacttcaaagtccacagatgctcaccaaccatcatactgaagacaaattagtgccacctcgatttcctcaatgcagttacctttgcctactaaagtccatggtctattaccaaatgcctatttcactctgcgtaacactggcataagaggagacgtacgacctttttttccctttaaaaccttaaagttttttacaaataactactaagcttattttcaayttaacaacttgtaaaaaaaacatgctttgattttatccacttctcttctatggattaatgagattataaaatctgttaacacttcagaagaaattgtattaaaccaacagaggaaattatctactttgggaacctggccagattaattgttaaaatcaaagatctaaaaatcatgctaacattgctagaaagtcctagaatggtgcttctgtatactctcattcctgatccctcatgtacagagaggaaaaaaacattattatgatcattatcttggggaatacttcctagattttagaaagtagaaccctttataacctttcataggtctttttattgtctacattcactcctcta

SEQ ID NO: 704259 - DNA, 985 bp, Homo sapiens
ataaaatgtacaccttggctcaaagactttccctggaagtggaggyaaattgaattttgctgcttcaggctcttcaggataactctcatggaacctgagagtagatataataataaaactgactgacctctggtttttgccttagtactgtgtgtgtgtatgtgcatgtgtttatgaaaaatctctggttcacaaagttccaaatcttaattgttagctttgggtcatttccttcacttcagaaattcagtttccattgaatttaaaatgaggatttttaccttaggactgcctttcaccccagcttctctgtaatcaaagctgtccaacagaaaagtgtcatggaaacatccagtccaatatggtagccactaactctgtgtggctgttgagcacttgaaatgtggctaatgtgaatgaagaactgaattttagaattttatttaattttgatactttagcctttatgtgactagtggattgatctagccactgtacgctatgcactatactgtactgtgttgaacagcacagttctaaatgctgttcaccactcctgtccccttccatgtgcttggtgaactttaagtcaggaattataatacttgattagcaaaggctatactcagttaatgggcactatctttttatacatatgctcatttgtgatggggaaagtcttgtttgacatgtataacaatataataggaaggctagagtttctagaataaaatttggagtctgtattacttaatgacaatttctaaagttacaagtggtcaaatactttgaatttttctagtttataaagaaggaaagcttaccctagattgaggaaactatattggaattttgggactctcatttccattttggaatggaaagtattaaggattaaaagggtatgtaaaaaatttcagcaagggataggctggaagtatgtggcaactttctggaattgagataatagaatgattattaatta

SEQ ID NO: 704260 - DNA, 985 bp, Homo sapiens
ataaaatgtacaccttggctcaaagactttccctggaagtggaggcaaattgaattttgctgcttcaggctcttcaggataactctcatggaacctgagagtagatataataataaaactgactgacctctggtttttgccttagtactgtgtgtgtgtatgtgcatgtgtttatgaaaaatctctggttcacaaagttccaaatcttaattgttagctttgggtcatttccttcacttcagaaattcagtttccattgaatttaaaatgaggatttttaccttaggactgcctttcaccccagcttctctgtaatcaaagctgtccaacagaawagtgtcatggaaacatccagtccaatatggtagccactaactctgtgtggctgttgagcacttgaaatgtggctaatgtgaatgaagaactgaattttagaattttatttaattttgatactttagcctttatgtgactagtggattgatctagccactgtacgctatgcactatactgtactgtgttgaacagcacagttctaaatgctgttcaccactcctgtccccttccatgtgcttggtgaactttaagtcaggaattataatacttgattagcaaaggctatactcagttaatgggcactatctttttatacatatgctcatttgtgatggggaaagtcttgtttgacatgtataacaatataataggaaggctagagtttctagaataaaatttggagtctgtattacttaatgacaatttctaaagttacaagtggtcaaatactttgaatttttctagtttataaagaaggaaagcttaccctagattgaggaaactatattggaattttgggactctcatttccattttggaatggaaagtattaaggattaaaagggtatgtaaaaaatttcagcaagggataggctggaagtatgtggcaactttctggaattgagataatagaatgattattaatta

SEQ ID NO: 704261 - DNA, 985 bp, Homo sapiens
ataaaatgtacaccttggctcaaagactttccctggaagtggaggcaaattgaattttgctgcttcaggctcttcaggataactctcatggaacctgagagtagatataataataaaactgactgacctctggtttttgccttagtactgtgtgtgtgtatgtgcatgtgtttatgaaaaatctctggttcacaaagttccaaatcttaattgttagctttgggtcatttccttcacttcagaaattcagtttccattgaatttaaaatgaggatttttaccttaggactgcctttcaccccagcttctctgtaatcaaagctgtccaacagaaaagtgtcatggaaacatccagtccaatatggtagccactaactctgtgtggctgttgagcacttgaaatgtggctaatgtgaatgaagaactgaattttagaattttatttaattttgatactttagcctttatgtgactagtggattgatctagccactgtacgctatgcactatactgtactgtgttgaacagcacagttctaaatgctgttcaccactcctgtccccttccatgtgcttggtgaactttaagtcaggaattataatacttgattagcaaaggctatactcagttaatgggcactatctttttatacatatgctcatttgtgatggggaaagtcttgtttgacatgtataacaatataataggaaggctagagtttctagaataaaatttggagtctgtattacttaatgacaatttctaaagttacaagtgstcaaatactttgaatttttctagtttataaagaaggaaagcttaccctagattgaggaaactatattggaattttgggactctcatttccattttggaatggaaagtattaaggattaaaagggtatgtaaaaaatttcagcaagggataggctggaagtatgtggcaactttctggaattgagataatagaatgattattaatta

SEQ ID NO: 704262 - DNA, 644 bp, Homo sapiens
ttctttcatcatttgctttattttcagtttgacagtgcggagtgccaaaaaagtgagttttagattttgaaaagaaggttattttcagagattattatttgtggaggcagtttgaagcttcataaaaatatttggggcatatgtagagtgagtgctcccagtacaatttgatatggtaggaaaattgaaacaacttaatatccaaggtcctaggcaagagttttattttaatcacttgataatagccaattcataacagcataaggatatttwaaaattcacagaactgttctaaaattaatttttctatttggggattcctgccccagcagggcagtataattttgaatttgctttcatgtattttattatttatttatttatgtatttatttatatttttagagacacaatctcactctgttcccaggctggagtgcagtggcataatcatagttcactgcagcgtcaaacccgtaggctcaagaatcctactgcctcagcctcccaagtagcatgtgccaacatacctggctaattaaaaaaaaaaaaatcgtagaggtggcatttaactatgttgcataggctagtgtgaagttctggtctcaagcagtcttcccaccttggccttccaaattgctggat

SEQ ID NO: 704263 - DNA, 644 bp, Homo sapiens
ttctttcatcatttgctttattttcagtttgacagtgcggagtgccaaaaaagtgagttttagattttgaaaagaaggttattttcagagattattatttgtggaggcagtttgaagcttcataaaaatatttggggcatatgtagagtgagtgctcccagtacaatttgatatggtaggaaaattgaaacaacttaatatccaaggtcctaggcaagagttttattttaatcacttgataatagccaattcataacagcataaggatatttaaaaattcacagaactgttctaaaattaatttttctatttggggattcctgccccagcagggcagtataattttgaatttgctttcatgtattttattatttatttatttatgtatttatttatatttttagagacacartctcactctgttcccaggctggagtgcagtggcataatcatagttcactgcagcgtcaaacccgtaggctcaagaatcctactgcctcagcctcccaagtagcatgtgccaacatacctggctaattaaaaaaaaaaaaatcgtagaggtggcatttaactatgttgcataggctagtgtgaagttctggtctcaagcagtcttcccaccttggccttccaaattgctggat

SEQ ID NO: 704264 - DNA, 615 bp, Homo sapiens
catttcatcaattatatcaatgctgcctgtcttgtatcataaaattttctgtgtgccaaagcttgcctctctactgagaggacaaacttctagagaacagggttgtagcttttggttgctttgtttccttaacaaagcttagcatgatgccaagagaagagtaagtgatcaataagtacctaatgaattgaattaaatcttcatggaatgaagtccatctcattgttaacagaaagcaaacaactttaggatctgcctcagtacaaatacagtttatcctctggtttctgtcttgagcaccttacgtatatattgtaggtgtttgataagtgtttgttgagtgaatgactgatctagtatccttaacctttttatcaatgacttggatgaagacacagaaggcaggtttatttggtttacagatgacacaaacctggcagggaaggctggtgtggcagtggatactcycgatgttcaaaaagattttgacaagctagcagaaccgcgcaaagacagcaagatgaaatctaaccattgtctcccaaaattcaattgtaattgtatgaaatagtgcctgttttgagggaattccacatggggttatagtgggcaata

SEQ ID NO: 704265 - DNA, 657 bp, Homo sapiens
tctttttatccttataagatgtgtattattatctgacctttacaaataagagaaggaaataaaaggcagagagggtgagtaactttccctaaatccaagactactgctggcagagccaggagccaggctctggctgcctaagtccagagtgacaagcttttcaccccagagccatgagctcaggctctacgagaatttgtggaaaataaggcttcatccctctgttttaagtcagctacgtagtacagggtgtgggactccaaaaacattcgtcagccttgactgcgctgtcccctcacacagctgattccgcttgtaggtgaggcatgtggaatgaggaaagcttttgctcttcagcgatgtggggccctagaagcttgtcatggcttctgtggagccgggccttcaggaaggtgaacctcaatccaggtggggctgaacatccactcagttgctcttcctaggktataaggaggaccagctcaggaaggaggtggcctttgaggctctgaatctcatgggaccagcccatgcaatgaagacagcccagctcctgccaagcttctgttcaggcttagtgaggctccctagcagcagttcgggagacatcgcacctgatggatgtgcagcaccctgctgggccctgaccactctgtg

SEQ ID NO: 704266 - DNA, 645 bp, Homo sapiens
tgtctcagcactattgccattgtaagccatatgattatttgttctgtgtgtgtgtctgggggtgagggggctgccctgcacattgtagggtgtttagcagcatccctggctctacccacttgatgccaattgtgattgcacttgtaacaatcaagtatatctctagacatctagaatctctcctagttggggatcacaggggcatagtgatacaaatcactgaaatagcaactacgtggaactgagcaagtttgggggaaatggttgagtttgacaggaaacaggatgaagagggcctaggaagarctggggaagaaaaggatgcagccaggtgcaaaaggaaggtgtgctggagatcaacaggccaggcggccagtctagaaactcctcttaaccagctggcccaggcacacttgactttgctgggcttcagtttcttcatgaataaaatgagaagttggcctagatgaattgtaaggccctgctgccctgtgatcctttccccacttgtttaataccattgaccagttctaaaagaattccgtctccattgattcctccaaagggaaagaaagcaggagagagaggaacacatttgtggggagtctgcaaagcagttacggttaatattaccctgatttgaga

SEQ ID NO: 704267 - DNA, 645 bp, Homo sapiens
tgtctcagcactattgccattgtaagccatatgattatttgttctgtgtgtgtgtctgggggtgagggggctgccctgcacattgtagggtgtttagcagcatccctggctctacccacttgatgccaattgtgattgcacttgtaacaatcaagtatatctctagacatctagaatctctcctagttggggatcacaggggcatagtgatacaaatcactgaaatagcaactacgtggaactgagcaagtttgggggaaatggttgagtttgacaggaaacaggatgaagagggcctaggaagaactggggaagaaaaggatgcagccaggtgcaaaaggaaggtgtgctggagatcaacaggccaggcggccagtctagaaactcctcttaaccagctggcccaggcacacttgactttgytgggcttcagtttcttcatgaataaaatgagaagttggcctagatgaattgtaaggccctgctgccctgtgatcctttccccacttgtttaataccattgaccagttctaaaagaattccgtctccattgattcctccaaagggaaagaaagcaggagagagaggaacacatttgtggggagtctgcaaagcagttacggttaatattaccctgatttgaga

SEQ ID NO: 704268 - DNA, 645 bp, Homo sapiens
tgtctcagcactattgccattgtaagccatatgattatttgttctgtgtgtgtgtctgggggtgagggggctgccctgcacattgtagggtgtttagcagcatccctggctctacccacttgatgccaattgtgattgcacttgtaacaatcaagtatatctctagacatctagaatctctcctagttggggatcacaggggcatagtgatacaaatcactgaaatagcaactacgtggaactgagcaagtttgggggaaatggttgagtttgacaggaaacaggatgaagagggcctaggaagaactggggaagaaaaggatgcagccaggtgcaaaaggaaggtgtgctggagatcaacaggccaggcggccagtctagaaactcctcttaaccagctggcccaggcacacttgactttgctgggcttcagtttcttcatgaataaaatgagaagttggcctagatgaattgtaaggccctgctgccctgtgatcctttccccacttgtttaataccattgaccagttctaaaagaattccgtctycattgattcctccaaagggaaagaaagcaggagagagaggaacacatttgtggggagtctgcaaagcagttacggttaatattaccctgatttgaga

SEQ ID NO: 704269 - DNA, 1644 bp, Homo sapiens
tccttttagagttaagccagatggtcagactgctgtgggcttccacaggatgtatcggcccttggcgtgtgaggtcagtggcctgtgtagatgaagtctgtgacagcccgtcctgggggtttgttctcggccttattcatgttcttctactgtgacatccttatgagaaccgttgggagaaatttttgattttggtgtcagaatttcacccgaataatttgtttgctttcatcttttgaaccctgaattacataactgttttcatcctagtgatggttgctaaaaaatttagttagagacagatgtatgggctgactcttgactaatttagacatcttccaggaaaacatttctgtcttgtcatctgtggctctgctttaggtctctctccatgtttaatttttttttttttttttttttttttacttattattgttaaaaaaattttttaatttctttctttctctttctttcctttctctcctttctctcccctttctttctttcctcttctcttttcttttctttcttgagatggggtctcactatgttgcccaggctggcctcaaactcctaggctcaatcgatcctctagcctcaacctcccagagcactgggattacagttatttgttattctttttattttctagtctcttgtgctgaactgcatttatcttttaaatagcctttaaatattctttggcagaaagtgagaaacaaatacatatattacacctataaaatcagtaaaaccaaataaaaattatcaagcccaatgttgtaagggccatagggaagtaagtgcatacacgtggttaatgacagtgtgcactgagtttctgaggagtgtggctagcaatagatacttagtgctataacattgtttattcatattaagcggttaatgccacttttggaaatgtatgacagagaaccgaaaagaagatagtccttacaaaattatttatacctacagtgcacaacagtgaaagagggggagcaactcaaatgcacagtggtagaggagagtcgaagaagtcagttaatataatgcagtgttataaagccaccagaaatgattcagtggattagataaatagaaatgtacataaaatatgtaaattatcaaaacatgcattaaatctatttaagaatacgtagatttagcaaaaagaatgagatggtcatggtgagaccgctaggtgggaaggggtccccggaaaaactccagccagcctgcccaccggggtggagttttgggaagtttgcaccatttgtagcagggaggagcctggcccctcttctttctgtgtggagcccaggattctagctgctggcaggaagcactctagcagggactctggccttgtgagtgtctcggattcccccttttcttccttttcacctaataaaaccctgtcttacccaccattcaaaccgcctgcgagcctaaatttttgtggctgtgagacggacaaggatcccgtctttrgctgaactaaggaaaagtccggcaacaatggatattggaaataatattaatggataggttttactctcctgcaggattaatataacctgtgagtacttttaggcttactaccagtacaaggaatggcttttggaaagttcttagaatgta

SEQ ID NO: 704270 - DNA, 2376 bp, Homo sapiens
actgcactccagcctgggcgacagagcaagacttcgtctcaaaaaaaaaataaaacatacttttaaaaaaattattttttcgttttggaaatcattgggatatggggaacttaatttccttataaacattagagagcatagttcaaaatcaggaggcttagaatgtggtcaaagaccaagtggtagttcatactttctgaaagcacttactgcctgttacaacatccttatgtctcttgtgtaaatgtcccattttcctttcagtgtgtttatttgaagaggggaaagaattgtctgcccagccggtgggatagtgtagtgcatgtttcccttgtctcttcattgtatgctttgttgtgtttatcatgctattaatactttggatgcgttctttcactttgatcagtatgactcaccaacgaaatggtgggtaaataattgtgagtctccacataaacacattaacctttgcttttttctcaagtaaaatgggatttggaaaggttgtctgacatttataagtcatttaacatgtcagtgcttctattgattgttattctatttgttgactagttttataaactccagcagtctttgagaagcctagtggtgccatttcagtgttcatgattgaatatatagatcaaagygtgatagattttggcaaagaaaatactaatagaacaacttttatttcagtaggaatatcttttagataatgtagttttgtctactcatacttcctacttgtaaaacagatttagtttactttaaggaaagttgtccaaccattcaaacataaaattatttaaattcaagtttaactttgatgaaacataatttaaataaccttaggtaagatacttaaagtaattccatgcatggatcttttatgtcatgaaacttactatgtttaattttcccagcagaaattcaggaagcaaaagctcccagtccttccataaaccggcaaaccagcattgaaacggatagagtgtctaaggagttcatagaatttctcaagaccttccacaagacaggccaagaaatctataaacagaccaagctgtttttggaaggaatgcattacaaaagggtaggttgagaataaccacgtagaaacatagagttttggtttgaggaaaggtcttagagataatatagtgcaaccttgtcattttatgcctgagaaaaatccagaccaagagatgttaaattacttacctaagaaaagcctctgaatcaagctaaaacccaactcttaggctagtacttttccactgcaactcagtggtgtttggatcatctttgtgtggaaattctgacctgaagccacttgaattatgtgctttagtaacaggcctttttgacttgtgaccttgtaaatagtataaactgcgatagtagacctttaactctgtgcaaccattgttaggccagtggcagtaattttaagggttgttgttgttgaattctgttttgttttttgtattttgattttgaattttttcattcagttagagaaaggacagatagaatttagacaatgaaagggactttagcaactatggagtttcagtccctttattttatagatgaggaagttgagagccaaagaggataagtgacttgtccaaggttacacagctagattttgccaatgtcaaccagaacttgtgatttccacacctgtttcttttacccataatttcagtggcaataattaataagactgcctgtaaaggaattcattttgtaaatagggattaattctgttgtaacattctataaccattaaactcagaattagctctgaaagttccttctatgcagtaaggaagtcttagaaagaaaaaggaaattagaaaagcagcagggtgtttaactgtttagctatattctagctggggtcagcaatcactaggctaataagcagtggacttgtgtcaaaataatttttagatattgaattcagtttgtaaaggagaaaagcttgctttctcgcccttcagaaatgtaattagactgtgtaagtaagtagctgtctttctctaggtattttttctctctagagtaaaacatttagagtcaaaacaagtgagctgttattgttttttttttaagttaggaaacatgatagatatccttaatatggaacaattcagagttcatatgacaccatctttcatttttatcagaactaaaaactgaggttttgtatttatttttttcttgagcccacatgaaatgttcacgggatagctatattaagttagtgtatgtatactgtagtacatatagcatgtatgctgtataatatgttttagaaaattgctcaactcagatttggtatttttcttttgctcagaagtgtga

SEQ ID NO: 704271 - DNA, 1395 bp, Homo sapiens
gaaaaatcatagaatagatagaaccactggcttgtgcaacttcacttccaattctccttctgtactccttgttgaggccctcattcaccagcctagaaagtacacaccaagccctggtaaaaggtaaagaaggatggatgagactacatattaaaatggggagtttacagtttctggttagaacacactgaattcgtttgttaattctaacaattagcaaatatgtgtaacacatgctccagacactgttctaggtgttgtgcatagtaacaatgaaaaaaagtatctgctcgtatagtgatttcattttgataggggagataacacaaaagtaaatacttggaacacctcagatattgaagwgttctatgaagaaaatgaggtatgtgttagactgagaatgatggatgcagtccattagagagaatggtcagggaaggcctccttggagaggtgataacttgagctgaaacctaagccatgagagagatccagccatgcaattacctgaagaaaaagctgtttgtaaacagcaatggcaatggtcctggtcctggggcaaggatgtaagatagtttaagtgtgaaatattctttgcataggagaatgaggctaccattaatcagttctgagcaattaccaaaaaaaatagaatggtgaatggctcagaagtcattttaggttgaatgattaggaaaactggttaagcagacacctaagagatgaggagccagcctgaggggatccaaggaaacaccatccccggcgtaggaactcgggagtattaaagctctaaggtacagaagaacttggtgtgttcaaggaacacaaagcaggtccgtgtagggagaatgcagagggcaacaaggagtaagtataaatggaattttaaaatgacattactagatcagtaaatgtaaggaaataatcacaggagagaaatggcagattttcaaaaagaagacaaagctcattctggtgaacctggtaatgatcttgggcaaaattctaaaaaaggaaactataactagattggaaacattgatcactatgattgagcatgactggttactagacaaatcatgttggagtagcctcatttggctactatgactaacttagcaactcaggaaaatgcaaaagatagcatacctaggcttcagtagaggatctggaaaggtttttcatgacatccttgtgaacaagataaagaaatacaaagtaccaagaaggtctgatgaacagaatgagataaacctaaaagggcctggccagaagtatgattcagatgtctgttctcagagagttcagtcttattaaaaattttcatcaattatttgaaaaagaaataaaggatataattatcaaaacaggtgaaatgaagctagaaacacc

SEQ ID NO: 704272 - DNA, 590 bp, Homo sapiens
tgggaggctgaggcaggagaatcgcttgaacccaggaggcagagggtgcagtgagccaagattgtgccactgcactcctgcctgggcaacagagcaagactctgtctcaaaataaagaaattaaataaataaataaataagtgcttctttaaaaagcgtttctaagatagtcttcaattacctgaaggttaaaaaagagttcatccaaacctcttagtagttacctcctcatccaaatatttctaagtatttataaaaactgaaaaatcaacctaaattgtattttctctcccttttcctctgcatgttataaatgactgaaaattaacagaggcatagaaaccgggaactattacctgtcccacagtaatcaaagactgacaatcattaataagcgattacaaatggaaaagcaatactgaatacatataacaaatctatcataacattattttctataaaacaaaataaggaatttccttgtataatttttaaggtgcccactctgatttattcacacaagccacaaaaattcagcaaatgctasgtgtgacagtaatcctctcaattccatgaacactatcccactg

SEQ ID NO: 704273 - DNA, 608 bp, Homo sapiens
ctttgggaagaaatcataaagatatgaacaagaaaacagtagtagtgatagggaggttagaaaagttcaataaataattaggagataaagtcagtatagtgattaatattattacacattataagaagtacatgctgtcactgccaccgaaagtgaatggctcctactaaaaccactgatgctaattgtttgagataccaccataccccctgcaagattaatacttcattctctttcattcctgagtcactaacttcagatttaaagccttatactagcacatctgattggccaaggcaaggtcatatatctattttcgagctgcttaggaacattgccccaggaaagcaagttatttggtattatgagcttctgtttggargaaaacgagctcaccattttgggagagggattagatctcagggagaaaatacaaatgtgaattatacccatgccagggctttttgaacataaaggtaattttttcaatcaattcctattcagcagattttccagtattttaccctgttttaacctctttatctttcttcaccttaaatatctcccaacattttagttatcccccaagatttaaaccagttacagat

SEQ ID NO: 704274 - DNA, 651 bp, Homo sapiens
atcctgtgcccttggtcatcagaccatgctgcaccacagcagggaggcacaagggaccagattctctttcctctgcacggtgtattatttcccttgatttccaagtgagcttctgagagaaagttgcctgataaacagagacagaaatttacaacaggacatacagtgtaacttcatcaatttggatacaaatctgtgaaatatcaggcagcaaaacaaaggcagaattacctttgatggacaaaccatgtttcattcrtattagtcccccgactgtgccttgctatccacattgatggcgtcattcccgtgcccattcgtctcttccttccagctctttggcagtctaggtctaacctcccctgcctttgctgatgcaaatctttataactctagctcaaattccactttctgtaggaagacttccctcttccaccttcccattattcttgtcctgccttcttaagttacttttgttttaaacctgtattgcctaaagccttatttggcccttgatactattccttattactagcattgttccccaggcagttcaactaccttaagtccttccttccccaataagcctactaaccccttgggggcaggatctgactgcataactcacagaatttctaacaagaaactgca

SEQ ID NO: 704275 - DNA, 567 bp, Homo sapiens
acatatgttgcagttaggattttctttaaaacagaaaataatctatagtctagtctattcaccstaccaatctactaaacacctaatggttttcccttcatgcagcccactgatgctttggcgtacccttaggttacttcccaaaatgtaagaaagccttctcaaaaaatttcaggaacacgttattacccatagaacaaaatccaaattctgaatgtggagtcgttccgtgagtatacagtttcagttttgcagtctgaaaaagttcgagatctactgcacaacaggatgtatagagttagcactactatgctgcacacttaaaaatggttcggatggtcaattttatgtcatgtgtttttaccagaaggaaaaataaaatctaaataccaagcctagcattggaggggaattgtgatctggcccctcaactatctttctggcctcatcttttgcctatccattcaacaaatcttaagtacctattataggcccaaaacatataaagcacagcaatgaacaagacaggcacaaccccatatgtagaatttaaaataaactattgct

SEQ ID NO: 704276 - DNA, 602 bp, Homo sapiens
tctatcatacttgttttaaatgttttttataccaatttatttatttatttgttttgttttgtttttcttgccaacatggtgaaatcccatctctactaaaaatacaaaaaattagccaggcatggtggwaggcacctgtaatcccagctacttgggaggctgaggacctgggaaggggaggttgcagtgagcggagatcatgccactgcactccagcctgggggacagagtgagactctgtctcaaaaaaaaaaaaaaaatgccttgtccttgttggtacccatacccataccaggtaaacctatatttggtcacttgataatcacctgactttgcatgccttcttaaatgtcccatatcttgtcattctgaatagcattcaaaattatgttcatcagacgtaaatagatattttactaattagcatgatcccttacttcttatgtataagtgattgacagataatagctgactacctgccaatttggtttttgtactccattgagtataatacccctcctcaaggtaggaaatgttaagaattttttttctcatttactgctgtctgctgaactagacagctatctctaaaaggtacacaa

SEQ ID NO: 704277 - DNA, 1829 bp, Homo sapiens
atataacagcaatataaagtcctcaacattaagtttctagggatactttactaattttttaaagagttgaacatctagtatacctgttttaaacattttaatgtctataaatattacagcatcatgtttggaatttggaagtttttgatgcatatttatctatgtgagaaagtttacctttgagcctgttttaaggcaggctagtctaccttccaagtaatggtgagcctgcctttcatacaggctgtgtccttctccttatactcttcacattcttaggaggttattagtcctgggactcagtttacctgttatcaaagcatattagctctgcatttaactaacaaaataaaatagcttaattccaggtacttgtcatgaagcacaatctagaacctaccattcaaagcctttctaagagaaataatgtttgtgcaagattatctgaagaatatgtggtctccccatttgtctatactttaaatctatctcaggattaactcagtccctctgagagttacatacctggattccatcatattgccaagggaggaatttcttatctcaggaatagaaataatgtgtttttccaggccatctggtttgtttttacattatggtcatttttgtctcctgtaattgttcgtgtttctttctttatgttgcctgctagaaagcttagcagcaaatacatggctcagcatatatagatttgttaaaacaagtatttgaaatttcatggcatagtttttatgtgatatctccctttaaattttgcattgcctcacttctcttttgtatcttgctgcatatatatcactgtaagctctatgaattattttctgagcaaaggcttgcaaaatgcaaacacataaaagaaataggtataatttttccccatccatttttaataaactaaaggttttttttaaaaaaaaaaaaaagctcaatatccctatgtgtgtgatactataattagtttagcatatctgtatgttgtgaattcctagattttagatgaaaagtgacctaaggttgaaatgttaattaaatgttttaatgttctgtagttctaaagaaaatagttggataaaatgtcagtatataggagtattttaaacattttttaaaaatcatctctctgtaaaggaaggtaattgtacaagtttgtctaatccttttgatcttggcacacagcaatacagacttcagttgagattaaaactatgaatttcaaaggaaacatggccttcagtgtataaaatatataacagctggttgactagtccatttaaaactacacaataacaatcgtagacagaatgattctcctgccaaaagatgcacgagtgcttgatagttatatcaagatacgatactaactcacacttttctttagtaatgatataaatgtagaaatgaactgtgtactgctggctcaaaatatctcttctgcccaacagttcaagggcagtttagaagtatagaaccccttttagtgatttctctatctgcttttcaggctgaacttcagtatgttgttgactaaatttcattttttaaaactgtctgatacaatttttattcttagcatcccacagttttttccctaaatctttgatcctccatttttactttcttgggcttcatgacttattgatcttaatgtcacaatttcacacatatttttaagctctcaaaattaaacttttctttgtaaataggatraagcttgtttcacattatatatatatgtatattaaggtaaatagctgaactctgaagcattgtgttttatatataatcaatgtggaggaaattgatgctca

SEQ ID NO: 704278 - DNA, 1385 bp, Homo sapiens
gacagcattcatcatcatagcagatggatttaacactaccaactctagaaggacatctaaggcagtatcaacttcagcttcattcccactgcagatgtgggtcactaaggcaccaaccacttcctatacaggggagagtcaacaggacagtgtaaaacaaaatatggatggccattctaaagggattcacccccaaggcctctccaatctcttctttgttaaaatcacaatcaacccaatcccatcatctattatctagttttcattaatgctggcttcaggagatttaggaatatgccagtgtaacttgaccatcccgtcttgacctatttcccacaktttatcagtgagctctacctaagccctcctgattttgctccttggcgtagttttcctctttctttttcccatatgggttaaattttaccctttaggttgaggttgtacaagatcagttgaaattcctcaaaaagatggcactcaaggagctaaaagctttaaaggttttctccatatagtacaggctagacttgcatgtttccaagcaaacatggatcatgacagtgtctctaagacattaagaggattcaaaaatgtcttagatgccattctccctttatactgtcactccaccatagccataacagaattatattctcaactgcaacagctacctcatgtcagccgcaactattgctctactttaaattaaaaaaaaaaatttttacaaatcttcattttaaaagttccattcaaatgcgttttaacattgttaataagaggaagaatatatgtaaaaatacaaaataagacactgttctttacctgctttcataaacattttccacaaatacagtcctccctctctggatatatgctattaaaatgtgtctcagccaggcccgatggctcacgcctataatcccagcactttgggaggctgaagtccaggtcaaaaacctattgtcaataaatatgcaataatagaaaaacagttaaccaatcagtacatttgctacaatgaaacagcagcttttcccgattaaaacacagaatggatgatactcattcgttccacatactcccttaggcttatctacacttttcacaaaacccagaaatttttttcagagaaataaagtgccacaactattagccactggtatctcttaagaatacattgcaatatacatgaaagtgatactactacagaagtaactttgaacatcttcacatttattaaaagattcaatcacttgccaactccagtatgtattttcactattactaggaaaattactttgtgaaaagttggaaagactataaatgcccatcaatctggaaagggttcagtaaattatgatggagtaattttaatttttgaa

SEQ ID NO: 704279 - DNA, 2113 bp, Homo sapiens
ggcagtgaagggcagaccagagttcagccctaagtctttgccttaagatcacacgttaatgtgcactgaggaattataatgtccattcccacagtccctgagtgttgctaaggcatttcattgccagtatgtatttgcctctctaggtcttggaatcttgacattttaaggtagtaggctacagaatgaacccaaaataactgatggaatgagttactattttatcaaaagcattggctggagaattcacccaactggccttagcaatctggcctcctagacaactgcagaaataaataaaaccaaataagaaaatgagaataacaactgctactatttactgagctgcatatgctaagcaccatgataaacagtatayatatatacctaaaatcctaaatatatatacctaaaatcctaaatatatataccgaaaatcctaaatatatataccgaaaatcctaaatatatataccgaaaatcctaaatatatacagaaaatcctaaatatataccgaaaatcctaaatatatataccgaaaatcctaaatatatataccgaaaatcctaaatatataccgaaaatcctaaatatatataccgaaaatcctaaatatatataccgaaaatcctaaatagataccgaaaatcctaaatagataccgaaaatcctaaatatagataccgaaaatcctaaatatagataccgaaaatcctaaatatagataccgaaagtcctaaatatagataccgaaagtcctaaatatagataccgaaagtcctaaatatagataccgaaagtcctaaatatagataccgaaagtcctaaatatataccgaaagtcctaaatatatataccgaaaatcctaaacatatataccgaaaatcctaaacatatataccgaaaatcctaaacatatataccgaaaatcctaaacatatataccgaaaatcctaaatatatataccgaaagtcctaaatatataccgaaagtgctaaatatatataccgaaagtcctaaatatatataccgaaagtcctaaatatatataccgaaagtcctaaatacatataccgaaagtcctaaatacatataccgaaagtcctaaatacctaaatatatataccgaaagtcctaaatatatataccgaaagtcctaaatatatataccgaaagtcctaaatatatataccgaaagtcctaaatatatataccgaaagtcctaaatatatataccgaaagtcctaaatatatataccgaaagtcctaaatatatataccgaaagtcctaaatatatataccgaaagtcctaaatatatataccgaaagtcctaaatatatataccgaaagtcctaaatatatataccgaaagtcctaaatatatataccgaaagtcctaaatatatataccgaaagtcctaaatatatataccgaaagtcctaaatatatataccgaaagtcctaaatatatataccgaaaatcctaaatatatataccgaaccgaaagtcctaaatatatataccgaaaatcctaaatatatataccgaaaatcctaaatatatataccgaaagtcctaaatatatataccgaaaatcctaaatatataccgaaaatcctaaatatatataccgaaaatcctaaatatatataccgaaaatcctaaatatataccgaaaatcctaaatatatataccgaaaatcctaaatatatataccgaaaatcctaaatatataccgaaaatcctaaatatatacaccgaaaatcctaaatatatacaccgaaaatcctaaatatatacaccgaaaatcctaaatatatacaccgaaaatcctaaatatatacaccgaaaatcctaaatatatacaccgaaaatcctaaatatatacaccgaaaatcctaaatatatacaccgaaaatcctaaatatatacaccgaaaatcctaaatatatataccgaaaatcctaaatatatatacctaaaatcctaaatatataccgaaaatccaaacaccattcctttgcatttctttagtgaaaagaaaattttcattctttgagagagtgatttttcacaagaccccgaagtcattttggtatagaggc

SEQ ID NO: 704280 - DNA, 829 bp, Homo sapiens
tatgcatattctcttaagatatgacacactactcctsttgcgtgtatgtgtatatacatatacatacatacatacatagcagaatacctgtgatcagatttctgttttactgtccctaattaatttgattacagcagggagggataattctctgattagaatctcacaaaccattacctctgtgggaaatttgacaaggttccaggtttgccactcaaaaccacaaaccacttttgaccataatgacccattggtacatcctgtgctaaatttcacctgtattcctcctgattgcactcacgatgcaactcagggtcatatcaagcaaaacctgtttatctaatctgtctgactcaccctaaccttcctgccgcacgtctcagtttaacccatcataatcgtattgtcaaaataactgcctgtaatcccagcactttgggaggccaaggcagaaggatcacttgagcacaggggtttgagactagcctgggcaaaatggtgaaacactgactctataaaatatatacaaattagctgggtgtggtggtgcccacctgtagtcccagctactcaggagcatgaggtgagaggatgacttgagctaaggagttcaagcctgcagcgaaccctgatgacgccactgcactccagcctgggcaacagagtgagaccctgtctcaaaaaataaataaataagctgcgtgtggtggtgtgtgcctgtaggcccagctgcttgggaggatgagccattgagccttggaggtcaagaggtcaaggctgtactgagctgtgatcttgtcactgaattccagcctgggagacagagtcc

SEQ ID NO: 704281 - DNA, 617 bp, Homo sapiens
attagacttatgacctgggcagtcaggcaagctgataagaatagatgtagcgaactattttgcaggctagtaaatgtccattctagactaaactctttggtttggacaaggcagctaaggtgggggagtgggggtgggcaacaagcaggcaccagctattaaagcagtggcctagtatattctgttcttccatagtttgcgggcccaagcctaacttcctacaataataattatatacaaaagtttttaaaagggataaaagaaaagaggggatgtctcaaatgaatacacttaagctcccccctcaagaaacaagaaaaaagcaggtaaaagaaacctaaagcaggccaggcacggtggctcacgccggtaatacgagcactttgggaggccaaggtgggtggatcacctgaggtgaggagtttgaaacgarcctggccaacaaggcaaaaccccgtctctaccaaaaatacaaaaaaattagctgggcatggtagcacccgcctgtaatcccagctattctggaggctgaggaaggagaatcgcttgaacccgggagttggaggttgcagtgagctgagatcgcaccactgcactccggcctgcgccatgggaat

SEQ ID NO: 704282 - DNA, 617 bp, Homo sapiens
attagacttatgacctgggcagtcaggcaagctgataagaatagatgtagcgaactattttgcaggctagtaaatgtccattctagactaaactctttggtttggacaaggcagctaaggtgggggagtgggggtgggcaacaagcaggcaccagctattaaagcagtggcctagtatattctgttcttccatagtttgcgggcccaagcctaacttcctacaataataattatatacaaaagtttttaaaagggataaaagaaaagaggggatgtctcaaatgaatacacttaagctcccccctcaagaaacaagaaaaaagcaggtaaaagaaacctaaagcaggccaggcacggtggctcacgccggtaatacgagcactttgggaggccaaggtgggtggatcacctgaggtgaggagtttgaaacgaacctggccaacaaggcaaaaccccgtctctaccaaaaatacaaaaaaattagctgggcatggtagcasccgcctgtaatcccagctattctggaggctgaggaaggagaatcgcttgaacccgggagttggaggttgcagtgagctgagatcgcaccactgcactccggcctgcgccatgggaat

SEQ ID NO: 704283 - DNA, 617 bp, Homo sapiens
attagacttatgacctgggcagtcaggcaagctgataagaatagatgtagcgaactattttgcaggctagtaaatgtccattctagactaaactctttggtttggacaaggcagctaaggtgggggagtgggggtgggcaacaagcaggcaccagctattaaagcagtggcctagtatattctgttcttccatagtttgcgggcccaagcctaacttcctacaataataattatatacaaaagtttttaaaagggataaaagaaaagaggggatgtctcaaatgaatacacttaagctcccccctcaagaaacaagaaaaaagcaggtaaaagaaacctaaagcaggccaggcacggtggctcacgccggtaatacgagcactttgggaggccaaggtgggtggatcacctgaggtgaggagtttgaaacgaacctggccaacaaggcaaaaccccgtctctaccaaaaatacaaaaaaattagctgggcatggtagcacccgcctgtaatcccagctattctggaggctgaggaaggagaatcgcttgaacccgggagktggaggttgcagtgagctgagatcgcaccactgcactccggcctgcgccatgggaat

SEQ ID NO: 704284 - DNA, 617 bp, Homo sapiens
attagacttatgacctgggcagtcaggcaagctgataagaatagatgtagcgaactattttgcaggctagtaaatgtccattctagactaaactctttggtttggacaaggcagctaaggtgggggagtgggggtgggcaacaagcaggcaccagctattaaagcagtggcctagtatattctgttcttccatagtttgcgggcccaagcctaacttcctacaataataattatatacaaaagtttttaaaagggataaaagaaaagaggggatgtctcaaatgaatacacttaagctcccccctcaagaaacaagaaaaaagcaggtaaaagaaacctaaagcaggccaggcacggtggctcacgccggtaatacgagcactttgggaggccaaggtgggtggatcacctgaggtgaggagtttgaaacgaacctggccaacaaggcaaaaccccgtctctaccaaaaatacaaaaaaattagctgggcatggtagcacccgcctgtaatcccagctattctggaggctgaggaaggagaatcgcttgaacccgggagttggaggttgcagtgagctgagatcgcaccactgcactccggcctgcrccatgggaat

SEQ ID NO: 704285 - DNA, 1460 bp, Homo sapiens
tgtgccacaaatcctataacactttattgtttttgctttaaataatcaattatcttttaaggagaaaaaacaaaaaatttttacataatttttatatatttctgggactcttaatttctttttttatagatcaaattttccttctggtattatatttcttttactaaagaaattttctttaacacttatgtagtgcaaatgtgctaataatgaatcagctcagtatttgttctgaaaagtctttttctttttggaagacatttttgctggttaaagacttctaggttggcaaaaatgtttttaagtactttaaagaacagctctatagttcctggccatttttttcttacttacatagattcgatgaggagtctgcagtattcttgattgtatgtagtgggttttcccctcatgagctgttctgcccctctctctcggttctcttcttctggcactccaattacatatacagtcaactccttgacgctttcccaagtgcagtgctggagactgaagatttaactgcagtgagcttggactgtgaggattgaagcagagccaaaaactgacagacagttwgtaatcattgcagatgtttgctgaacaattgcaaggtagcaggcactattctacttttcacctgtagaattctgacttatcctcaagatttatcttgaaattttccagaaagccttcctataccatcctttctcaccctaacctctacctcacctctcacactaggttaggtagccctcttttttagttttactgcacactgggtttccagtgtttttaaatctactactctttattctattagatctttttatttttaatctccatggctaggctgtgaattccatgagggcaaagactatgactattgtcttgtgtcatagtcaaatgacctctcctttgcccagggtgtgttacattctcaatgtgtatttcatgaaagaatggatgaataaatggtgtctcccactagattgtgagttcctcataggcataaattacacttcttcccatgttttcgtgaccctggttcaatatatatgattgatgaaaaagagcatttcagcaattacagtttttgtttgttcggtttttgttttttgttgatttgagacagggtctcgctctgtctcccaggctggagtgtagtggcactatctcagctcactgcaacctctgcctcccggattcaagtgattcttgtgtctcagcctctcaagtagctgggattacagacgcaagccaccatgcctggctaatttttgtattttcagtagagatggggtttcgccgtgttggccaggctggtctctgactcctgacctcaagtgatctgccctccttggtctcccaaagttctgggattacactaaactcgtgggaggcagagaagcaacagctaacagaagtggggaggaggcactgtaacaattacattgagg

SEQ ID NO: 704286 - DNA, 1460 bp, Homo sapiens
tgtgccacaaatcctataacactttattgtttttgctttaaataatcaattatcttttaaggagaaaaaacaaaaaatttttacataatttttatatatttctgggactcttaatttctttttttatagatcaaattttccttctggtattatatttcttttactaaagaaattttctttaacacttatgtagtgcaaatgtgctaataatgaatcagctcagtatttgttctgaaaagtctttttctttttggaagacatttttgctggttaaagacttctaggttggcaaaaatgtttttaagtactttaaagaacagctctatagttcctggccatttttttcttacttacatagattcgatgaggagtctgcagtattcttgattgtatgtagtgggttttcccctcatgagctgttctgcccctctctctcggttctcttcttctggcactccaattacatatacagtcaactccttgacgctttcccaagtgcagtgctggagactgaagatttaactgcagtgagcttggactgtgaggattgaagcagagccaaaaactgacagacagtttgtaatcattgcagatgtttgctgaacaattgcaaggtagcaggcactattctacttttcacctgtagaattctgacttatcctcaagatttatcttgaaattttccagaaagccttcctataccatcctttctcaccctaacctctacctcacctctcacactaggttaggtagccctcttttttagttttactgcacactgggtttccagtgtttttaaatctactactctttattctattagatctttttatttttaatctccatggctaggctgtgaattccatgagggcaaagactatgactattgtcttgtgtcatagtcaaatgacctctcctttgcccagggtgtgttacattctcaatgtgtatttcatgaaagaatggatgaataaatgstgtctcccactagattgtgagttcctcataggcataaattacacttcttcccatgttttcgtgaccctggttcaatatatatgattgatgaaaaagagcatttcagcaattacagtttttgtttgttcggtttttgttttttgttgatttgagacagggtctcgctctgtctcccaggctggagtgtagtggcactatctcagctcactgcaacctctgcctcccggattcaagtgattcttgtgtctcagcctctcaagtagctgggattacagacgcaagccaccatgcctggctaatttttgtattttcagtagagatggggtttcgccgtgttggccaggctggtctctgactcctgacctcaagtgatctgccctccttggtctcccaaagttctgggattacactaaactcgtgggaggcagagaagcaacagctaacagaagtggggaggaggcactgtaacaattacattgagg

SEQ ID NO: 704287 - DNA, 1460 bp, Homo sapiens
tgtgccacaaatcctataacactttattgtttttgctttaaataatcaattatcttttaaggagaaaaaacaaaaaatttttacataatttttatatatttctgggactcttaatttctttttttatagatcaaattttccttctggtattatatttcttttactaaagaaattttctttaacacttatgtagtgcaaatgtgctaataatgaatcagctcagtatttgttctgaaaagtctttttctttttggaagacatttttgctggttaaagacttctaggttggcaaaaatgtttttaagtactttaaagaacagctctatagttcctggccatttttttcttacttacatagattcgatgaggagtctgcagtattcttgattgtatgtagtgggttttcccctcatgagctgttctgcccctctctctcggttctcttcttctggcactccaattacatatacagtcaactccttgacgctttcccaagtgcagtgctggagactgaagatttaactgcagtgagcttggactgtgaggattgaagcagagccaaaaactgacagacagtttgtaatcattgcagatgtttgctgaacaattgcaaggtagcaggcactattctacttttcacctgtagaattctgacttatcctcaagatttatcttgaaattttccagaaagccttcctataccatcctttctcaccctaacctctacctcacctctcacactaggttaggtagccctcttttttagttttactgcacactgggtttccagtgtttttaaatctactactctttattctattagatctttttatttttaatctccatggctaggctgtgaattccatgagggcaaagactatgactattgtcttgtgtcatagtcaaatgacctctcctttgcccagggtgtgttacattctcaatgtgtatttcatgaaagaatggatgaataaatggtgtctcccactagaytgtgagttcctcataggcataaattacacttcttcccatgttttcgtgaccctggttcaatatatatgattgatgaaaaagagcatttcagcaattacagtttttgtttgttcggtttttgttttttgttgatttgagacagggtctcgctctgtctcccaggctggagtgtagtggcactatctcagctcactgcaacctctgcctcccggattcaagtgattcttgtgtctcagcctctcaagtagctgggattacagacgcaagccaccatgcctggctaatttttgtattttcagtagagatggggtttcgccgtgttggccaggctggtctctgactcctgacctcaagtgatctgccctccttggtctcccaaagttctgggattacactaaactcgtgggaggcagagaagcaacagctaacagaagtggggaggaggcactgtaacaattacattgagg

SEQ ID NO: 704288 - DNA, 2321 bp, Homo sapiens
ttggtggactgctgaagaatgaagcatgtgcacccactttacttctacactttggcagctgtagaacagagacagtggtggtgcaggatacatccttgtatctgggaattaattcctttccgaggtgtatactacttagtttgtgactaaaatctacgggcttcagtttcctagtcttgctaaattggaaacatgttaatatctatgactgtagcacatcacaagtaaagataaatgagaaaatgtatgctttggctgggcatggtggctcacgcctctaatcccagcactttgggaggccgaggcaggtagatcgtgaggccaagagattgtgaccattctggccaacatggtgaaaccctgtctctactgaaagtacaaaaattagctgggtgtggtggcgggtgcctatagtcccagctacttgggaggctgaggcaggagactcacttgaacctgggaggcggaggttgcagtgagccaagatcacgccactgcactccagcctggcgacagagcgtcacttcatctcaaaaaaagaaaccaaaacaacaacaacaacaaaaaacaaacaaacaaaaaaaggacaatgtacgctttgtaaactttaagtctgggagatggctaacattatgggggaagacttggccaagacagcccagaaaccacaaggtgaataacagcacccagaacagaaggtccaccatgaagataaggacttaatctatcaggaaggattaaatgtaaccgtcaagagtaggcttgatggaggagggtgaatctgaatggagccttgagctacagtggggtttacagcacaggcaaatcctggtgactgcatgctagatgaaaggaattggacaaatgaaataactgaggcaagagaggttgggcatgttcaaattcgtatctgtattgcatagatagcttaagaatgaagtagagccagaaaaaacatactaggctcagattacggaacatgtttaatgctaggctaagaactgtgttctattatatatgcaaagaggatccatgatcgctttttgagcagaaaaatcacccaacttaatgtgatgttttaggaagatacttgggtagcaatgtggaagaggcactgaagcaagcagattgaaggcagatgctacgtataagaccataaagcttttgcactggatttgatcagttgcaatgaaggcttgagtttggatggtggtcttgggaaagttcaaaaaaaaaaaaaggagaggaggggtcataactgaaagccattttatcatgactaagaagtcaaacatgttaataacctcaagagatattggaacaagcagaaaatattcctcttttgtgcatccatacttttattaagaaaagcttaacggagcttgagatatttatagaaaaggccagtaccatgaggaaggagatgtgttcctagaacacgtttaaaatgatagtgttctttaattttaaaatatgatggaggatagttttcgaattttgtgtcgcagtttttgcagttactaaagtttccaaattctaaaaccacatggtagtctgccagctacacatggagcaaataacctgccctgatgctccccacttgtaatccagccagcaagccctgtctctccattcccaaggctgtgttcacagacagcattgaccaaaaccagccagttccccccaaacccctgctgcacagtatctgacagatatcagtgatggcttatcttcacttgtctttcaacccctctttattctctacccctctttatgcaccccaaaactgccaatatctctataaatagcatgactctggctttcctgggcttgaacttccatgtggatttggctgacggagatcaatgtaaggtgatgggatgctcagaagacagagagttgggggtaattttctcccactccttttctgcagtgggaactgcagtgatggcaacagtattctctccacgaaaacactccctgcctcctgctatggtttcaatatttgtgtccctccaaaattcatgttgaaacttcatcctcagtgtgacaggattaagatgtgaggcyttgaggaggtgattatatacccttataacagcactctaggggactagctagatcctgtttgcttttatattccttctgcaatgtgcggacacagcaagagtcgccatcttggaagcagaaagcaaccctctccagcccccagatctgctggcaccttgatcttggacccacaactgtgagaaatatgtttttctcaatagactacatagcctccatgtccatgttctgttaatgcagaacaaacagattaa

SEQ ID NO: 704289 - DNA, 606 bp, Homo sapiens
acttgaccattcttacataacagtcccctgatgtaatcttcatccagcagtattttaatccttaatcttatgaaatgaaaacgtatgattgtggtttgtaatttggaaaccatcaatgcccaatatatttggaaatcttattcaaattattgatacatgcagctatttgaatggatcttaactgcattgtgcctagtgaaaaaaaatccaaccataaaaggttattatagtttatactgcattatttgtcttatacaacattcttgaaataacaaaattctagagatcaaaaaataattacttgttagctagtggttcaagacgggaacagtagttaggtagaaaagtggcttctaaaaaatagcaygaggaattttgttgtgatgtaactgttctgtatgttaactgtgatagccgttacacaaatgtgcacatacgctaaaatttcttggaactaaatatacaaatacccacaaattagggcatataaaatggtgaaaaggtgaataagtttagttgattgtatcatggtcaattttctggtttaatatgatatcatagctatgcaagatgctagcagagggagaaactgagggaaagttacca

SEQ ID NO: 704290 - DNA, 1065 bp, Homo sapiens
ttgtcttcttccattatagcataagatgatccattatagccacttcttcataacagcttcttaattaacagttcatattttttaataaagcaaatagtggttttattccattaaaaagggcaactttgagaggtaaagtcagctggacttcctaggtcgagtgcggacttggagaacttttctgtcttacaagaggattgtaaaatgcaccagtcagtgctctgtagctaggaagaagattgtaaaatgcaccaatcagtgctctgtaaaaacacaccaatcagagctttgtagctagcaygaggattgtaaaatgcaccagtcagtgctctgtaaaacgcaccaatcagcactctgtaaaatgcacaaatcagcactctgtaaaacgcaccaatcagcaggatcctaaaagtagccaatcacagggaggattgaaaaaagggcactctgataggacaaaaacagaacaaggggtggggacaaataaggaaataaaagctggcctccccagccagcagtggcaatccactgggttccccttccaggccgtggaagctttgttcttttgctctttacaataaatcctgctactgctcactttttgggtccatgccatctttaagagctgtaacactcaccagggaaggtctgctccattcttgaagtctgcgagaccaccaagccaccagcaggaaccaactctggacacagtttgtttagctaactggttattaatttatttatgtatatatttgcaaactggagttacataccaaatgccaaattttgtaatagtaaagcaattaagtaactctacttagtcagtgacatgtaggcagttaacctctgaattcattaaacttataaaagaaaatagcattccagttaacagctataggaccatgagaagaaaaagtgaaaacttaaaacatgacagattatggtaaaataattcaaaaagcaggtacagttttagttttataaagttgtgtaccatggcttcagcgaagttcacaggtagagtgagaaagttataaaaatgttaatttgtttcagtcaaaacaa

SEQ ID NO: 704291 - DNA, 1065 bp, Homo sapiens
ttgtcttcttccattatagcataagatgatccattatagccacttcttcataacagcttcttaattaacagttcatattttttaataaagcaaatagtggttttattccattaaaaagggcaactttgagaggtaaagtcagctggacttcctaggtcgagtgcggacttggagaacttttctgtcttacaagaggattgtaaaatgcaccagtcagtgctctgtagctaggaagaagattgtaaaatgcaccaatcagtgctctgtaaaaacacaccaatcagagctttgtagctagcatgaggattgtaaaatgcaccagtcagtgctctgtaaaacgcaccaatcagcactctgtaaaatgcacaaatcagcactctgtaaaacgcaccaatcagcaggatcctaaaagtagccaatcacagggaggattgaaaaaagggcactctgataggacaaaaacagaacaaggggtggggacaaataaggaaataaaagctggcctccccagccagcagtggcaatccactgggttccccttccaggccgtggaagctttgttcttttgctctttacaataaatcctgctactgctcactttttgggtccatgccatctttaagagctgtaacactcaccagggaaggtctgctccattcttgaagtctgcgagaccaccaagccaccagcaggaaccaactctggacacagtttgtttagctaactggttattaatttatttatgtatatatttgcaaactggagttacataccaaatgccaaattttgtaatagtaaagcaattaagtaactctacttagtcagtgacatgtaggcagttaacctctgaattcattaaacttataaaagaaaatagcattccagttaacagctataggaccatgagaagaaaaagtgaaaacttaaaacatgacagattatggtaaaataattcaaaaagcaggtacagttttagttttataaarttgtgtaccatggcttcagcgaagttcacaggtagagtgagaaagttataaaaatgttaatttgtttcagtcaaaacaa

SEQ ID NO: 704292 - DNA, 1138 bp, Homo sapiens
cagagaaagcctggctagtcccattcttggctctgtccaaattaacttggcacgtggccgggggcaagtccctttcctctttctctcccagtctcctcatctatgaaacaaaattcaaggccaggtgtggtggctcatgtttgtaatcccagcactttgggaggtggaggccagcggatcacttgaggtcaggagtttgagaccagcctgaccaacatagtgaaaccccgtctctactaaaaaaaaatacaaaaattagccaggtgtggtggcacacatctgtagtaccagctatgtgggaagctgaggcaggagaattgcttgaccccgggaggcggagcttgcagtgagctgagatcatgccactgcattccagcttgggcaacagagtgagactccatctcaaaaaaaaaaaaaaaagaaacaaaggatttaggctaatcaatctctatgagacctcstagctctagcagtctgatttgagggttcagaaacagggaggaggggtagcagcatgggggttggttgagagagaagagagacaggagctggccagggctccatagccaaaaaggctgcaagtttggacttcagatgctatctccagataggattgtactcagtcacaggatgcagaccaatagaactgaaaagagatgggtgacctatcaccaaaacacaccatctgtaaggcccataaaattatatatatggtaaatatatatatatatatcttctgaattttggaattaactttaggtttgcagaagagttgcgaagatagtacagagagttcccgaatacctgacctccagtttcagtttcccctaacgttatcttacaccaccctggtacatttctcttggtaactaaatatatatatatatatatatatatacacacacacatatatatatagttaccaaataaacttctgaatttggggtttttggggtttttttgtttgttttttgtttgtttgttttttgcttgagacggaatctcgctctgttgcccaggctggagtgcagtggtgcgatctcagctcactacaatccctgcctccctggttcaagtgattctcctgcctcagcctcccaagtagttgggattacaggtgtccactaccatgcccggc

SEQ ID NO: 704293 - DNA, 1137 bp, Homo sapiens
tcactgaagtttttttgttactattgttgtttttattctattccatgaatatatgcacattcagatgttttgttttattttgtttgagatgggatctcagtatattccccaagctggtctcaaactcctcctgggctcaagcaatccttccacttcagcctcctgagtagctggaaatacaggcatgtgccactgcatccagatgtttttgaaaccaaacatctaactcctgaactccagtaactcaaaatgttattggaaaataactagctctttattgtaaagataatcttccttttaaggagtggaagaaaaaagatttaaatataaaaagaaggggcttcatttgcaaaggtctgtttaatacatgacaattataattcttgggccttccaaaaagaaacaattaatacatgttttgagtagctctgtgctattcaagaggtgctggagcatatgaacaagttggctgattctgtttcagggtaagtggtttcttgttattcttgagttatagaagctatgctctttcagcttggaacaatgactgatgagaactttacatttaacattacagctgggagtcacgaatcaattctgagtaatctgaggaaatgacctttataattagaggattacttttttcaagtattttaggactcggtttctggaatgtatttagcctgtggcaaagaatgatcagatcatgatttgtttggactaacgcaattcaagatctgagataggatatataaggtaccagagtgttccttatccttcttccaaaaaatccatttggagcagtagaaagtaagggagaatctaagaagaaaggaggataaaaactgggaaaaaatgatgactagacaatatttttaaatgttgcaaataaggaatttgcaatggaatatatctacatttgactttcacttcttcaaggaacatccctccactacctttccttaaactgagcctggatccttcaagggtattgctttttgtacaaccctctcaatgtgaagctctcactctyttatgtcccatgaactgcagggtccaaatgcctgataagcactcttctagccacccccacccccacccccattactcctttcatttcattttattttaaccttc

SEQ ID NO: 704294 - DNA, 658 bp, Homo sapiens
acccactgtctggcactccctagtgagatgaacccagtacctcagttggaaatgcagaaatcactcatcttctgcgtcactcacactgggaggtgtggactggagctgttcctattcggccatcttggctccaccctcccgcctggctaatgttttaaacttttttggtagatacagggtcttgctgtttgcccaggctggactggaactcctgggctcaagcagtcctctcacctcagcctcctagagtgctagaattacagtcatgaaacagcacatgtggcccatattgacttattcttcagacagttggaatcaatctattgttagcatgtttgggaaagtttagatgcaaagctttgtacctcccacattctgatgtatataatgctgttttctcctttttttttttttctcttattatatgctttgagattctcaggtctgcttctttttctgccagtgttaactgatgaaatcccagtacttaagtcttagccttccaatcatgaataaaggaaggcacttcaatataaraaggaaatgtttgttcctctttccctgcacttgcagagaaaaatagaaactattcttgcttatattaatgctagataaaaattcttataagatacctggtcttcagagattgttgcgaaat

SEQ ID NO: 704295 - DNA, 631 bp, Homo sapiens
atggagtgtgaggtgcacaggctggggaggaagaaaaactaaggtgttaagaacaacactgggagtattatcttattawgaagggaaacagaggtcaaagggtaaaacaaactcggaaattaaggttagctcattagttaaggtttgaacgtttaagtaatgaaacatcaactatgttttgaaatagtaataaataacagtctatttgattaataaaaataagttacatgcaatgctaagttgacaagataatgttactggcaggtctttgctcccagagctcccaagatggcggcagctgctcccaagatggcagcaagcctttgttctctgacctggggttcttggcctcacagattccaaggaatggaacctcgggtcatgcggtgagtgttatagctctattagaagccatgggtcatggaagagaaccgtggaacccagcgactagtgttcagctcaattaggataaaccgggacacttagccatgcaggaacaagggtgagcctttagcccaatcgggagcggcagtgggcaccttgctggatcagaagtgcagtggacaccctgctggatctggaggggtggaagtcagtggcagtctgcgaaggcagcgatcagcagtggtgg

SEQ ID NO: 704296 - DNA, 600 bp, Homo sapiens
ctttgggagggtgaagcgggcggattacttgaggtcagggatttgagaccagcccggccaacatggtgaaaccccatcttttctaaaaatacaaaatttagccgggcagggtggcaggcgcctgtaatctcagctactcaggaggttgaggtaggagaatcacttgaacctgggaggcagaagttgcagtgagccgagatcatgtcactgaactccagcctgggcaacagagagagactccatctcaaaaaaaaaacaaaaaatgaaaaaacaaaaagacaaaaaaaatttaagagcacttacaatgcaactatgaaatatgagcaaatgatactgagctcatagtggggagcaaggaatgagaagaaacattggttgagagggggttaagttcaargacttttgcaaagcttccagaggagtgtgactgagtctggtagttgagcacctgggacattatttatgatgcattgaaggatgtcaacagcattcttccggagaattttgcccgcaaggggaggtcattaaaagaggaggcactgccacaccggaatgggtaaagccttccagcttctactttaatccttctgacccgggaga

SEQ ID NO: 704297 - DNA, 679 bp, Homo sapiens
gacagaagtgtccctaaaaagtctaatgatgcagttctacagaagcctgatgatcacagagtactaaaagctaagtaggggccaaggatgaaaaaaaaggtgtttctcaagaagtattgttgtgatgatttttggtacatacatttgattaaaatcaaatatagagaaagacctggcaaaccgaatccagcagcacatcaaaaagcttatccaccaygatcaagtgggcttcatccctgggatgcaaggctggttcaatatatgtaaatcaataaatgtaatccagcatataaacagaaccaaagacaaaaaccacatgattatctcgacagatgcagaaaaggcctttaacaaaattcaacaacccttcatgctaaaaactctcaataaattaggtattgatgggacatatctcaaaataataagagctatctatgacaaacccacagccaatatcatactgaatgggcaaaaactggaagcattccctttgaaaactctctcaccactcctattcaacatagtgttggaagttctggccagggcaattaggcaggagaaggaaataaagggtattcaattaggaaaagaggaagtcaaattgtccctgtttgcagacgacatgattgtatatcttgaaaaccccattgtctcagcctgaaatctccttaagctgata

SEQ ID NO: 704298 - DNA, 631 bp, Homo sapiens
attttttgtatttttagtagagacggggtttcaccgttttagccgggatggtctcgatctcctgacctcgtgatcctcccgcctcggcctcccaaagtgctgggattacaggcgtgagccaccrcgcccagctcaaaactctttcttaaagactcgagttaaatggaaaatacaaagtaaaattgtagaatttctagaaatgtatgtaataatggagatattatatatttgaaaaaatcaagaactagtgaaaaagactactataaacaatgatagaatttggtaaaattgaatacaaaatcacctgatataaattaataacctcattaaatatgaccaataactagttagaggtttcaatggaggagataaatctatttacaataacaacaaaaaatacttatgcataaacttaaccaaatttgcaaaacttatagaaagcttttatacatttgttaaagatataaagtagatataaacaaactgaaagctatgccatcaaaaaagatgagaaggaaggatggatagatatagtaagtacagcaaaatcttgacacttggtcaatatgggtgaacagtatagaaaaatttattatgttatcctttttgtgtttttgaattttgaacattt

SEQ ID NO: 704299 - DNA, 631 bp, Homo sapiens
attttttgtatttttagtagagacggggtttcaccgttttagccgggatggtctcgatctcctgacctcgtgatcctcccgcctcggcctcccaaagtgctgggattacaggcgtgagccaccacgcccagctcaaaactctttcttaaagactcgagttaaatggaaaatacaaagtaaaattgtagaatttctagaaatgtatgtaataatggagatattatatatttgaaaaaatcaagaactagtgaaaaagactactataaacaatgatagaatttggtaaaattgaatacaaaatcacctgatataaattaataacctcattaaatatgaccaataactagttagaggtttcaatggaggagataaatctatttacaataacaacaaaaaatacttatgcataaacttaaccaaatttgcaaaacttatagaaagcttttatacatttgttaaagatatraagtagatataaacaaactgaaagctatgccatcaaaaaagatgagaaggaaggatggatagatatagtaagtacagcaaaatcttgacacttggtcaatatgggtgaacagtatagaaaaatttattatgttatcctttttgtgtttttgaattttgaacattt

SEQ ID NO: 704300 - DNA, 1233 bp, Homo sapiens
ctgcaaatatttactcagcacctggtaagttgcagacaatgttcggggcactagattacagtggaaaacaaaacaggacaaagttattgtcttcaatttagtgaaaacaccatgtgcaagctaaaattagagaacaactgagaacaattagagaacaactgagaacaattggagaacaattgtgtgamaggagaatagctgtggagaaaagtagggtaaggaagggggatagcatgggtagagggccagagcagtactataatttttaaacagagtggtaaaggatggctttaccgactgaaattagtgcaaaggcctgacagaggggagagagacagcaatggagaagaattctctgaacaagacagtggaaaggccctgaggtaggagctgatttggtgtgttggaggactagcaatgagacctcctgattttaaagcagagtcaacgagggaaaaagaggcagatgtctttgaagagacaatgatggattgtgttggattttgtagaccactgcaggaagtagcctgtactagtcactcaattactccttatcagagtacttacagttacaaatcatcctttgcttttccaaaattgggacttggagtctctatcagttaaacagaataatcttcataaagattcaagtctcttcattaagtgaaataaaccaagcaaccacgatcatgcagtatcatgtttgtactgagaagcggcagtatctataataaccttaagtttcctgatcagaaccattgtcagcatgtggaaattaggcttgtctctatccagaaattttaagcactattaaattccatgcatttataaaattccaactaatttcaatttactatcatcaaggcaaaaacttttacttaaactatcacctttgacaattgcaatctaaacgctagtacaaattataaatttgctaaactatgttcattcattggagatcccagcaagagatacatatttagaatgctaaattcctattaaaaataggaagaaggaagttcacattaaaatgtgaatttattttattacttgctaattattattcaaaatttatgtaaatatttataaagatataaaacataaataagcaattgctactatacagcatctgttatgtgtaatgcattgtacaaatcactttacatttattatctcattccttaccacaataggaaatatatttttaaataaacttttagaacagctttagat

SEQ ID NO: 704301 - DNA, 743 bp, Homo sapiens
tgattttcagcgccttttaaaatggctgtttgtctttggtatatctttcgttgaatacattattctaaaaatgcatttacttaaagatgtattgatttaataaatttatttaaaattggatatttgtcttttctacattaaattgtaggattttaaaaactatgttcagatacaagccttttatgagatttatgtatyacagatactgttttctcagtttgtatctggctttattattttctttacatggcattttgaaaggcaaaagtttcagtttgtcttttatttaatccctcctttcctcaacttaatatgtatagacaagtatacattagacatgtattcatcaagaaagatgttaaacaagcaaattagttttaagacctaaaagacattaaaaagaaatttagaaaactttttttttctctagattgtctaaattttctaataggtgagagagcaaagagtagaacagaaataagatctttctctcctttaagtcacattcattaactgtagatcatttttcagaggtcaggtcacgtgtgcttgcttcagagaaatattctttgtcctgcacaggtcctcttgccttcaaacttcaagtcatgcacttttgtttaaaactttatagttctttgctcccctccttttataaagaaatgttgttatctgcttttaattttgcattcattatcatgaatgtcttattaatatctgtcctcccacgttaaggtgcaata

SEQ ID NO: 704302 - DNA, 743 bp, Homo sapiens
tgattttcagcgccttttaaaatggctgtttgtctttggtatatctttcgttgaatacattattctaaaaatgcatttacttaaagatgtattgatttaataaatttatttaaaattggatatttgtcttttctacattaaattgtaggattttaaaaactatgttcagatacaagccttttatgagatttatgtattacagatactgttttctcagtttgtatctggctttattattttctttacatggcattttgaaaggcaaaagtttcagtttgtcttttatttaatccctcctttcctcaacttaatatgtatagacaagtatacattagacatgtattcatcaagaaagatgttaaacaagcaaattagttttaagacctaaaagacattaaaaagaaatttagaaaactttttttttctctagattgtctaaattttctaataggtgagagagcaaagagtagaacagaaataagatctttctctcctttaagtcacattcattaactgtagatcattyttcagaggtcaggtcacgtgtgcttgcttcagagaaatattctttgtcctgcacaggtcctcttgccttcaaacttcaagtcatgcacttttgtttaaaactttatagttctttgctcccctccttttataaagaaatgttgttatctgcttttaattttgcattcattatcatgaatgtcttattaatatctgtcctcccacgttaaggtgcaata

SEQ ID NO: 704303 - DNA, 743 bp, Homo sapiens
tgattttcagcgccttttaaaatggctgtttgtctttggtatatctttcgttgaatacattattctaaaaatgcatttacttaaagatgtattgatttaataaatttatttaaaattggatatttgtcttttctacattaaattgtaggattttaaaaactatgttcagatacaagccttttatgagatttatgtattacagatactgttttctcagtttgtatctggctttattattttctttacatggcattttgaaaggcaaaagtttcagtttgtcttttatttaatccctcctttcctcaacttaatatgtatagacaagtatacattagacatgtattcatcaagaaagatgttaaacaagcaaattagttttaagacctaaaagacattaaaaagaaatttagaaaactttttttttctctagattgtctaaattttctaataggtgagagagcaaagagtagaacagaaataagatctttctctcctttaagtcacattcattaactgtagatcatttttcagaggtcaggtcacgtgtgcttgcttcagagaaatattctttgtcctgcacaggtcctcttgccttcaaacttcaagtcatgcacttttgtttaaaactttatagttctttgctcccctccttttataaagaaatgttgttatctgcttttaattttgcattcattatcatgartgtcttattaatatctgtcctcccacgttaaggtgcaata

SEQ ID NO: 704304 - DNA, 1173 bp, Homo sapiens
tcggcatcaccgcactcatggccagaagcaccggagacgagggcggggcaaaggagccagccagggggaggaaggcctggaagccctggcccacggtaagggccttgggagacagggcgggtgtccatggcccaggggaatggggaggctgaggggacatgtgactgacattagcagctggtcttgattcttgagcctttttgtaggatttccaaagcttgcttctaagaagaaatgcctctaagagtcaaaaatattttcgtgaaaacttcacagttccgggcggctgggactacaggcgcccgccaccacgccgggctaattttttgtatttttggtagagaccgggtttcactgtgttagcctggacggtctggatctcctgaccttgtgatccggtctcgatatcctgacctcgtgatccgcctgccttgacctcccaaggtactgggattgcaggcgtgagccaccgcacccggccactgtttttaaattttaaaatatacaattaaattgttatttactatagggttatttttatggtcataatacaaattatatgtgagtataaataaaattcatttctaaactcttaatattttttcaaaattgttatatatttttgtttgaacatgtggcctgtctgcctgcaaacacacagactttttgattcacatagagttaaatatatattagtctaaagacaaactttaggtgtaagaaaattatggaataagtgtgtgtgtgtgagtatgagtttgtacctattttcagaagaaaagaacaatatgggaatgaaaatcattttaataaggtggctactataaaaccaaaaacctaaaaactgaaagcaaatgtaaaaaaaaaaaagaaaagaaaacttcacagttctgaccccctaaaatcaatactataataggtaaaaccccttgctagagaattagccaatctttttgatcaaattcatcagttttccagtttctygtgggttttcttcaagtggtcttcattcataaatttttcctcccatgaaactacttctacagagtagctttttctctgagaataaagaaatctttttcttctgcattcgtggttgtctatatatatttctaaagttgttaggtaaggaagaatgctatttctgttctaagtgtgaggctagagcagacc

SEQ ID NO: 704305 - DNA, 1815 bp, Homo sapiens
ggataataaccattttaactgtaatgagatgatatctcaatgtggttttcatttgcatttccttgatgattaatgatgttgaacattttttatatgcctattggccttcttgttcagcaacatacatgtattctcaataaggaaggtcttaggaaccgcacaacccaagttcttttcttatgaaaagttaagtttactaagatctactttatatgaatgttcgccataagattattggtgaataaaaattaagaacttatacaaatgttcttcaaaaggcaaagggttaattaaatgagtttatatccgtgtcttagaataatgtgaaatcattaaagatgctatttcccagtatctcctgacctaaatatgtgcccgtgttatattaagagaaaaaatacaggccataaaatatacattctgaattttgaaataaaatacaggcaaggccagacacggtggctcaggcctgtaatctcagcacttagggagaccaaggcaggcggagcacttgagcccaggaattcaagaccagcccaggcaacatggtaaataaaaccccatctctacaaaaaagcaaaaagtaaccatgtgtggttgtttatgcctgtagttctactaatcgggagattgacgtgggaggaacacctgcgtttgaaaagtcaatgtgcagagagttgtgatcacatcattactctccagccctccagtttgggagacagagtgagacctcatctctaataagaaaataaataatgcatatatatatatatakagagagagagagagagagatacacacatatttatttatgagaatgtaatatatgaaatatttatactgaaaaagcaacccagggagagcccattgagtctccaaaacaaccaggtaacagtgtatttacttttatagtaagaaaatatgttagaatacttgtataaactgttgattcctttgtttaattctttgttgactatgtgtataccaactccacccctcatacattaccctatctctacttacttctgtggaaattaatatgacataaaaataaaaatgagcctggttttggttttgtgtctcaaacctcatggagaaaatgtcctcagatcctagagatttatacccatatataataaatagtaggagtataaaatgttatatctattatttttcttacttttccagaaaaaatagtctcttagaatgtggcaaaaataacatggggaaaacgataagcttctaaaagcaaatagggtcctgaaaagagcccagttttgtggatagctcccaaggcttagtaatagggttaaaggatgggaagcatcaagtctctcagatggtttgagttgcaagggcaaaggaaacctgaatgcagggccactgctaccacatgtcaacttcgtgtgaattagaaaactgctttctctaggaatatgaaggcagctatcttagggtaaacacaatgcttttctacaaagtaaaaggaacatcttcccctgtgccagaaaggcttggcaagcagactgctcagggtgaatttcagcatccatccactctcttaactgagcacttttggataatgcaaaagctacgcaaagctatgcagctatctcacctgtagtctgactggagacctagccgaattgaaaggacccagcagatgcaacagatacattttcttagacattcataaagtttttcatgtcccagagtggacttggagtagccaaatgagttccatgcaactaggagtaatagggacatagcttagagagtcatcatacctttataaagaataaaggatggattggt

SEQ ID NO: 704306 - DNA, 1372 bp, Homo sapiens
ttttgtcccctacaccctgctatttcagaatagaagttttgaagagatttttaatttaatccttcctgtcctcctttaaaatgattaccaataattttactaaattatcagaataacttatcctgctgaaagtccagctcaatggcaaattgcctaaacgccaaatttgtctacttgttttatgttagcaaatttgaaattcccttttttcatataatttatcatgcaacatttaaaaatctcagatttattttgataatatataaaaagtaaatcttgaaaacaaatacaattgtaaataaaaagctttgcttttgggttacacttwttctgctaagaacggctccatcatcacccctcttatgctgcagtaaaccaatttttttttgccttttcttcagattcaaggaaaggcaaaaaaaaaaaaaatttttttgctgcattaattgccaacaataagattttacaaaatgaccactctgcaaaatgtattgtgctcagcacaaatgtggatccaatgaaaatacaaattccctgatccataatataaataccaaaaaagggtaagatactactatgcaaaacaacatcatatgctgctgtgatgagagctaaattatgtggtaaagacaatttcagcgcatatatatatatgcgctgaaattgtcttagcatgtgtatttatatatgctgtgtgtatatatatatgctgaaattgtcttagcatgtgtatttgtgtgtgtgtatatatatatgctgaaattgtatcagcatgtgtatttgtgtgtttgtatatatatatacacacatatatatatacacatatatatacatgatacatatacatacatgctgatagatacatactgatatatgtatacatacaaatgttgtaattgcatatacacacacatatgtcagcatctacctatctgtttgtctatctatctatctatctatctatttatctatctatggagagagagagataatatatatgggcaaagagaacagaggtgagatgagggcctataatagctcttagtcaattctgtgaacatggaaagcagatgtttcaagtgatggctgcctgttcagatctgagaaatatgaaggttttgtgatctcaagagaaaccagtaagatgcaacttatcatatcataatacattctcaatagaataagaaactaaaaaaaggaattgtaacctttgttagtaaccattcattacagaaaaactatacaaagactgtacaggaaaggaaatgttctagtatgctatggctaaggtatgaacaatattgttattatcaccataaggtaaacattgagtatcaatttaaaagcctcattaaaaaatgaaaaatggatg

SEQ ID NO: 704307 - DNA, 1372 bp, Homo sapiens
ttttgtcccctacaccctgctatttcagaatagaagttttgaagagatttttaatttaatccttcctgtcctcctttaaaatgattaccaataattttactaaattatcagaataacttatcctgctgaaagtccagctcaatggcaaattgcctaaacgccaaatttgtctacttgttttatgttagcaaatttgaaattcccttttttcatataatttatcatgcaacatttaaaaatctcagatttattttgataatatataaaaagtaaatcttgaaaacaaatacaattgtaaataaaaagctttgcttttgggttacactttttctgctaagaacggctccatcatcamccctcttatgctgcagtaaaccaatttttttttgccttttcttcagattcaaggaaaggcaaaaaaaaaaaaaatttttttgctgcattaattgccaacaataagattttacaaaatgaccactctgcaaaatgtattgtgctcagcacaaatgtggatccaatgaaaatacaaattccctgatccataatataaataccaaaaaagggtaagatactactatgcaaaacaacatcatatgctgctgtgatgagagctaaattatgtggtaaagacaatttcagcgcatatatatatatgcgctgaaattgtcttagcatgtgtatttatatatgctgtgtgtatatatatatgctgaaattgtcttagcatgtgtatttgtgtgtgtgtatatatatatgctgaaattgtatcagcatgtgtatttgtgtgtttgtatatatatatacacacatatatatatacacatatatatacatgatacatatacatacatgctgatagatacatactgatatatgtatacatacaaatgttgtaattgcatatacacacacatatgtcagcatctacctatctgtttgtctatctatctatctatctatctatttatctatctatggagagagagagataatatatatgggcaaagagaacagaggtgagatgagggcctataatagctcttagtcaattctgtgaacatggaaagcagatgtttcaagtgatggctgcctgttcagatctgagaaatatgaaggttttgtgatctcaagagaaaccagtaagatgcaacttatcatatcataatacattctcaatagaataagaaactaaaaaaaggaattgtaacctttgttagtaaccattcattacagaaaaactatacaaagactgtacaggaaaggaaatgttctagtatgctatggctaaggtatgaacaatattgttattatcaccataaggtaaacattgagtatcaatttaaaagcctcattaaaaaatgaaaaatggatg

SEQ ID NO: 704308 - DNA, 1372 bp, Homo sapiens
ttttgtcccctacaccctgctatttcagaatagaagttttgaagagatttttaatttaatccttcctgtcctcctttaaaatgattaccaataattttactaaattatcagaataacttatcctgctgaaagtccagctcaatggcaaattgcctaaacgccaaatttgtctacttgttttatgttagcaaatttgaaattcccttttttcatataatttatcatgcaacatttaaaaatctcagatttattttgataatatataaaaagtaaatcttgaaaacaaatacaattgtaaataaaaagctttgcttttgggttacactttttctgctaagaacggctccatcatcacccctcttatgctgcagtaaaccaatttttttttgccttttcttcagattcaaggaaaggcaaaaaaaaaaaaaatttttttgctgcattaattgccaacaataagattttacaaaatgaccactctgcaaaatgtattgtgctcagcacaaatgtggatccaatgaaaatacaaattccctgatccataatataaataccaaaaaagggtaagatactactatgcaaaacaacatcatatgctgctgtgatgagagctaaattatgtggtaaagacaatttcagcgcatatatatatatgcgctgaaattgtcttagcatgtgtatttatatatgctgtgtgtatatatatatgctgaaattgtcttagcatgtgtatttgtgtgtgtgtatatatatatgctgaaattgtatcagcatgtgtatttgtgtgtttgtatatatatatacacacatatatatatacacatatatatacatgatacatatacatacatgctgatagatacatactgatatatgtatacatacaaatgttgtaattgcatatacacacacatatgtcagcatctacctatctgtttgtctatctatctatctatctatctatttatctatctatggagagagagagataatatatatgggcaaagagaacagaggwgagatgagggcctataatagctcttagtcaattctgtgaacatggaaagcagatgtttcaagtgatggctgcctgttcagatctgagaaatatgaaggttttgtgatctcaagagaaaccagtaagatgcaacttatcatatcataatacattctcaatagaataagaaactaaaaaaaggaattgtaacctttgttagtaaccattcattacagaaaaactatacaaagactgtacaggaaaggaaatgttctagtatgctatggctaaggtatgaacaatattgttattatcaccataaggtaaacattgagtatcaatttaaaagcctcattaaaaaatgaaaaatggatg

SEQ ID NO: 704309 - DNA, 1372 bp, Homo sapiens
ttttgtcccctacaccctgctatttcagaatagaagttttgaagagatttttaatttaatccttcctgtcctcctttaaaatgattaccaataattttactaaattatcagaataacttatcctgctgaaagtccagctcaatggcaaattgcctaaacgccaaatttgtctacttgttttatgttagcaaatttgaaattcccttttttcatataatttatcatgcaacatttaaaaatctcagatttattttgataatatataaaaagtaaatcttgaaaacaaatacaattgtaaataaaaagctttgcttttgggttacactttttctgctaagaacggctccatcatcacccctcttatgctgcagtaaaccaatttttttttgccttttcttcagattcaaggaaaggcaaaaaaaaaaaaaatttttttgctgcattaattgccaacaataagattttacaaaatgaccactctgcaaaatgtattgtgctcagcacaaatgtggatccaatgaaaatacaaattccctgatccataatataaataccaaaaaagggtaagatactactatgcaaaacaacatcatatgctgctgtgatgagagctaaattatgtggtaaagacaatttcagcgcatatatatatatgcgctgaaattgtcttagcatgtgtatttatatatgctgtgtgtatatatatatgctgaaattgtcttagcatgtgtatttgtgtgtgtgtatatatatatgctgaaattgtatcagcatgtgtatttgtgtgtttgtatatatatatacacacatatatatatacacatatatatacatgatacatatacatacatgctgatagatacatactgatatatgtatacatacaaatgttgtaattgcatatacacacacatatgtcagcatctacctatctgtttgtctatctatctatctatctatctatttatctatctatggagagagagagataatatatatgggcaaagagaacagaggtgagatgagggcctataatagctcttagkcaattctgtgaacatggaaagcagatgtttcaagtgatggctgcctgttcagatctgagaaatatgaaggttttgtgatctcaagagaaaccagtaagatgcaacttatcatatcataatacattctcaatagaataagaaactaaaaaaaggaattgtaacctttgttagtaaccattcattacagaaaaactatacaaagactgtacaggaaaggaaatgttctagtatgctatggctaaggtatgaacaatattgttattatcaccataaggtaaacattgagtatcaatttaaaagcctcattaaaaaatgaaaaatggatg

SEQ ID NO: 704310 - DNA, 1372 bp, Homo sapiens
ttttgtcccctacaccctgctatttcagaatagaagttttgaagagatttttaatttaatccttcctgtcctcctttaaaatgattaccaataattttactaaattatcagaataacttatcctgctgaaagtccagctcaatggcaaattgcctaaacgccaaatttgtctacttgttttatgttagcaaatttgaaattcccttttttcatataatttatcatgcaacatttaaaaatctcagatttattttgataatatataaaaagtaaatcttgaaaacaaatacaattgtaaataaaaagctttgcttttgggttacactttttctgctaagaacggctccatcatcacccctcttatgctgcagtaaaccaatttttttttgccttttcttcagattcaaggaaaggcaaaaaaaaaaaaaatttttttgctgcattaattgccaacaataagattttacaaaatgaccactctgcaaaatgtattgtgctcagcacaaatgtggatccaatgaaaatacaaattccctgatccataatataaataccaaaaaagggtaagatactactatgcaaaacaacatcatatgctgctgtgatgagagctaaattatgtggtaaagacaatttcagcgcatatatatatatgcgctgaaattgtcttagcatgtgtatttatatatgctgtgtgtatatatatatgctgaaattgtcttagcatgtgtatttgtgtgtgtgtatatatatatgctgaaattgtatcagcatgtgtatttgtgtgtttgtatatatatatacacacatatatatatacacatatatatacatgatacatatacatacatgctgatagatacatactgatatatgtatacatacaaatgttgtaattgcatatacacacacatatgtcagcatctacctatctgtttgtctatctatctatctatctatctatttatctatctatggagagagagagataatatatatgggcaaagagaacagaggtgagatgagggcctataatagctcttagtcaattctgtgaacatggaaagcagatgtttcaagtgatggctgcctgttcagatctgagaaatatgaaggttttgtgatctcaagagaaaccagtaagatgcaacttatcatatcataatacattctcaatagaataagaaactaaaaaaaggaattgtaacctttgttagtaaccattcattacagaaaaactatacaaagactgtacaggaaaggaaatgttctagtatgctatggctaaggtatgaacaatattgttattrtcaccataaggtaaacattgagtatcaatttaaaagcctcattaaaaaatgaaaaatggatg

SEQ ID NO: 704311 - DNA, 1092 bp, Homo sapiens
tattaagatatggaaaaatggaactcatttgtaatttcaaggaaaccaatttggccctaaagcccccatggtttcaatcttaaataaataaaattatacatagtcattttcccaatttatcttccaaaaaacagaactaaataatcttcagtcataaaaataggtaaacaacaacaatatatagagtcatcacagtgttaacttatttcaatgttcataaattaatattgaaatttaataaaattgggcaaatatttgactatcaactattttctcaatataaactgttttcctccacatctcatataaacgttcaacagatgcatcaagcaacttattttcttacagtttcttgtgttgcttgaaacaaaccaggagctatttttgtttaaaagttttatttctatatataatcattggttttttttaaaaaaaatattttcatagtttttggagaacaggatgtttttagttatatggataagttctttagtggtaacatgagtgcaaaaatcaaattttagcctatggctatgatagagacagcaagtttttccctaaaagcttgaatgggactctcatataatagagctgttgggaggagccttcctagccagtgacttagttttgaggttaccccattcatttgcttgcagtcacactgggagtagtgatgtgtaccatgtctagacctgtaccactgaacattcccatagacgatgtgtttctttcctccccctgctacaggcccagggtccacttcagaagccccatgataaagaggctaacccatcygcctatgatcctcaatgtgtgtgtggaacagagtccccaccccacaagtggactttggtagacgttattgtcttataggacagaaattctgcaagtgtatctattaccgcaactcacattgtctaaacaatggaacatcaataatattcttcaaaataaatgtgaagttctttatgtatagcaatgaagtttatgaaaaccaggtgtttcttaattttgttttgaaataatttccaggatgtcaccaatattattaacatgcaaaactagtatgtaattgtgaattacaaagcttca

SEQ ID NO: 704312 - DNA, 921 bp, Homo sapiens
ctccttaagtctcctaagtaataaaaactgtaaaatgcaaataagccttcgatgacctttactaacttttactaaagtatcaatgatgacttggttgtttaaacagctgacatttgggcaatttgagtatgtcaaactcaataatactggttttcatttgcaagatccacttaaaacttaaggaggctaaaaaacatcatttaaaataccctataaattatcatcatatatatcatacaaaaatatcctacttcagtaaatattgtaatgttatacattttatgagaaacaactaaaatgtgtaaatagcccagtaataaagttttataatcttttaaatcatacaatttttctttaagacattatggttaaatattctcttcgttagatgtggcttacccgtggattctagagaagaaagtagatgggagcaagtgtccaacacagcagcagctggaaagaaaaataaagaattatgttctttacctaaaacacttcagttgactaagtgtgcgtttaaaaactaaagagttgataactttatcagagttaataagaatgagaaatatgtatgtgcatttacaatacaaaattactatttaataatttacacatggcattaattctaattgtgtttaaatatcagagtttytcattcttcattcatgtaatcaacagccacatgctaaggtactagaaccagcactggaattacaagatgaagatggcatggtccacctcccaacagtcatatgctataacctaaaaaaacagacaggcaggcaatgtccatatagagtcaaagataccatgacaggtatacagcagggcactacaggaacacatagaagggacatctacccacttttatgtcaatatcatgggctttctggtggaggagataacatagattgatacctg

SEQ ID NO: 704313 - DNA, 630 bp, Homo sapiens
ataacttctgtttatcctccataaaagtccatggcccccaagagcaaccaaatatttcctttggcaaccgcacttctgatatatgcataatctgcagacatgcacacaccctgttggttctgtctctctagagaaccctgactcctacaggccccagctacctggtatctgtttcttcagtctgctcatagaggacagccgcagtgtacaaggacatcagcacacggaccccttgttcaccacctgtccccttactatcttaytcttggcaacttatccatgacaataggatgggatatgtttttctctgatttgggactttgattttgttggcagtggtgggatggcttggggactgtgggggacagccaaggaaaggctaatggaaatcatgctatcccattgatgaactgtgatcccagcagccttgacagggtaagtataaatttggttcctctttggggcgatggacttttgggaagatatcacagaagttatgggcaacatccccaagaaaaactctcttgcccacccctgtctacagggatgtgcaggcccctgaagagcagccaggcacctggagaaagaggcctcctgtgtgggagaaggcactggagatttaggggctca

SEQ ID NO: 704314 - DNA, 885 bp, Homo sapiens
tttgcaactctctggaggcatctttacctttacaactttgcattttctctgctattcccatgtaagttccctgaaaccctagtaccattcacagcaggatttcaaaggttgcctgttgcgtgagcattctataggatcccaaattatctttctgtgcaaatatgaattgttgtgatatgtccgtagagayggcacaacctcatggctaagaatgatagttaccagttctagagatcctactctaattgctctagagtgggggcctgaacaccagtattacaaaaaagacaaaagaaaaagaaggaaaaaagaaaaaagaaagagagaaaatcaaagctaccttcatcatgtatgaatttgagcaagtaacacctttgtgagtccccaggccccagtttctcattggtaaaatgaggataacaattacacagaccttgttgggctatgtacagaattaaatgagattatgtacctaaaaggcttgtggcacagtgacacacacacacacacacacacacacacacacacccagagtacttcgtggttatttctaggctttactgcttgaaaggctgaaaagatgggtggatgagaggtgccctgaggttccttccaactctccaagattctgtgatactcctccttgggtgctgaagacactttggcaatgtttggatttccaaacggttgcttagaaaactaagggacccacgaagcccaggtaagcctcagggtctttcccaggaatcgtttatttatttgatcttagttctgacctagagcctccaccttctccatccaaatcaccacagtggtcgaaaagggcctgtgcttgggaaatccttcctttgttggcgaatcttggacccaaaccctgcatttggg

SEQ ID NO: 704315 - DNA, 885 bp, Homo sapiens
tttgcaactctctggaggcatctttacctttacaactttgcattttctctgctattcccatgtaagttccctgaaaccctagtaccattcacagcaggatttcaaaggttgcctgttgcgtgagcattctataggatcccaaattatctttctgtgcaaatatgaattgttgtgatatgtccgtagagacggcacaacctcatggctaagaatgatagttaccagttctagagatcctactctaattgctctagagtgggggcctgaacaccagtattacaaaaaagacaaaagaaaaagaaggaaaaaagaaaaaagaaagagagaaaatcaaagctaccttcatcatgtatgaatttgagcaagtaacacctttgtgagtccccaggccccagtttctcattggtaaaatgaggataacaattacacagaccttgttgggctatgtacagaattaaatgagattatgtacctaaaaggcttgtggcacagtgacacacacacacacacacacacacacacacacacccagagtacttcgtggttatttctaggctttaytgcttgaaaggctgaaaagatgggtggatgagaggtgccctgaggttccttccaactctccaagattctgtgatactcctccttgggtgctgaagacactttggcaatgtttggatttccaaacggttgcttagaaaactaagggacccacgaagcccaggtaagcctcagggtctttcccaggaatcgtttatttatttgatcttagttctgacctagagcctccaccttctccatccaaatcaccacagtggtcgaaaagggcctgtgcttgggaaatccttcctttgttggcgaatcttggacccaaaccctgcatttggg

SEQ ID NO: 704316 - DNA, 1993 bp, Homo sapiens
ctgtactactaagcactttgcatacagtcttaacaagcattctttgagactattattcccattttatagattagagaggcaagcagaggttcagatctttgacctaggccccataggtggtagaaatacaatttcaaactggatttgtctgattctaaaagtctattcagctaatttataaattgtttgatggttgcaaaccttaaaaatgaaccgcacatttggaccatcattctggatgttttgtgtaatatttctgtttctgttttagaatcagacagacctagttttgaattttggttctgccatttaatagctgtgggatctcaaatagcttaatatctctaaatgcttttatctgcctaagtaataccaccttcgctaggatcaaataatttgtgtgaagcgcctagcatagtgtaagccctcaataagtacttgcttaacaacatcagttttctcagcaagtttgtttcaatctataattcacattcacaacagttaataataacaatttatattccttgattattaaaaatgaagtatttgagaaatatattaggtctgattatcaaagggttctgtttaatgaaattacttctgattttatttgctaggctttatatatctggtggtgggtagatgagaatcacagttagactagatgactcctaagaatgcttctaaatctgtgatttctgtgattttgagaaagccagtgcattttacaaacacataaccatttctcctacatagttatggcattttggaaatgttacgcatagaaaattattctctattctttgttccagcccacacagtcactctaaggagatcattaaaaactattataattatgactacagctcctctttgtccaaaatctaagctgaaatgatctgttgcaaattcaaagtcacaggctacaactctgcttggtacagtaagacaatgactccaattttcccctactgacttcccagcccacggcacctgtttcaaaatgccagctcctcatcccctttcaactggaggctgccacagtcagcttcaaaggcaaaggctgtgaatattgagcaagagctttctgagatggttaattactccaaacagcratgtcctggctcatcttttttcatttattatgtttgcttagttagcttttatgcttgccatctctgcctgtatgtgtttagacaccaaaaagcaggccaaagtcaacatggtcaaaggcttttgtgccatgaggatagagtttcctaaaacgtatatgtccatggtccttggagtggataattaaaattcaggctcctgggtctcacttgagatccacggaatcagaatctctagagggagtgccaagaaatctacattgtaaaaagtactacaggtgattctgaaggacatagagaaatgttgctacttcaccaggtagattccatgattccacatgagtgataatgtggtccagtccttgtctgaccatgaacggagagccttggggtcctagtttcacacagtggattctagtagctggaattatcttcttgttttcactcatctagacacagccttttaaaaggacatatcaactccagtatgaggttttatttatagtggacgttcaatatttatttgttaaatcaatgatcatctgtatcattttcttctggaaatgacaacaaatgatactttgaaagttctaaaaatctaaatgtttaaaaatgagtgggctattataaagaacaccctaaggtgctgtaaagaaaatatttcatttttctccttgttcctctgctccagataatcattagaatcaattcaaatcatgttacatacctcaaatagcaatttgggtttggcaatgcaatttgttcatctcgtaaaagggttgattattgaattctggctacatagtaataagcaagtaacatttttttttcagatgcaaaattatttttctttctggctatagaggtttatttaattacct

SEQ ID NO: 704317 - DNA, 605 bp, Homo sapiens
aaagagaaaaggcactgaaaacatttttttttttttggtcttcaactagatcacaccatgtgttcttttaaagtgtaataattagtttctgcagtatacaaaccagttgaacagttaatatttaaaaacttggctgggcgcggtggctcacgcttgtaatcccagcacttagggaggccaacgcgggcagatcatgaggtcaggagaccgagaccatcctggctaacacagtgaaaccccgtctctactaaaaatacaaaaaaaaaaattagccggttgtggtggcaggcgcctgtagtcccagctactcgggaggctgaggcgggagaacggcgtgaacccgggaggcggagcttgcagtgagccgagattgcgccactgctctccagcctgggcgacagagcgagactccgtctcaaaaaamcaaaacaaaacaaacaaacaaacaaaaaaacttataccacacactcttgaggcagaagtacaaataatgaatttgggcaaaataaataatgtaaatataagaatgtctcagtttcagaaatcacagcacgatctaatttaatagatctaatttaactgattctggtttttaaaaaatacta

SEQ ID NO: 704318 - DNA, 658 bp, Homo sapiens
tgtaccaaagataggtgggccagatttgacctgctagtcatagtttgatgacctttgatttagtagataataatccggaataagaattaaatgctttgttcagcaagattgtgcaatatttcttttgttttgaagaagatccagaagcttcgtgcacttgtgtattaaacataaaagaatattaaggcttcatccactctgtagaaagtatttaagataccctaaaatttagctcctaaacttgagacagtttaatactactctgcccattacagaggataagctcaatactaatttactgaataaatattggtgaaaatctccatattataaaataaattagattagaaatgatctccatatgatggtttatttattactaaatcttaaagaaaacctttataattttgcaaaggccatagcacagattcgaattatraaatggatgtaaaagtagaatatagtttagtgaattactctttctgttgctagtaagatttgaatgtttgttaactgcattactgaccatcaacaaaagtataaaattccaaatgtgtggaattccaccgagtgaagctggttatttttgccttcgttgaatgtgtcactcctccttttctggcctatatttaatgaccctcagtgtccttttctggtg

SEQ ID NO: 704319 - DNA, 1303 bp, Homo sapiens
tcacccacctcgtcctctcagtagtgtagtgctgggactacaggtgtgagccactatgcccagcctactcacacatcatttatgcaaatcctattctcctataagcaatatccaattayttgagcaactttctcctcacttctccttcaaatgacagacactacatgttccagggcagcctgtcccacagccttccgcatccccagctccacgctgtgtataatcataataattacatcagccaaggtatcgtcattttagctccttcctccttcaccatggctttccgtttctatttctatataaatagccttgttataaactgtttactgtcagccaactccattcttttctggaagtaggcagagtatatattacaaacataaaaatataataatagacttacctttactctgttcaggcatataaataagatctctgggctgaagcctgaggagcgagaaccccgtctgccgctttgtttgcagttactctcctagagtaacggtgcactgtaggctcctaatcacaagtattcattgctcacctggtttgtgctcattactgggcttggagctgtgcaggtacaaggacacaatgtcctctcaccctcgtttgacctctatcttctctcccagtgcccgtcctgagacccatccccacccttcctcatgcaaacatatacgagaagagtttcaatccagctgacagggtcaggttagagtgttggaggagatcattcagtggagatgattcaatcttttaaagattccaggaaagaaaattctgatatctggagtaatcagggagggcttcccagaggacaagtagcttgacctgggccaggaggtgtggcttatttgtgggcggactggcccaggtggtgcagaaatgaggcaaggagaggagaggtgataagatcctaatgatcagcataaacacctgcctgcaggaggccctggagtaggaagcagacagaggtccgaggaaacatccagacagacaactttcctgcctccctcaaggacccatttctttgatttcagagctttccactccctggaaaactgtgagtggtagctagcctagcctgcctcagccaccactgagtggtgatgcagagaagggaagcatttagggcttaagaggccctgctgagatgggaaagtttctcctgtggtcttgatcagagacaattcctcagggttaccatatacccactttgccctgaaatccacatgcagccatcacaacttaaaaaagaaaaatagcgctgacttttcacagtaaaatagcattgcaa

SEQ ID NO: 704320 - DNA, 1303 bp, Homo sapiens
tcacccacctcgtcctctcagtagtgtagtgctgggactacaggtgtgagccactatgcccagcctactcacacatcatttatgcaaatcctattctcctataagcaatatccaattatttgagcaactttctcctcacttctccttcaaatgacagacactacatgttccagggcagcctgtcccacagccttccgcatccccagctccacgctgtgtataatcataataattacatcagccaaggtatcgtcattttagctccttcctccttcaccatggctttccgtttctatttctatataaatagccttgttataaactgtttactgtcagccaactccattcttttctggaagtaggcagagtatatattacaaacataaaaatataataatagacttacctttactctgttcaggcatataaataagatctctgggctgaagcctgaggagcgagaaccccgtctgccgctttgtttgcagttactctcctagagtaacrgtgcactgtaggctcctaatcacaagtattcattgctcacctggtttgtgctcattactgggcttggagctgtgcaggtacaaggacacaatgtcctctcaccctcgtttgacctctatcttctctcccagtgcccgtcctgagacccatccccacccttcctcatgcaaacatatacgagaagagtttcaatccagctgacagggtcaggttagagtgttggaggagatcattcagtggagatgattcaatcttttaaagattccaggaaagaaaattctgatatctggagtaatcagggagggcttcccagaggacaagtagcttgacctgggccaggaggtgtggcttatttgtgggcggactggcccaggtggtgcagaaatgaggcaaggagaggagaggtgataagatcctaatgatcagcataaacacctgcctgcaggaggccctggagtaggaagcagacagaggtccgaggaaacatccagacagacaactttcctgcctccctcaaggacccatttctttgatttcagagctttccactccctggaaaactgtgagtggtagctagcctagcctgcctcagccaccactgagtggtgatgcagagaagggaagcatttagggcttaagaggccctgctgagatgggaaagtttctcctgtggtcttgatcagagacaattcctcagggttaccatatacccactttgccctgaaatccacatgcagccatcacaacttaaaaaagaaaaatagcgctgacttttcacagtaaaatagcattgcaa

SEQ ID NO: 704321 - DNA, 614 bp, Homo sapiens
tttattttcttaatgcaaataataaatacgtcttctcttatataaaatatggcacatgatgtttaatcgtaagtactactttaaattatttttctrtgagcatgcactatgaagacatacatttaagataaaattctattttgcttggcaaagtcaagctcatgttaaaacatagattgaaccttaatttgacaggcaaaaactgctttcattttctgagttctttaactatttttaaataaattataaaaatatattttctgattgaggtttgtagcacttagaaataacatattatggatgtggataattgttttctcattaaaaagatagatgtaattatctctatatgtcctttttttaacacaattttccatagtactaggatcatcctgaggtagccaacaaatctgatcaaataaatgagtctattgtactcatagaacatcttgaggcacattaaaataattattaccaactttatgctaatcactaatttcttacatttaatattactaatgcttccccatctttaaccactgaactcttgtggatcttaaacaaaatgtaaaactgaggataaaaacaatttaaaactatagattaatcaaaat

SEQ ID NO: 704322 - DNA, 551 bp, Homo sapiens
tggggtaggacataagattttatgtttctgacaagctcacactttgagtagcaagatgtagagtagagcatactgactagttgctaggaacctgagggatcctttcattgtcaataactgtaactgcaatcttaggtaggcctatggctgcagttactgcatctatgcaaaatataaattggggctgggtgcagtggcccacacctataatcccagcattttgagtagctgaggcaggaaggtcgcttgaggccaggaattcgagactagcctgagcaacaaagtgatccgtatctctaaaaaaagaaaaaaagggaaaaaaaggccaggtgtggtggggtgtatgtgcagtcccagctacccaggaggctgaagtgggaggattgcttgagcctgggagggcgaggctgtagtgagatttgattgcaccactgcactccagcttgtgcaacagagtgagaccctgtctcaaatacataaataaataaataaattggrcccagtcattgctaatggcacttcaagcttggcctttctgagatttgggggat

SEQ ID NO: 704323 - DNA, 860 bp, Homo sapiens
tccctgtaagattggttgctgcaccctgcaatctctaccactaaggtttggtagggttcttgggattttgaaagcagcrtgtatagtccttaggaatattactccaattcatttatcagacatgctggaaggcttccagttttgagcaggacacgagtgagagaggattctctaataggtccaagctggcattcacaccaatttatattgagctcccaccactcaggccatgtgactgggagatctgatatagctagaagaatctgaagggagtgaggatgctctgtggattctctggcaatcaccacaggggagtttcagctcagacccccagagttctagatcaaagctataccatctgcagcagggaatagcttgccatttgagagtatcttctgtcatgctgctgggtgtgcctgagttcctgaccacagaatcgcaagtgactatgagattggagctgagtattatgaactgatatttttcagatgcactaagtcatgctgaacattgtatattcagaattgggtccaagaagattcagaggtggcctccatgggaagcccaaacctgcaagactgctacctttgacacaccagtgccacctcctcaacttatacccgtggcctatggcagaatacagaggggtccctatgattaacagatagaggaggaaaaactgaggcttacttcatagatggatgggctcacttatgttgatgctaaacaaagcaggaatgctgctgcccacatccccactcaggggtggtcatgagggacatgtgggaaggtaaatcctcccagtgagcagagctcatcaccctaaatggtcaagtttgagtggaaggagaagtgggatg

SEQ ID NO: 704324 - DNA, 2067 bp, Homo sapiens
tggaaatataaaatgtattgacataggtgactcttagaatctacagtggttgctgaaatgaagagcagtaataacagaaatgcactgaaataagacaggagataaaaatagtgaccatatgttctcatcaatatagtaaaaaaaagaaactgaaaatttccagcttgattcgacatgatgttggaactatgtgtaggcatgtaattaaggagaaagagaaactggctatattttgtgttttaacagttttttttaacagagcaaattaatagctttatgatggaatggagagtcgcaatacactgagacagtatccactaaaatctactctgtgttgaggtattgaaatctcctttttttcttttgttttcaaagtagcttttggagcaaatttcaatcccatacaggttcattgaatataatcaaaacaaacagtaaattgtcttctaggaacagcaacaataaaaaaaaacatttaaaaagagatcatttatctcattttttacatgaaaattaattggaaaaaagaacgtgttctcactgtgatagagtggcaagttcagccctcgagtcgctaatctatgggagccacaggcagaggtgacaggggacacaaagtagatggtcttcttgtatgtcactttgtgtgtattatttgaagaatgagtgtcacattaaaatgagtgtcacatttaaatgccagattggtgctgtcatatgtaactgaacttttcaacaaggcagaaggatacttactgagggatttggaaagctgaaaatacatgactagggaagttaattataaataatacaatctgtgtatgcaaataccaaagaaacttgtgttaaattaaatcactggcaactttaaaagtttgtgtttcttcaacattttgtcccactggtgtacttcatcgaaatatattgagtaagttaaatgaggaagtagtgttattcacaatgccccttcagagcctttaaactaataaaatgctacgcgttgctccaaacagagtcccaccagtacataaaggatacattttgccaaaaaccatatagtctgtagactatagggtatcacagtttaaattttgaagcttatctctcacatattaaaccaatgtgatcagctgaattaaaaactgtaatttaaaaattgtaattaaattctttgatacacatgccccagaatggacaccatttgctcagtactcaggaagctaaaatttaaataacaattctgggtacttctgaggatgaatacaaaaattgtatatacaaaagcaaattaaacacaactgatgatctacccttcaaggttattctcaattagaaaatagcagtcttagtcatgagggtaataagaagtgtgactatcattgcaaaaaaaaatgtggtattaatatgtcaataactttatgtcaataacttaaagttctgaaagaaccaaggctcttaaaaacattggctcatgatgatatagacaaagtaatttaaacgattatccattgctgggtgaaaacataagaaaactcatttaacacaygttatgcatgtcctttgggaaattccagtttggaatcaccttaccctgaaaaaagatgagttaggaatgtattcaggaagataagttattgaaaaatcacaagttctatttatttatattgtgtttatatcgtcagcttaattttagtaaaacattcatataatgagagtgtatttaatacagaagctgttataataaaacatcataatttgtgagaatttgaagcaattttgattaacataagaattttctctgcccctccattattccatactgtggataaagcccagaacctcggccaatatagcttgtttgcaaccatctccactgacatatatttagtaatgcatttaacataggtttcagagggtttttcttccttcaagatagactacctttaggaagaatccttagggatcatctagtaaccttctccttttcttagatcacaaagctacttatcccaagacagcttatgtaaaattgttaattcttaaaacatttggtataagagaattctt

SEQ ID NO: 704325 - DNA, 633 bp, Homo sapiens
tatgttgccaagtttaaaaggctacttttcctttagtccagcctcctttttcctcaagaggattctgcatttgctcttcttcagtctttaggagttactctttttgttagtaaactctcagaagtaatggagaaaactcttcagtgactacatttgctggattttgctaagacatcatcacatgtgtggtgggatacatttaatttgtgaatgcagccttcagacaaccctacctatttcactatggccacctggtctcctatgccaggcatcacccacctcagctggcagattatagggaaccttccaagtgaagccaagtgtttattatctttgcttacctacaataaatctgtttgccatgggcaaatattacatgctactaaatatatattttcaccttgtgtgttagcccactcttgcattgttataaaggaatacttgagactggataattcatacagaaaagaaattgaaattggctcatgtttctgcaggctgtacaaacatggtgccggcatctgcatggcttctggggaggcctcagggggcttttactcttgggaggasaagcaggagcaggcaggtcacatggtgaaagcaggagcaagagagagaagtgggaagatgcca

SEQ ID NO: 704326 - DNA, 1198 bp, Homo sapiens
aagtacctccaggcagaagtacctgatcttcatctgtgactctcagcacttggtctgtcagttgtctctcagtatccctgggggttggttccaggagcccccacagatatggaaacccaaggatgctcaagtccctgaaataaaacagaatagtatttgcatataacctatgcgcatactcccatatactttaagtcctctctagagtacttgtaatacctaacacaatgcctacacatcacgtcctttgcaaggattcagtgtattactcagcatatggtgaattcaagttttactttttggaactttgtggaactttttctctgaatagtttccatctgcagttggttgaacccacagacatggaggactgaccatacttcattgctgyactcattacatggcattgtgatgatttgcttgcatgtttgtctccatctatatacagttaggtcattgaaataaagataatcttttatcagtaggtacccagtaacagtgatgctttccctttaattaagaagtaccaaattcttgccaagtctttaaaaactacctctactgactaccagatactttctacctatatcatcatcttattctatcccatcgaaaaaatggtatatcttattaacaaagaaggaacctcccaaatttctggaccaagcgatagatggtggccatttcagtatcatgaaactcaatagtgcctataccttgctgagatctgtaccaaaggaagatacagaacatctggtgctcaaggtattcaactggttttacatgttaaagatcaacaaaaccaatctaatgttgtgccaattctgtttttttaagtttctataatttgtagcattaatgtctgctttacacctggaaatactcttttcagttatgtcttacaagaaccatgaaggttttgtatgtttgtttgagccagaagtcatttttagtgtattacctttttttttttttttttgagacagggtcttgctctgtcgcccaagctggagtgcagtggtgcaatcacagctcactgcagccttaacctcctaggctcaaatgatcctcccacctctgcctcctgagtagctaggactacagcacgtgcaaccatgccagactcatttttattttttatttttttgagacaggatctcacttgtcacccagcctgaagtgcagtggcacaatgtca

SEQ ID NO: 704327 - DNA, 640 bp, Homo sapiens
aaagaaaagaaaagaaataaacgtcactgactcaatttcacagtattctcataaccaatttaaagtctagaaaccactggaaaattttccatttttcccagtttatatcctaggagaaagcaaatctaattggcctggacactcagcttatggtacagtttacaaatttctggtaacttccactgcttkaaacgaagactgaaattaccaatgtctcaaatagagtagaagtttatttcttgctcacaaaatagtaacgaggctgccgggcccggtgcttcacgcctgtaatcccagcactttttgggaggccgaggggagtgggtcatttgaggtcaggagttcgagaccagcctggccaacatggtgaaaccccgtctctactaaaaatacacaaattagccaggtgtggtggtgcccacctgcaatcccagctagttgggaggctgaggcaggagaattgcttgaacccaggaggcagagattgcagtgagccaaggtcgcaccactgcactccagcctgggcaacagagcgagactccgtctcacaaaataaataaataaataaatagtaaggaggcaggtggcccacagcggcactcctgctcttctaggttgttcgggagcccagaatcctgat

SEQ ID NO: 704328 - DNA, 635 bp, Homo sapiens
taaggattccactaacgagtgaggggaactgaaagtaacaaaagttgggacaaatctttatctccagagagagaagaaacctctcttcccacagtggtctgtggaggcaggcagggtgggctggcaggcaggaaaggaaaaggaagatgggaagacctttcacaaatctgtcctgagctcacccagtggttgttctggagtccgcccccagaaccacgcccccgtcaaactgcacggccatgatagtggtctgggaaaagggaaaaaggagtaagtctacattctccagcagacacaaacctcaatgatctctctacctagttccmaaaatacaaaatctgtccgtcgctgaaccattttcaaatcttataggggcctcagcaccccgcagaataccagaatgccaaccctcaaatctcaaaagactcatcccgtacttaagcccaagatcctcactagcctcgcaggatttcagaatttcaaacttcagcccaccctccacctcccactacgaagctaccgcaccactccaccatcttcggggtacctctccccattcctggagcacaacacattccacctcctctccacccctgccagatctctcaaccccactcaggctgtatcttcccatc

SEQ ID NO: 704329 - DNA, 1634 bp, Homo sapiens
gaaaggaactcccacagtgcagtggcgggctgaagggctcctcaagcgcggccagagtgggttccaaggccgaggaggcgccgagagtgagtgagagctgccagcacgctgtcacctctcaccactgcactccagcctcggcgacagagtgagactctgtctcaaaaaaaaaaaaaaaaacaagaaaaagaaaaaaaacttctgcgcatccttcaraaagactgtcctcatctgttccccgctctggacagcctgcactccctccacccccgcccgggccaattgctgttagcggctgtgtcttctgactcaaacctctgtaatagcattcctgggtaatacctgtgtatgtgtctcctcaactattctaggaaggcaggggccatggtaattcgtatgtgtccccatcgattggcatagtgaatagcataacataggcacggatggatgggtccatagatggaccgatggatgggagcgggtgagtgagtggatgttagctgggatgggtgggtgaaggagatggatagtcagagacattggaaaagggaaccctgcgaagatcaaatgcaaacaccaggaggagctgacacgctgcagtgaagaagcgggagggctggccacagaaggcggcacgctccgagtggagcaggtgagcggcgcgcactgaagcaagcatcacgcaattgaaccgctcacccacgtgttcccccccaccatcctccttcccagacggcgcttcagctcattccaccgcccccagcagcccggtcgcccccaccgccactgagaaagcaaacaaaggggaggagacccctgcaggttctggatgccgaaggccaatcgaaagacttagatcccctggaaggcgggcgccttggtttaggggggtccaatcggtttcaaggggttgcagcggggcggggagatgggcgggaggagtgggagctggccccgcgcgcgggggagggctaccaggctgggaaggagcgcgaagggctggggggcggagccaatggccccgcgtgtctgctaggagagggcgggcagcgccgcggcgcgcgcgatccggctgacgcatctggccccggttccccaagaccagagcggggccgggagggagggggaagaggcgagagcgcggagggcgcgcgtgcgcattggcgcggggaggagcagggatcttggcagcgggcgaggaggctgcgagcgagccgcgaaccgagcgggcggcgggcgcgcgcaccatgggggagaaacccgggaccaggtaagggaggtggggccacgcggcggggcatgggcggcggctcggggcgggggctgggacggtcccagacgagggcgcagcggagaggatctgggggccggacgcctgggtccctagggacagccatccggggccgcacgcgcaggtcctcgaggataatgagggtgggggggaaatgcccgggcccctgcagaaagcgaggcctgagggggatcagaaaaaccggtgtcggggttctcgcagggatgtggggccagactactgggctctcccgtgcaggctgcgatgcagggatggaggaaggaggagcaggtggctggccccgaggggtcgtgtacggggaggctggatgccgggacggggg

SEQ ID NO: 704330 - DNA, 855 bp, Homo sapiens
tccagaatctataaggaatttaaacagatttataagaaaaaaaaaccatcaaaaagagggtgaaggatatgaacagacatttctcaaaagaagatatttatgcggccaacaaacatatgaaaaaaagctcatcatcactgctcattagagaaatgcaaatcaaaaccacaatgagataccatctcacgccatttagaatggtgatcattaaaaagtcaggaaacaacagatgctggaaaggatgtggagatacaggcatgcttttacaccgttggtgggagtgyaaattagttccatcattaccaaagactgtggcgattcctcacagtgaccaattgaaattatattttacatgtaataaaaccattttctatttacaaaaatcaaataaattctcgtaaagcaaacacgcctccatttatttcccactttttgcacaaaattggattttcactgtaactgaggtgtgctaaatgcatggttaatctagtgtcagcatcatcttcctataaattacagatgccttctgtgagcaggtctcctgcaggctcatgtatgttgtattttgaaatctactttagaggatattttaagacttttagaaccagaaataccatttgacccagcaatcccattactggctatatacgcaaaggattgtaaatcattctactataaagacacatgcacatgtatgtttattgcagcactatttacaatagcaaagacttggaaccaacccaaatgcccatcaaggatagactgcataaagaaaatgtggcacatatacaccatggaatactatgcagccataaaaaagaatgagttcatgtcattttcagggacatggatgaa

SEQ ID NO: 704331 - DNA, 855 bp, Homo sapiens
tccagaatctataaggaatttaaacagatttataagaaaaaaaaaccatcaaaaagagggtgaaggatatgaacagacatttctcaaaagaagatatttatgcggccaacaaacatatgaaaaaaagctcatcatcactgctcattagagaaatgcaaatcaaaaccacaatgagataccatctcacgccatttagaatggtgatcattaaaaagtcaggaaacaacagatgctggaaaggatgtggagatacaggcatgcttttacaccgttggtgggagtgcaaattagttccatcattaccraagactgtggcgattcctcacagtgaccaattgaaattatattttacatgtaataaaaccattttctatttacaaaaatcaaataaattctcgtaaagcaaacacgcctccatttatttcccactttttgcacaaaattggattttcactgtaactgaggtgtgctaaatgcatggttaatctagtgtcagcatcatcttcctataaattacagatgccttctgtgagcaggtctcctgcaggctcatgtatgttgtattttgaaatctactttagaggatattttaagacttttagaaccagaaataccatttgacccagcaatcccattactggctatatacgcaaaggattgtaaatcattctactataaagacacatgcacatgtatgtttattgcagcactatttacaatagcaaagacttggaaccaacccaaatgcccatcaaggatagactgcataaagaaaatgtggcacatatacaccatggaatactatgcagccataaaaaagaatgagttcatgtcattttcagggacatggatgaa

SEQ ID NO: 704332 - DNA, 1522 bp, Homo sapiens
gcagaatgttagaattttcactataaaaccaaacacgtcatatatgcacacccatgaagtgtacaaacagtacatactaagttatctcttaacactatttttcctttttctggtgttttgttgttgtttgtttgtttttgagacagagtctcgctctgtcgcccaggctggagtgcagtggcacgatcttggctcactgcaacctccgcctcctgggttcaagtgattctcctgcctcagtctccccaagtagctgggactacaggtgcatgccaccatgcccagctaatttttattgtatttttagtagagacgaggtttcaccatgttggccagggtggtctcaaactcttgacctcaggtgatctgcctatctcagcctcccaaagtgctcagattacaggggtgagccactatgcccggccaaatctttaatttctaaactaatttggaaagacagaaaaattcgtatcttcctatgtatgtaatcaaaaaatagtagtcaaaatattcattgcattttcactgtcactcaatcttttgccaatcataatctatttttttttagtttttatttttagagacggggtctcattcctgtcgcccaggctggaatgcagtggcacaatcatggctcactgcagcctcaaatttctggactcaagaaatcctccagtctaagcttcccaaggagctgagattacaaatgcgagccactgagcccaactataatccgattttttatttgtatatctaattattatataattttatatataattgcacaatatataytttatgaaaagtaacggtttctaagatgaagaaaatctaaccccttccatgagttccagtatcttattataactacactaagctacaataatagcttaatattaaacattaatgtttcttcgacctaaggaagctgatttttaaaaataataaatattaattttaaacacagtattaaagtattaataatcaaacaaagccacgcagtgaaacgacatttgaattttgggaaattttctttttttttccttttcttttttttttgagacagagtctcactctgtcgctcaggctagagtgcagtgaggaaatcttggctcattgcaacctccacctcccagattcaagcaattctcctgccttagcctcccaggtagctgggattacaggtgcctgccatcacgcccagctaatttttgtatttttagtagacagggtttcaccatgttggccaggctggtctcgaactcctgacttcaagtgatccgcccgactccacctcccaaagtgctgggattacaggttgagccaccacacctggtaagaatgttgggaaaattttttcatactaacacattggcatatcagttatcagttggataaaagttttcttccatataggaagttataaaatgccactgcccagagacaaaatcttctgaagagttattagatgaatggctgacaacatcgaataaaaatgcacaaagaacattgccataataaa

SEQ ID NO: 704333 - DNA, 1125 bp, Homo sapiens
agagatttcattctaacagcatcctctgtagtggtatatgtcaggggctggtaagccatgtccagaggagcaggctgcatctagtccaccacctgtttttgtaaagtttatcagaacacagtcatgcccattcatttacaaattgtgtatggcttctttccctgcaacagcagagttgagtgttgcaacagaaacctatggcctgcagagtttaaaatatctaccctttggccttttataaaaaaagtttactgattcctggtgagtatattaaaaagttaggaaaacctaaatcttccagagtggagaattagaaagtaagacgtgttgtatataagacagacagtttgtgtgtgcgtttatttataaatatattattctgaaataatgttgtcgacatatgttgcaggtcttaaaaattggtcaatatatagtgttaatcaaaaaatggcaaattgtaaaatgtagacagaatgtgattgtgtattttgtgcatacaccaacagaaaagggtgctaggaaacctgtggaccaacatactaagtgtggctcttttgatggtggtatcatggatttttaaaaatcttcttggttttctgtagattctgactttcctgtmatgagtatgaataagtatgtatttcttgagaaatgtgaaaataactttatcttcccagatttctcataattgaaaatgttggaataaatggtcctgggacagatctttccattgagaagggcagaagggaaaccctggggattcagctgggtttctgttgcatttctggtaacacacagttgtgaaaagccagtgttggccgttccccaggacagtctggggtagaggaggtcaggatttaactacttgagggtccggggaacagatgtggccacagtccttcctgactcactgttttcccttccacagtccccgtcttctcttcactgatgcacatagatgcctgaccagaggagagatttagttttcgtccaaggattatctgttatgttgcagttctgaaattcccataacgtttaggctagaacacaagtgatttcattatctccaatgtgtatggcttgatagaaatagattccattatgtagcaccttaaatccagataa

SEQ ID NO: 704334 - DNA, 2404 bp, Homo sapiens
tgtagccaaaataatgtggagtaggatgaagataaatatatttgagcacttaaaaatattaaataccatagtaacaagatttccaaaccattgatgggcaagttcatgtcccacaaccagagcaacccactggcgggatgaagaacaggaattttttggatcaataagcaatgcagtctccctatgtttaaaaaaaaaaaaaaaagaaacaaatttaaacaataaaagtgggcatgcataagttgggaagattcagacagtaagtcagatggacaagttaggctttagagatattaggaaaatatttcctaatatggaaagaaaaagtttcacgaagattaaagactaccccaacagaattaatacaacagaatatcaaagatgtgacacaagtttaattatcagtttgttgatagaatagctgcctgaaattttgggaaaacattgtctaagggattagcgattactgtgctagatggagagagaagaaagtcctttcattaaatgaggggagtggtggaggaagatgcattccatagtcccaaaaacagcactgagccggccgttcaacacttagctcatctaagaaggcaattgaaagtagaaggcaaaaacttgtttacagacagactctgcttttaaaagttattcaactcacatgtttatgttgtggtgacagacatgtaaaaacttggctagaagatatgaaattagggaaggttctccaagctggataaatagctgtgaaactactggcaggaaagaaaggcactgcaatgagaaacttagccaagaatatatctaaaaatgctactaccgccagatgctcactttaaaatcttacaccctcagacagtagcaccaaagggagaggtgtccatctgcattcttgaaatgtgcatggaagtgggggaaggtagaaaaatttacaccatatcgtaaagcagaagctactcaactgtgattaggagggaagcccttttgaaatcagtgatttgaaaagataaggcagggtaatacatcattaacatacctataagtaacaaggtcccagttctccatggcaccttcacaaaataaatataaacatttattgagatatakatctatatatctatctatctatctatctatatatatatatatactcttgcatcaaaagtcacaaaattttaaaaagttattacaattcagcaataaaatgaaatttactttaccagctgcaaagtctgcaatagcaatgagatcaattttaggtagaggataaggaacattgaagtagtcgttataaaaaggcaaggttttagcagcaacctataaaagtataaacaaaataaccatctaataaatatgttattataattcatattgaaacacacaaaggaatcctgttgcaagccaatgtatcttaaattactagaaatgaatcccagggagccctacctccgaagactgccttagctccaaactttgaatacaatggccaaactttaatccatttataacttgatatgaaaaatataactacatattttccaacccattccctagagaaattccactcttatattctcttaattattattttgtaaaataacgaaacaccaaggttggcatttcctaaattctattaaaaataaaccaagtagcacaactttcagattaaattataaataactgtactaataattgaccagaaatgtaaattccccaacctggagttatggactgctggaacaatcctcttcaagtacatttacctctaatgcaaattttccttgttctgctttgccaacaggagtgtaaacacagacacacacaccatcttttgaccttgtttctacaaagtcatattcacccacaacaaatgccaccagatatgtagatgtaacaggtgtgcgggcaaacttcacttccactaaattttcatcatcagggtatggtttccggtcaattacattctttaagaaagaaaaagaagaaaaatttaaataggtttacattaataccatagagcaaataccagccaaaaactgtaggctttattgcatctctttccccctttctattctagcatggcttatttctctaccccaattcatccagtgcttttatgctgtctttaagaaggaaagtggtctgataaaacactcatactaagaagctggaggctgaagtgttaaaactaccaaggacctgtgagagaaaagaggaatggacttttctcgaatacttattataagccaggcattgggatgatttaagtaagggcttcatacttttcaactgacataagtttaggagaaaatgactattaataaaaataaaataggggccaggcgcggtggctcacgcctgtaatcccagcactttgggaggcttaggcgggcgaatcacaaggtca

SEQ ID NO: 704335 - DNA, 2404 bp, Homo sapiens
tgtagccaaaataatgtggagtaggatgaagataaatatatttgagcacttaaaaatattaaataccatagtaacaagatttccaaaccattgatgggcaagttcatgtcccacaaccagagcaacccactggcgggatgaagaacaggaattttttggatcaataagcaatgcagtctccctatgtttaaaaaaaaaaaaaaaagaaacaaatttaaacaataaaagtgggcatgcataagttgggaagattcagacagtaagtcagatggacaagttaggctttagagatattaggaaaatatttcctaatatggaaagaaaaagtttcacgaagattaaagactaccccaacagaattaatacaacagaatatcaaagatgtgacacaagtttaattatcagtttgttgatagaatagctgcctgaaattttgggaaaacattgtctaagggattagcgattactgtgctagatggagagagaagaaagtcctttcattaaatgaggggagtggtggaggaagatgcattccatagtcccaaaaacagcactgagccggccgttcaacacttagctcatctaagaaggcaattgaaagtagaaggcaaaaacttgtttacagacagactctgcttttaaaagttattcaactcacatgtttatgttgtggtgacagacatgtaaaaacttggctagaagatatgaaattagggaaggttctccaagctggataaatagctgtgaaactactggcaggaaagaaaggcactgcaatgagaaacttagccaagaatatatctaaaaatgctactaccgccagatgctcactttaaaatcttacaccctcagacagtagcaccaaagggagaggtgtccatctgcattcttgaaatgtgcatggaagtgggggaaggtagaaaaatttacaccatatcgtaaagcagaagctactcaactgtgattaggagggaagcccttttgaaatcagtgatttgaaaagataaggcagggtaatacatcattaacatacctataagtaacaaggtcccagttctccatggcaccttcacaaaataaatataaacatttattgagatatatatctatatatctatctatctatctatctatatatatatatatactcttgcatcaaaagtcacaaaattttaaaaagttattacaattcagcaataaaatgaaatttactttaccagctgcaaagtctgcaatagcaatgagatcaattttaggtagaggataaggaacattgaagtagtcsttataaaaaggcaaggttttagcagcaacctataaaagtataaacaaaataaccatctaataaatatgttattataattcatattgaaacacacaaaggaatcctgttgcaagccaatgtatcttaaattactagaaatgaatcccagggagccctacctccgaagactgccttagctccaaactttgaatacaatggccaaactttaatccatttataacttgatatgaaaaatataactacatattttccaacccattccctagagaaattccactcttatattctcttaattattattttgtaaaataacgaaacaccaaggttggcatttcctaaattctattaaaaataaaccaagtagcacaactttcagattaaattataaataactgtactaataattgaccagaaatgtaaattccccaacctggagttatggactgctggaacaatcctcttcaagtacatttacctctaatgcaaattttccttgttctgctttgccaacaggagtgtaaacacagacacacacaccatcttttgaccttgtttctacaaagtcatattcacccacaacaaatgccaccagatatgtagatgtaacaggtgtgcgggcaaacttcacttccactaaattttcatcatcagggtatggtttccggtcaattacattctttaagaaagaaaaagaagaaaaatttaaataggtttacattaataccatagagcaaataccagccaaaaactgtaggctttattgcatctctttccccctttctattctagcatggcttatttctctaccccaattcatccagtgcttttatgctgtctttaagaaggaaagtggtctgataaaacactcatactaagaagctggaggctgaagtgttaaaactaccaaggacctgtgagagaaaagaggaatggacttttctcgaatacttattataagccaggcattgggatgatttaagtaagggcttcatacttttcaactgacataagtttaggagaaaatgactattaataaaaataaaataggggccaggcgcggtggctcacgcctgtaatcccagcactttgggaggcttaggcgggcgaatcacaaggtca

SEQ ID NO: 704336 - DNA, 2404 bp, Homo sapiens
tgtagccaaaataatgtggagtaggatgaagataaatatatttgagcacttaaaaatattaaataccatagtaacaagatttccaaaccattgatgggcaagttcatgtcccacaaccagagcaacccactggcgggatgaagaacaggaattttttggatcaataagcaatgcagtctccctatgtttaaaaaaaaaaaaaaaagaaacaaatttaaacaataaaagtgggcatgcataagttgggaagattcagacagtaagtcagatggacaagttaggctttagagatattaggaaaatatttcctaatatggaaagaaaaagtttcacgaagattaaagactaccccaacagaattaatacaacagaatatcaaagatgtgacacaagtttaattatcagtttgttgatagaatagctgcctgaaattttgggaaaacattgtctaagggattagcgattactgtgctagatggagagagaagaaagtcctttcattaaatgaggggagtggtggaggaagatgcattccatagtcccaaaaacagcactgagccggccgttcaacacttagctcatctaagaaggcaattgaaagtagaaggcaaaaacttgtttacagacagactctgcttttaaaagttattcaactcacatgtttatgttgtggtgacagacatgtaaaaacttggctagaagatatgaaattagggaaggttctccaagctggataaatagctgtgaaactactggcaggaaagaaaggcactgcaatgagaaacttagccaagaatatatctaaaaatgctactaccgccagatgctcactttaaaatcttacaccctcagacagtagcaccaaagggagaggtgtccatctgcattcttgaaatgtgcatggaagtgggggaaggtagaaaaatttacaccatatcgtaaagcagaagctactcaactgtgattaggagggaagcccttttgaaatcagtgatttgaaaagataaggcagggtaatacatcattaacatacctataagtaacaaggtcccagttctccatggcaccttcacaaaataaatataaacatttattgagatatatatctatatatctatctatctatctatctatatatatatatatactcttgcatcaaaagtcacaaaattttaaaaagttattacaattcagcaataaaatgaaatttactttaccagctgcaaagtctgcaatagcaatgagatcaattttaggtagaggataaggaacattgaagtagtcgttataaaaaggcaaggttttagcagcaacctataaaagtataaacaaaataaccatctaataaatatgttattataattcatattgaaacmcacaaaggaatcctgttgcaagccaatgtatcttaaattactagaaatgaatcccagggagccctacctccgaagactgccttagctccaaactttgaatacaatggccaaactttaatccatttataacttgatatgaaaaatataactacatattttccaacccattccctagagaaattccactcttatattctcttaattattattttgtaaaataacgaaacaccaaggttggcatttcctaaattctattaaaaataaaccaagtagcacaactttcagattaaattataaataactgtactaataattgaccagaaatgtaaattccccaacctggagttatggactgctggaacaatcctcttcaagtacatttacctctaatgcaaattttccttgttctgctttgccaacaggagtgtaaacacagacacacacaccatcttttgaccttgtttctacaaagtcatattcacccacaacaaatgccaccagatatgtagatgtaacaggtgtgcgggcaaacttcacttccactaaattttcatcatcagggtatggtttccggtcaattacattctttaagaaagaaaaagaagaaaaatttaaataggtttacattaataccatagagcaaataccagccaaaaactgtaggctttattgcatctctttccccctttctattctagcatggcttatttctctaccccaattcatccagtgcttttatgctgtctttaagaaggaaagtggtctgataaaacactcatactaagaagctggaggctgaagtgttaaaactaccaaggacctgtgagagaaaagaggaatggacttttctcgaatacttattataagccaggcattgggatgatttaagtaagggcttcatacttttcaactgacataagtttaggagaaaatgactattaataaaaataaaataggggccaggcgcggtggctcacgcctgtaatcccagcactttgggaggcttaggcgggcgaatcacaaggtca

SEQ ID NO: 704337 - DNA, 3240 bp, Homo sapiens
  misc_feature 1630, 1631, 1632, 1633, 1634, 1635, 1636, 1637, 1638, 1639,1640, 1641, 1642, 1643, 1644, 1645, 1646, 1647, 1648, 1649,1650, 1651, 1652, 1653, 1654, 1655, 1656, 1657, 1658, 1659,1660, 1661, 1662, 1663, 1664, 1665, 1666, 1667, 1668: n = A,T,C or G
  misc_feature 1669, 1670, 1671, 1672, 1673, 1674, 1675, 1676, 1677, 1678,1679, 1680, 1681, 1682, 1683, 1684, 1685, 1686, 1687, 1688,1689, 1690, 1691, 1692, 1693, 1694, 1695, 1696, 1697, 1698,1699, 1700, 1701, 1702, 1703, 1704, 1705, 1706, 1707: n = A,T,C or G
  misc_feature 1708, 1709, 1710, 1711, 1712, 1713, 1714, 1715, 1716, 1717,1718, 1719, 1720, 1721, 1722, 1723, 1724, 1725, 1726, 1727,1728, 1729: n = A,T,C or G
tgggattacaggtgtgtgccaccacggccagctaatttttgtatttttagtagagacgggttttcaccatgttggccaggctggtctcaaactcctgacctcaggtgatccacctgcctcagcctcccaaagtgctgggattacaggcatgagccaccaagcccagcttagagaagcttattttttaaaagaaaatacacaaaaaaatcaaaatctcataagtccaattgtaatttttttttggcttttaaaaattgttaatgccctcaaatattctcctatccaatcactgtattttaaatggcattcctccagcaaatatttgttgagcccccactatgtgccaggattgaaatgtcaaattgaaggaggcaatagctactgaagtaaagcaaaaaaaagtactggttatttttccttctataaaatgacctagtaataaccgctttacccaggagagttgctgtaaagatctaataacatgacacatataaccacacccctaaagaatgaggtgttactgcatgttctcactcataggtgggaattgaacaatgagaacacatggacacaggaaggggaacatcacactctggggactgttgcggggtgtggggaggggggagggatagcattaggagatatacctaatgctaaatgacgagttaatgggtgcagcacaccagcatggcacatgtatacatatgtaactaacctgcacattgtgcacatgtaccctacaacttaaagtgtaataataataaaataataaaataaaaaaaagaaattttgcttaaataaatattataataaaaaaaacaaatgaggtgttattaaaatgtttgcaagagaaaccctagtaattccaaacacatattttaggaatggtttcttgtgtagaaaatcctggaatgtgaggctctgctgatttttttaatgcatattctcttcttatgtatgcggaattttttttttttttgagatagagccttgctctgttgcccaggctggaatgcactggcacgatcttggctcactgcaactgccacctcctggtttcaagtgattctcctgcctcagcctcccgagtagatggaattacaggcgtgtgccaccgcacttggctaatatttgtatttttagtagagatggggtttcaccatattggccaggctgttctagaactcctgaccttgtgatccacccacttcagcctcccaaagtgctgggattacaggcatgagccactgcacctggcctatttttgtttttactaatgtttcaagagacccgctttatgtacagaattctggctacaacctaacaaatgagttgctctgttcatcagttatagccaatttaagtaattatgaaaagctcaacaatacttttaactggcaatgaaagcgtcaatagctcacatttaccaccacaacttaggatttcttggtagctaaataaaatgcttctattttgtggggggaaactgtcacataagttgaaattctgcaatgttcaattgatgaaaaggtctctatgttaaatcaaaggtataaattccacatcagtagtacatgaaagagaaagaaaaagccaaaattaaagtgattcatgcccacttccctgagtnnnnnnnnnnnnnnnnnnnnnnnnnnnnnnnnnnnnnnnnnnnnnnnnnnnnnnnnnnnnnnnnnnnnnnnnnnnnnnnnnnnnnnnnnnnnnnnnnnnnaacaatgctcttagacaactgaacataccacaaaactaggtaagaacatcagagtagtacgatatctgcatgaaagacctgtatacgggtaatcatttattaataaccaatacatatttaaaatgattagctggctactaaaattacctgcctaaatgagagacagtaaattrcaaagtctataatgagctattcaaaatctgtaacacataaagtgaaactactttggcttacaaaaaaaatgcttctcataagtcttcatgtttcaaaacaaagacgtcatttaatgaatggcttatcttttaagcagcaatattccttcacactatttcaccaaaacatacctaaatagcactaaaacctttgtgtccaactggcgatttatagcactaaagttgaacaaaaaaacaaaaagaattctttgcctattcagaagttgacttaaaaattcagaaacatggctgggcacggcagctcatgcctgtaatcccagaactttgggaggccaaggtgggtggatcacgaggtcaggggttcgagaccagcctggctaacatggtgaaaccccatctctactaaaaatacaaagattagctgggcgtggtggcaggcacctgtaatcccagctactcgggaggctgaggcaggagaatcgcttgaacccaggaggtggaggttgcagtgagccgaaatcgcgccattgcactccaacctgggcgacaaaagcaagactccatcttaaaaaaaaaaaaaatcagaaacacaaagaaatgaagcacttactggggtatgctccaatgggtaaaatgaataaaaacctttctgagtttgaagtttatgccagcaaaataataactgtggtttagttactggtcttaatcattacctaggcaaccacactttcatccatcaacatctacagtgaatttcacagtagccaagcagttaatccaccaatgtcaagatacctgtacaacattatacatgccaaatcacacagcacattactactgcaaccatttgagagaaagtatttgtgcattttggaaaggcaccatgcacaacatccaatttcaagtaccttccaactcctcctgtgtttaggggaaactcatctatttatactaatgaattaagctgtttcttgaattgctactaattttttttttccaggatactaccatttctggaagggtgggagggaggaaccaaaggaacaaaggtacttatcttaaaaatagaaatccattcacattttaaaaattggtcagcatcttgtcttatattagagatgcacttatttaaaaagttgaccaataatgggataatctatgtaaagtctctgttttagcacttagtgcctcatatgtagtcatcacttaatagatgttaagacatacatatacacacacacaggttaaattgtgctctcatatcatctaacagcattcacctaacagtttataaagcttctgatcagaatgatatgaagtttaaaaactatgtattgt

SEQ ID NO: 704338 - DNA, 923 bp, Homo sapiens
ggccacgtgctgggccagccccaggctctcaggatctgacagtgggtgacgcagagccaggccttgcccctggggagctctccagcatacacctccctctcccctcccagcgtgccgcaaagcaggcgtcaacgccattgttaatgcacggaggaggaacctgactgttagacctgggttttccagggttgcacggcttctgggagacggatgtgaccctgaggacagggcacaggccagtgtaatgccaggatggaatgagctgtgatctgtgctgtatagaggcctaggccaaggtgggactgacggatgaccaggtcagccgggtcactgaaaacactcttgggtcctcacctgccggttcccaggagtccggaactgccaggagagtggtggcaggtcccccatcctcagctgggtgggcctggatagaacagcaaggcgagggcacatttccctggccattccctccaggcacagcygtgacctgttcattccaaatttgtggaagtatttccacacacacagaactgcaaatagcagtggacatggtgagaggcgtttgcacatgggataggcaggattttggaggcagagcctccagggcttgccgatgggttagctgcagggcttgagagggaacggagaatccaggatgatgtgttcaaatcggtccattcacctcttccgttccacgcctgtgctgggcactgggagagacagatgcacacaggagccccggccgaggggaggtgtggggggaagcccagagtgtctgggcagggtaggaaacccagagcgtctactgggagctgaaggcttaggtccacctgggtgccgtccaggttctctgcgtgtagaagtataggctgagcttcccggaggaggagcagctgctgttgctggtgaccagcacattcagg

SEQ ID NO: 704339 - DNA, 923 bp, Homo sapiens
ggccacgtgctgggccagccccaggctctcaggatctgacagtgggtgacgcagagccaggccttgcccctggggagctctccagcatacacctccctctcccctcccagcgtgccgcaaagcaggcgtcaacgccattgttaatgcacggaggaggaacctgactgttagacctgggttttccagggttgcacggcttctgggagacggatgtgaccctgaggacagggcacaggccagtgtaatgccaggatggaatgagctgtgatctgtgctgtatagaggcctaggccaaggtgggactgacggatgaccaggtcagccgggtcactgaaaacactcttgggtcctcacctgccggttcccaggagtccggaactgccaggagagtggtggcaggtcccccatcctcagctgggtgggcctggatagaacagcaaggcgagggcacatttccctggccattccctccaggcacagccgtgacctgttcattccaaatttgtgsaagtatttccacacacacagaactgcaaatagcagtggacatggtgagaggcgtttgcacatgggataggcaggattttggaggcagagcctccagggcttgccgatgggttagctgcagggcttgagagggaacggagaatccaggatgatgtgttcaaatcggtccattcacctcttccgttccacgcctgtgctgggcactgggagagacagatgcacacaggagccccggccgaggggaggtgtggggggaagcccagagtgtctgggcagggtaggaaacccagagcgtctactgggagctgaaggcttaggtccacctgggtgccgtccaggttctctgcgtgtagaagtataggctgagcttcccggaggaggagcagctgctgttgctggtgaccagcacattcagg

SEQ ID NO: 704340 - DNA, 923 bp, Homo sapiens
ggccacgtgctgggccagccccaggctctcaggatctgacagtgggtgacgcagagccaggccttgcccctggggagctctccagcatacacctccctctcccctcccagcgtgccgcaaagcaggcgtcaacgccattgttaatgcacggaggaggaacctgactgttagacctgggttttccagggttgcacggcttctgggagacggatgtgaccctgaggacagggcacaggccagtgtaatgccaggatggaatgagctgtgatctgtgctgtatagaggcctaggccaaggtgggactgacggatgaccaggtcagccgggtcactgaaaacactcttgggtcctcacctgccggttcccaggagtccggaactgccaggagagtggtggcaggtcccccatcctcagctgggtgggcctggatagaacagcaaggcgagggcacatttccctggccattccctccaggcacagccgtgacctgttcattccaaatttgtggaagtatttccacacacacasaactgcaaatagcagtggacatggtgagaggcgtttgcacatgggataggcaggattttggaggcagagcctccagggcttgccgatgggttagctgcagggcttgagagggaacggagaatccaggatgatgtgttcaaatcggtccattcacctcttccgttccacgcctgtgctgggcactgggagagacagatgcacacaggagccccggccgaggggaggtgtggggggaagcccagagtgtctgggcagggtaggaaacccagagcgtctactgggagctgaaggcttaggtccacctgggtgccgtccaggttctctgcgtgtagaagtataggctgagcttcccggaggaggagcagctgctgttgctggtgaccagcacattcagg

SEQ ID NO: 704341 - DNA, 923 bp, Homo sapiens
ggccacgtgctgggccagccccaggctctcaggatctgacagtgggtgacgcagagccaggccttgcccctggggagctctccagcatacacctccctctcccctcccagcgtgccgcaaagcaggcgtcaacgccattgttaatgcacggaggaggaacctgactgttagacctgggttttccagggttgcacggcttctgggagacggatgtgaccctgaggacagggcacaggccagtgtaatgccaggatggaatgagctgtgatctgtgctgtatagaggcctaggccaaggtgggactgacggatgaccaggtcagccgggtcactgaaaacactcttgggtcctcacctgccggttcccaggagtccggaactgccaggagagtggtggcaggtcccccatcctcagctgggtgggcctggatagaacagcaaggcgagggcacatttccctggccattccctccaggcacagccgtgacctgttcattccaaatttgtggaagtatttccacacacacagaactgcaaatagcagtggacatggtgagaggcgtttgcacatgggataggcaggattttggaggcagagcctccagggcttgccgatgggttagctgcagggcttgagagggaacggagaatccaggatgatgtgttcaaatcggtccattcacctcttccgttccacgcctgtgctgggcactgggagagacagakgcacacaggagccccggccgaggggaggtgtggggggaagcccagagtgtctgggcagggtaggaaacccagagcgtctactgggagctgaaggcttaggtccacctgggtgccgtccaggttctctgcgtgtagaagtataggctgagcttcccggaggaggagcagctgctgttgctggtgaccagcacattcagg

SEQ ID NO: 704342 - DNA, 2290 bp, Homo sapiens
atctatgtaattacgtgacattctggaaaagggaaaattacatacatagtaaaataatcagtggttgacagggattggggagaggaaaggatggatgggcagagagccctggacgtttagggcagtgagaccaccgtgtgtgatttcaccacaacggtagacccacgacagtgtgcagatgccaacacccattgaatgcagaccacgaaacggtattaattacataaactataaactttcttaatgaaataaatcctgttttaaaaaagtagacagttttgttcagttactgcctactttctgaaatggagatggtggagtgcttccaaggttgtgaggataaaaatagcttagagaatataataactaaaataggtgtgtaaacattgttagactattttattctcattaaaaacatgccttaaaaaaatttgctattttttacgactgggcaagtagtgcaaacacattattataattctcctctagctccactcagaagtcaggactgcagggcttcggtgcaggactgcacagctccacatgcacttgccaaacgcaacaacctctttcagcgtcactaaaatatatcaataggaggattgagtttagacccaacctgtgttttctcccctggaaaacaaaggttttcatgtaacaaagaaggtctttaccgccctcatctgaaacgctgaggcatctctgatgtctgctgtaagtgccgccaggctctctgaaatctcgcaatgggaaaatggactgcagattctgcttttagaaaggcgggaatcagaactcatgtcgaaatgccatgtcctcattcatacacatcttcttttacaaatccaacatgtttagttactttgggattaacatgggcctattttaaagtgcatttattaatgtagcatgggttgtccaaatgcattctggatcctgagccgacatccagcaatgctgagtgtgcgcctgtgtgagtcaccagcactgatgagcctcaggttattgtgttcgtaaaatgaaggggcttaggcttgctccgattttttaaaaacgatttttaatagcaaacgctttttttcttgctacataaaaatgcacaagaaaaacycaaacattaccaatgataaattataatttcattaatataaatatttttgtgaactcaatttatatgacttagttattataaaagaaataagcaatatgaggtggccattaccatcctttcctgttttattttgttcatatgctattgataaatcttgatgtacacagaaaagtagttttaaagaatacttttaaaaaaacttgactttaatttcaagagacttttaaaaaattcctgcaattgctttttaaacattctagaacagttttctgtatcttaaagctaaataactagaaagagctcactcttctcacattctgtattataaatatgtaaatcagaaaaggaacagacaaaatcataaaaacacatgcatgaacaaatgggccttggtttacattgaattggatctagaatgcacataggttatagtagtatttttgtgtgtaattttacatgagtggactgctgtcaaaataaaaattgtctacaagctctattcagtggtatatttgcacaaatggtaaacatatacatagagatcatgggagaaatttatttcatggcttacaagaagacaggttaagttgggacatttaattgtttcattaatgctacattttataatgcacttgtatgggcatggtatttaaatgtattatcacaacttttaaatgctcattgttacagatggaattattagagaaagtactaacttatatcttctttgtgtgtgctttggaagcaccaggaaataataaagcagcccttttcccttttcccatctatttcctgaagaccaagctgtgtttttgcagattaggcctttctgttaacacacacacacacacacacacacacacacacacacacacacacacacgcatgcatgcacactcacgcacgcacgcatgcacacacacacacacgcaatatagcctttaggagtttaaaggagggaaagagaatatgcctggataactctcacctaggtattttctggggagatctagaatcatctaagggggtaagctggactagccaatgggaaatcaaaacgaagatactgaagagatgttcccagaagaggagcattcctaatgggctaggccctagtcacatgcaattccccagatgtggttggtgtggccaaggttccagcatttgacagctgccttc

SEQ ID NO: 704343 - DNA, 1058 bp, Homo sapiens
cacatcatttagtccatttatctctattgtaaatgcttatgtttgcatttacatatatcactatagtttgtgctttcaatttgtcctacatttttgtgattccttgagtcttctttcttgcatctttttgatttttttaatcatttcacttttctctctgttgtgtttgttatactaccagaaacaaatgtcaacagatatctattcatttatatatatatatctagttctcgatgtagactgtatgcagaaaatacatttatttaatgaataaattaatgagtataacaacttatcttagactacacaattagtaaaaggataaatattttttaagagtaataaagactcactaaaatttcaactcaagttttaaatgtatcactaaaaagtaaattctttaatccccaaggagcagtgttttgttgtaatttatcaaaataccttattgaatctagtaaaaactgaaagaaatttcaacagaattattctattttatacaaaatggtgatcattatcattattttcaatcttttccaatacattgttaagataaatgcttttagtatatacacaatgttttcaagtgaagttaattttttcatatttcatgtcacatcatacagatgctaaatatataggcttagaatataagatgcaaaaaggcataaatgctgtatattcattcaagcgtgaacagagtcaatatactgagactatcaccaaccatgcctttagatatacggcaaaaatgtattaaacccattgccccaggaagtccataaagccaatttytattgagaatgactaagatttctgatgaagtagatgctagagaaataatttttttttttttttttttttttttttgaaacggagtctcgctctgtcccccaggccagactgcggactgcagtggcgcaatctcggctcactgcaagctccccttccccgggttcacgccattctcctgcctcagcctcccgagtagctgggactacaggcgcccgccaccgcgcccggctaattttttgtatttttagtagagacggggtttc

SEQ ID NO: 704344 - DNA, 1058 bp, Homo sapiens
cacatcatttagtccatttatctctattgtaaatgcttatgtttgcatttacatatatcactatagtttgtgctttcaatttgtcctacatttttgtgattccttgagtcttctttcttgcatctttttgatttttttaatcatttcacttttctctctgttgtgtttgttatactaccagaaacaaatgtcaacagatatctattcatttatatatatatatctagttctcgatgtagactgtatgcagaaaatacatttatttaatgaataaattaatgagtataacaacttatcttagactacacaattagtaaaaggataaatattttttaagagtaataaagactcactaaaatttcaactcaagttttaaatgtatcactaaaaagtaaattctttaatccccaaggagcagtgttttgttgtaatttatcaaaataccttattgaatctagtaaaaactgaaagaaatttcaacagaattattctattttatacaaaatggtgatcattatcattattttcaatcttttccaatacattgttaagataaatgcttttagtatatacacaatgttttcaagtgaagttaattttttcatatttcatgtcacatcatacagatgctaaatatataggcttagaatataagatgcaaaaaggcataaatgctgtatattcattcaagcgtgaacagagtcaatatactgagactatcaccaaccatgcctttagatatacggcaaaaatgtattaaacccattgccccaggaagtccataaagccaatttctattgagaatgactaagatttctgatgaagtagatgctagagaaawaatttttttttttttttttttttttttttgaaacggagtctcgctctgtcccccaggccagactgcggactgcagtggcgcaatctcggctcactgcaagctccccttccccgggttcacgccattctcctgcctcagcctcccgagtagctgggactacaggcgcccgccaccgcgcccggctaattttttgtatttttagtagagacggggtttc

SEQ ID NO: 704345 - DNA, 1389 bp, Homo sapiens
tagtgagggagggtatttctttcagaggagtgaaacaatagacctctctgtttataatttatggcataatttaatctagccctttcttcctttggtaactgtcatttcttccttttgatttccttgaacttaattgcttcataaaagatttgtcattgtaccagattgttctgaggttaatagtttaagagctatcatcagtgtaccaccaaagataacctagtgcagaaaggatgtgacagataatattacaatgtstgaaaacaaagcaaaatgatctctgacaggattgtattgaatctttcagagatcataataagatatgatatttgaactgctctagttttcaaagctctgtcaatatattatatctgagggctattccataaaatacagctctcctaattttattataatcatttaatggaaatctatttcaaattaaataagcatttcttaaacaggaaaatattggacataatttaaacttttaaatgtaactttacactattatagtgaaagtagcagaaatagtttcaggaaaattcatttctttcttttctttctttctttctttctttcttttttttttttttgagacagttttgctcttgttgcccaggatggactgcaatggcgctatctcagctcactgcaacctccgcctcccaggttcaagcgattctcctgcctcagcctcccaagtagctgggattacaggtatgtgccaccatgcccagctaatttttttaatttttattagagacagggttttctccatgttggtcaggctggctcaaactcccgacctcaggtgattcacctgcctcgggttcccaaagtgttgggattacaggcataagccaccgtgcctggcctaggaatattcatttcagttcaatttacaatacacttgttgtttggccagcattattctaggaatagtgatgcaaaaataagcaagacatggtcactggttttaaggagcaataggctggcaggcagtacaagaaattgttaaaattcaaattcaacaagtaagtatgataaagagctttaatatcaagtgtagtaattatactctctcaactttctcagggtaattttgaagatcaactttgaaacccaacgttcagtgtagagggtagttaggattataattgcaaagctgctgctaggatgcagaaaatagagagacgaaaacacatgggactgtgtggtaaagtaaaaaggcaggagtcttgaaagagaaaaacaggttcaaacaaatccaataaaactctttatgtttatcagatgtacaaaatgtgggtaaccatcctaacttttgagtttctatttcaaagttggaaaaactgcaataatgcctacacggaaaggaggcattga

SEQ ID NO: 704346 - DNA, 1164 bp, Homo sapiens
tcttattaagtatccagagggtttggattaaataaaaaatgacccttctaaattttttttgaaagctttcacactaacaactcttccctcaattcrgcagcatgcatatatgtgggcgaccccatcagagaatccattacatagcaccatcaaggatctgaataacccccttaaaagaaggggagttcttgtttcctgttttctcagcccctgtcacatagcataacccatgctgagttatgtgcacatatttactatgcacatatttattagccaaatcaataaaataatgactgaatgagtcaatggatgaatgaacacacccatctaattgctcctaaggtttgcaataggctcagagaggatgtaagtaaaaaatttccagacaccttaacacctcagaggcaagaggaatttcacgttcattctcttacggtgctgggaagctctccacaatatactaacaatacatgtccatgtcaagggaaagagaacccagggcctccccagacaatgtgtttcatgtttgggcaattgtaactgtgttagagtctttccttctattattaagcctgagtctgtctcatgctacaattagaagaagtgccaggcacagatatgtttcatctagggaggttaattggccatacagacaaaaccagtgtgtgtgtgtgtgtgtgtgtgtgtgtgtgtgtgtgtgtaagcggcaatgtcatctgatggagtcagcaaagtccaagggattgtcttgtctttggccttgtgatgacatccacagctggccatacctaggaaattaatttatatcaaccaagtttacaggataccaatgtataaacttgatcataatttagtcatttgaactgtagaaacttctttctccatgaccaatatgtacctattctaggcatgtggaaaatcaaccggaacttcagctggtggcttaatgagataattttgagacctgtttctcctagactgtaagaggtagatgaaatcctccaccacatcagaggacacctctcagagtatggaatatagtacatcctccaggtcagtggcacttccacagaagagacccattacataaactgccattagtttcctttttctgctcgggaccacgttctgtctgttgcaggatatgggaactttgtatattca

SEQ ID NO: 704347 - DNA, 1386 bp, Homo sapiens
aggagttcacggcacttactaaagaagtcaatgtatgcagggaacagctccttgaaaggaaagaagaaactgctgaaaaatgaaagcagaaaggaacaccaccaggctactattagagcatttggaatgccctgtctccaggcatgagcggtatctcaggatgacagtgatgaagaaacaagtgcagtctccagcaggcatgtccagcgaagctgaagtgctgaaagcactgaagtcattatctgaacagcacaaagctctggatgaaaaggtgagagcgcgattatgagcagcacttgaaagatgtagtttgttagaagaagaattaggtgtcacacacaaagagctaatgattcttaaacaacagaatagtcagaaaaaaaaaacactaacaggtggagtgcttaacataaaccatgaacaagaaaatacatcaaacatgaayggaaagagatcttctgatggttcttcaagctataaggaagaccttgctaaagtaagtgtggtccaagaaatcataaacagtcaagggagcacagccaaatgaaagagcacctggctgccctctccagtcatgtgacagagctggaagaggatctgaaagattttcctcaaatctagaaaagatttcatcaaatttgaagaaatgaactccaaattgcaagaagatgtccataaagccatggcccaaaaggaagacatgaagagagaatcactacttttgaaaaatgtgaccttgctggtcgaccttagacattgcccttggccaagtggcaggcttgctgatcatggtcctggctacagaaaaaaacttgccacatcccactgtagacttagctataacccacttggcctttgtcctgtcactaggaccatctgccaagaacagaggacaacttatacccacctaagtcttaggtgacatacatgcagaatttggtcctgtctgtgacacatgaatcaggcaaaacccaccttcttcacctctcacccatggtctggaaaaaaagtcctgcccacacagagattctcagggaaaaaaatctatctgtggttctatatataggaccatcaacaattatctgaatgtggacctgaagtggcactgtaacctggctccagctgcatgcagccacagttcaggagcagttatgcttaacctgagacatccctgaaggcacacacatctgtgcccataaaggcatgactgctaacattagtctcattgtgaatcttaaagcagctctgtaacctaggtgacttgggtgctgctaaaggtattcagttttataagggaagcaaaccataaaagttcagaaaatttgcagcctaacaatgcgatagaaaagaaaatcccattttctgagaagaaattcaggccagctg

SEQ ID NO: 704348 - DNA, 518 bp, Homo sapiens
tggagtgcagtgtcgcgatctcagctcactgcaacctctgccccctgggttcaagctattctcctgtctcagcctcctgagtagctgggactacaggtgcccgccaccacgcccagctaatttttgtatttttagtagagatggggtttccccatgttggccaggatgatctcgatctcttgaccttgtaatccacccgcctcagcctcccaaagtgctgggattacaggcgtgagccactgcgcctggccagaaattttgttttattttagttgtcattcctacaaattccaggagctgtgatttagtctctgtctgygtgcacgtgtgcgttcatcttgctgttttatgaatgcagcatttgcctaaggatgttaatatagattttttaaaaggttttttctgctctctttatagactgcttcctctatgttaatttttgtaactttcattatttttcttaaatcaaatcttttgtggtgctagactgtcctttcatcattgacgaccaaggtact

SEQ ID NO: 704349 - DNA, 3571 bp, Homo sapiens
tgagtcccatagtccattgagtgttcttggttttcttcctggcccccaagagaatcaaactaatggattatctgtaaagatggtggccccagccttttgcagcctgaaacttctggaagccagagccccattcctgcatatttagacctaaaatgagactggccccaaagggatgcaaccaaacagcctgtgatagactgtctcaatctaaatcagctccaaagcttctcctcacatcactgttgcgtcctattcgaaggattatcctaaacacgtgaactctcccaacagaaggatttccttcgctgctgcacctccttccagttcatctcattcagtgcgttcccctcttcgctccaagcacacagagcatgtgtggaggatgaccgcccagtcctcacttagccagtattttccagtttttaaaatatgaaggttcttgaacctagtctcaatttctgtgccttaaggaaatgaaggataatcgtttctctatttgaattgcttaatttcactaaactctaaattttaagggttattttgaagcaacaaatttcactatttcttagtatctattttttattggtgtgttaaagtacaaaataagtaaatcaaatcctaccacaaaccagaaaaattaatggaatcattggaaatcaagtattcaattggagcttaataatccatcagcttctgaaaacactaagcagtgaagaagcagctcatggatcctgttccagcgacttttgtgataataatatcaaataataaaaaattwaaaaaagtacaagaggttaacaatataatcgtttgggtttaccatcagatatacttgcccatggattacttcttgaattctagccctgaatcgaattgatttcatagaatggtataaaatgtttataaagtctctcctctgtcttgcagggacttgcgtttcagatcagatgatgcttttcatgtatgtccagcagcaagagagtccttcactggtgaaaaatcacgggcctcagagcagattttagttcatctttcatttcaaagcactccttagatatctgcaaattaaatcccctaatttggtgaggacgcccagcttcccaaataacaaggcttttcctttgattctaaccaagtgagccggccctgcaaaagccggggtgcgtgttctggctccaggcttctgagcagcctttctccccacgctgcagcttttcagttaggaagtcagagagaaggaaagagaactatttccaattcaatcacgagcatgtctacgcaccactgaagacagacctttgtcctgttgctttccaaactttaaatgtgaatttttcttcttatgatgactggtgtactctgttattctgaaaaaagaaaaagccataagcaccctgaagtgaggctttcacctgatactaattttcttcttcgttataaggctattgtttgtttgaacaaagaaataggagccattggtggctgtttacattataggaatgagggcagcgatgggggaggaggaggggaccttttcattaatgagctggggacattgattatggggacacactaaagactaaaagggacacctatatttctacattctttccatgcaagtaatatatgatctttatcatctgttaaacaccactcacatatttcaggtggctgtaggttgattgctaacatttagattaaacaagcagttagagtctgatgtttaaaataaaataagacaagcccttgaactctgggaccaggtatgccccgttatctggtcgtacctgaacgagcctgtgttgagcacccaaggccgctgggcacgtctgtggatgtggggtttcaggctcaacccactcgaggagcagggggcttttgggaggtggcagcctcctatacaaaacgagctgccagtaaatatttatagaacaaagaaatgcatgaatttctcctgaattaaacatgatacatttgtacagagcatagttcactttcatttcagtgacccaaaatcctgctgaaagtgttcttccgaaacctcagagcaggaatgcttcctgtgcttggaaactccctggagacacctccaatcggagtaagcagcagaattatctgcacactcatagtcttgcagtcgagtatttttactgaaaaaaaaaaagccgtctgtttgaataggaaacgatgatatcatgtgactggctttctcctgccacccactaatttgacaacagatcagatcagaggaaaagttactcaagtcagaatttttttaaaaaaatcttttgggaacaaactcataaatggaagaaaggggagagtaacaaatgcagactgaatacatggcaggtccaggcttttactatcattgtttttagctcaccaggtaatcaaagcataaaacaaagggtgatttgtcaaagcttatgctgttgtccctgaaccaccaaggggggggtggctgctggactaattcgcttcacgtgggaatcagtgtttaccatttaagggtcctgatagaaagtgcacgattttcaaactggaaaacataaataataacgcgtgttgccactaaagtagtggcaccttgccgtatttctcttctgaatggaacaacctacatttcaaaggacagtctccttccacatgtaaatatttatttgcttgctgctgaggagtgtcaggaagtactaaagaacggtgtttagagtttcagaagcaaattgcttctgcgcacgccttgagtcactggattctgttgagctctctgcctctacgtcagggcttcattaatcttttcttttcttaaaaaaatagaaaagcttttcatttattgcttctaggaagccaggtgcattgcagtggatctcttcggcagaatcactgctttgtgtgaatatttattgtgtaattattgagcacctaccatgtgcagggcaaggcggggggcacccaggcgtccactctcctgcagaagtcctgggtcccaggcccgcatctttggggccaccttcaactgggagggtgttcgcttttctgtgacacagagaggcttaaatccctcagtgatttaaaaatctcgtctgtgagtccaaactgctaggttggcagccaggaagagaaagttcccaggattttcagtggctgaagttctgggcaaacagcatttgcacaaaggagggggcgaggaaggggtgcagggagggctctccaagtgcctgttcggcatcagtttacaagtgtgcttaggttgtatttagatgttacgatgattttaaaagtgaaattttggcattttgcattcaatcctgactaaagctctttggtatatcgacttaaaaggtcttcagattgccaagattttgcagcttggataatatctttggaaaggttaaatgagtccattttctggagctttcgtcagcacaagcccatgattctctgccctgctgagaaaggaggaggcgagctgagttctagcagatcccctgcttccgtctccctcgggcgagcctgtgtcttccgtcccaggaagcccgctgccgagaagctgccgcgggtacatgca

SEQ ID NO: 704350 - DNA, 452 bp, Homo sapiens
gctgaggctggaggatcacttgagcacaggagttggaagctgcagtgagccatgattgcaccactgcactccagcctggatgacagagcaagaccctgtcaaaaaaaaaaaagaaaaaaagaaaaagaaaaaactcaaaaaaccaagaaacaaaaaaaacaactcaacaaaatggaaagttrgtaaacgactggactgaaaaaatacagttcaaggacatatgtacatgtggggtgggacttctgtttcacatatggaatttgatgatctgacaggccaggtagcacctaggatggtgagcttggagggatgagttagaagggttgggggtgtggccaggatgctgggcatgtgattaggatgctgggggtgtggttaggatgctgggggtgtgattaggatgctgagggtgtggttaggatgctgggtgtatgattaggatgatggaggtg

SEQ ID NO: 704351 - DNA, 1047 bp, Homo sapiens
tgggaagctacaaaactttgtctcaggaattaaggaggataactacattttgggagaaaacctatcttcccatccttgatacagtgatctaatgttgtgcatgtagttggaactcaataaatgcttgttgaaatggacccaatatctggtagtgggactggtggcattttcaatgtccctggaaaggaaattcgatatttatttatacaatatacttagaagtcctaagtttaaaagggagagagtgagaacatatgttggtgaaacgaagaaaatgtatataaagtacctctttgcaggaaagccccagagccattgctkttcacttttatattggacatgccatatttggatatggtcagtaaatgtttgctttttttttttttttctttacagaggtataagttccaataccttaatgaaacaatctgtaataaattctcctgtaagtgcaaaggctgagggtatgtcttccatgttttttgatgccctatttggatcaaccttaagtcagagatagaagtgcaaatcagatgagggttttttttttttttttttttttggagacagagtcttgctgtgttgccccagctgaagtgcagtggcacagtcttggctcactgtaacctctgcctcccgggttcaaataattctcatgcctcagccccccaagtagctgggactacaggtgcccaccaccatgcctggctaattttttgtattttagtagagatggagtttcaccgtgttgcccaggctggtctcaaactcctgacctcagtcagtccatccgcctcagcctcccaaagtgctaggattccaggcgtgagccactgctgctcggccagggtccttaagttcaaatcatggagcagtccacagagcactcttctcaggtgcagagtggaaaggactttgatcgtggactagtatttttagtcacatccacaggcctttgaaagggaaaaaatatattattgataggtcctgttttttgaggaaaaaaaaaaaacaagcattcctaactacctggcaaataatttcttc

SEQ ID NO: 704352 - DNA, 1774 bp, Homo sapiens
tgttgtccagcctggagtgcaacagcatgatctcggctaactgcaacctctacctcccaggttcaagcaattgtcctacctcagcctcccaagtagctgggattacaggcatgtgccaccatgcccagctaatttttatttttattttttttagacagagtctcgctctgtcccccaggttggagtgcagtggcgcattctccgctcactgcaaactctgcctcctgggttcacgccattctcctgcctcagcctccggagtagctgggactacaggagcctgccaccacgcccggctaatttttttatgtgtgtgtgtttttagtagatatggggtttcaccatattaaccaggatggtctccatctcctgacctcgtgatccgcccgcctcagcctcccataatttcgtattttttttttggtagagctgggtttcaccatgttggtcaggctggtctcgaacttgtgacctcaagtggtccacctgccacagcctcccaaagtgttggaattagaggcatgaaccaccgcacccagccgcaatagagacttttgaatgtgagtgtcagaactagaactcggatcttctaaccaaacctcagtacacttttaaccacatctatctttctacaaatgtgatttacaataaaacctaagtcagattcattgcccacatggtattggtgccatttagactatattatttgttagctggccaatctaaactattcaagaaggcaaagatctatgcatgctagcaaatcctatttcctgaatatgccctcctctcaacgtctatatttgaaaccttaacaatatgtccacctggacttcttggagggctctggtttgcagggacaatatatgctttggttcatctatggaacaatcagcttaagaagttgtattcagatattattaatgttttcaaacccacttcctattttcctactgaaatccctgccaagcacacacttcagcagacactaaaataatttgggtagttgacattcaatccaaattttctatggaaatctgccagatttgacatctgtgagaaagtgggtaatttttattatccacagagagcaaaagcttggtttgatatttctctacctccacacatctccctgtagtggagctgctactcagatatccacaaaaagtggttagtgaggaaaattatttaaccctttcacccttgtcaggatacagcaaaagctcaattcaaattaattttaaagtaacaatggaaatggataaaacaacttttggaggtgtgggagatgcaaactacctttattattatcatcattacttttgcctaaaaactatttatgctttatctgttgttttaatacaactgtttgtctttaaagttcccttcatttggtctaaaaccttaaaccagaatttcaaattaacgttattgttagagtcctttttcaaaccctaataatatttggctctgtagtactacagaaacatgcttaaaaatcatacaaaatatttctattggtattacattttatttcccaagaattaagaactaaggtatgtattaacactkaaggtttctctaatctcttttaaagaaagagataaaactggatattcccatgtgcttataggtcatatactaaaatgctaccaaggtttatattgtaaataatgttactttagttcactacaacaaaagaggtttcccatctttttattacaatctagtagtttagcattatatattagtctgttctcacactgctataaag

SEQ ID NO: 704353 - DNA, 1774 bp, Homo sapiens
tgttgtccagcctggagtgcaacagcatgatctcggctaactgcaacctctacctcccaggttcaagcaattgtcctacctcagcctcccaagtagctgggattacaggcatgtgccaccatgcccagctaatttttatttttattttttttagacagagtctcgctctgtcccccaggttggagtgcagtggcgcattctccgctcactgcaaactctgcctcctgggttcacgccattctcctgcctcagcctccggagtagctgggactacaggagcctgccaccacgcccggctaatttttttatgtgtgtgtgtttttagtagatatggggtttcaccatattaaccaggatggtctccatctcctgacctcgtgatccgcccgcctcagcctcccataatttcgtattttttttttggtagagctgggtttcaccatgttggtcaggctggtctcgaacttgtgacctcaagtggtccacctgccacagcctcccaaagtgttggaattagaggcatgaaccaccgcacccagccgcaatagagacttttgaatgtgagtgtcagaactagaactcggatcttctaaccaaacctcagtacacttttaaccacatctatctttctacaaatgtgatttacaataaaacctaagtcagattcattgcccacatggtattggtgccatttagactatattatttgttagctggccaatctaaactattcaagaaggcaaagatctatgcatgctagcaaatcctatttcctgaatatgccctcctctcaacgtctatatttgaaaccttaacaatatgtccacctggacttcttggagggctctggtttgcagggacaatatatgctttggttcatctatggaacaatcagcttaagaagttgtattcagatattattaatgttttcaaacccacttcctattttcctactgaaatccctgccaagcacacacttcagcagacactaaaataatttgggtagttgacattcaatccaaattttctatggaaatctgccagatttgacatctgtgagaaagtgggtaatttttattatccacagagagcaaaagcttggtttgatatttctctacctccacacatctccctgtagtggagctgctactcagatatccacaaaaagtggttagtgaggaaaattatttaaccctttcacccttgtcaggatacagcaaaagctcaattcaaattaattttaaagtaacaatggaaatggataaaacaacttttggaggtgtgggagatgcaaactacctttattattatcatcattacttttgcctaaaaactatttatgctttatctgttgttttaatacaactgtttgtctttaaagttcccttcatttggtctaaaaccttaaaccagaatttcaaattaacgttattgttagagtcctttttcaaaccctaataatatttggctctgtagtactacagaaacatgcttaaaaatcatacaaaatatttctattggtattacattttatttcccaagaattaagaactaaggtatgtattaacactgaaggtttctctaatctcttttaaagaaagagataaaactggatattcccatgtgcttataggtcatatactaaaatgytaccaaggtttatattgtaaataatgttactttagttcactacaacaaaagaggtttcccatctttttattacaatctagtagtttagcattatatattagtctgttctcacactgctataaag

SEQ ID NO: 704354 - DNA, 1578 bp, Homo sapiens
  misc_feature 578, 579, 580, 581, 582, 583, 584, 585, 586, 587, 588, 589,590, 591, 592, 593, 594, 595, 596, 597, 598, 599, 600, 601,602, 603, 604, 605, 606, 607, 608, 609, 610, 611, 612, 613,614, 615, 616, 617, 618, 619, 620, 621, 622, 623, 624: n = A,T,C or G
  misc_feature 625, 626, 627, 628, 629, 630, 631, 632, 633, 634, 635, 636,637, 638, 639, 640, 641, 642, 643, 644, 645, 646, 647, 648,649, 650, 651, 652, 653, 654, 655, 656, 657, 658, 659, 660,661, 662, 663, 664, 665, 666, 667, 668, 669, 670, 671: n = A,T,C or G
  misc_feature 672, 673, 674, 675, 676, 677: n = A,T,C or G
acacggtgaaaccccatctctactaaagatacaaaaattagccaggtgtggtggcgggcacctgtaggcccagctactcaggaggttgagacaggagaatggcgtgaacccacgaggcagaggttgcagtgagccgagatcgcgccactgcactccagctgggcaacagagcgagactccgtctcaaaaaaaaaaaaaaaattgaaacaatatttagttttttctgaaccatttgagagtagcttgagacatcatgccctgttaccttttaatacctcagtgtatatttcctaagaacaaggatattcacttacataaccacagttaccaaattcggcaaatttaacatggatgcaatttttttatgttctacactccatattccacttttgtcaatcgtcccattagggcctcaaagcagtttccctatcctttgcagaatcaaatccggcatcacatacatttaggtatattccttttgtttttgtcactctggaacagttcctcagcctttctttgtcttttatgacagtgaaatgtttgaagaagagatgccaactatttcatagcacaatttnnnnnnnnnnnnnnnnnnnnnnnnnnnnnnnnnnnnnnnnnnnnnnnnnnnnnnnnnnnnnnnnnnnnnnnnnnnnnnnnnnnnnnnnnnnnnnnnnnnntgacttcattcattcatttgtaaagattcttcagattggagatgtccaagctagatttggctttttttgttgttgttgttttcttttaaacacatgttccctgtacccatccagtggaggagatgggttgcctgttgttgccctggccctgtggggctctgctgtttgactgggcctcttgaattccattaaatgaagcacagacagcatgtgtcataaaggctgcttgggaggggtgaagagcaaaattagtgtctgtgggtgggcatgtgttctcatcacgtcgccagagaactgcaatgtgcaaaatctggctggaacctgttccaaagaaaaataaaacagcccctttttccctgctttgagtaatattaaaaaacatcgcttaacccccatgtagaagaaatggaactgtcaggaaattcttgtgattatgtgtgtgtgtttaataatctgtgtgtttaatctttacaactgaggttagaatacaagagatgaaaagggactaatcatgaaaaatattttggtgtattctgttgctggtgttgtagacattgtaagtgttctttctattaaagtagaactgcctaaggattagaggaatttgtcagagctaacaattcagggaaaatctattttgtttaactttcttctgttcttctttgaaatgattttgtaagaaaagccatttttgtctcagtaaaaccagtaccaaaggaaatgtttgtgtttttcttatatatgattcacctggtaccccaaggaacaaagcaaagccaacatttacacttayatttgaagcataagatcttccttttatagttttcttgagaaggtcttgcatatttattaattgctcctcatagtatagaagaatgctttttaagggagggttgtgatg

SEQ ID NO: 704355 - DNA, 649 bp, Homo sapiens
atggttttcagcagcttctgggagtgctcctggagatcaccttctatggtgttgtaggctgctgagatgattggtggtgactaagcggtggtgtaggcatttattgatttcataaattgtagcagaatattccctgaccatcataaactctactcttctagcagacaggcaagtctttaatttcctttgttaacgcctttttactttgaattctagagtaatttctgttttccagaccaaactaactgatactggcgtgaacaccatcctctgagaaagtcatattacaggtagattaacaagatgagggaatgttgactgaagaagtaaatgatatcaagtattttgcttaycacgtagtctgagttctagagatttgttgaaaaggtttcagaagttggaaagggttaggagatggagttagattttcttatggcattgagaatcaagcttgccatatagtctgagttctagcgatttgttgaaaaggtttcagaagttggaaagtgtttggagatggagttagattgtcttatggcattgagaatctaagtactaaaggataaacctcggtcttgaacttcttatgattagtatgaacagagataaagatgtgattaattctgataatgttctatgaaagttattg

SEQ ID NO: 704356 - DNA, 1084 bp, Homo sapiens
gggtcttgctctgttgcccaggatggagtgcagtggttcaatcacagctcaccacagccttcacctctgaggttcaagccatcctcccacctcagccacctgagtagctgggaccacaggtgtgcaccaccgtgcccagttagttttttaatttttttgcagagacagagtgtcgttatgtttcccaagctggcctcgaactactttgctcagtcaatctaactgccttagcctaccaaagttctgggattacaggggtgacccaacatgccccaccttatttttcatatttcagttgcaatgggaatattgagaaatattccatttaagagcaatggtttctgtctaactttctacctctccacctttctgtcattgtaacaatccttctatctgcatatatatrgagcgttaattgtggtgatattctgcaaatgttgtcaaaggcctgtactagaaagtgagacattgaatggttctagttagttttcagttgattgttggaagacttgctgattgtttttaaatattcacctattatttaatttttttaaaaaaaattaaaatccagaaatttataatatttttattttatggtatggacacattttgattcaccttgtttttagtttgagatactatttttaaaagataatttgtgcaattaaaatttaagttgtacttgatatattgactgaggttttttaacttcaactaccattttgtagttgtgtacacctgatattttttattgctgttaggccttaatgcaaggattttacatgatttccagctccgtctttcagttaacttccgtacctctcctctctaaagctgacttcctcatacttcatagtcattcactgctattaatcaactacagtttattataagttgggagtgttctgattgtcatttgagcctttgatttaactctttccatatacaaaactaggcctaggttttcagttatgtattggaatttgctgctttttctaaccaagacaaacatttttaactctagaatgtacagaatagtcaatccctcattcacaataaaaatgtaattagatattattgcaga

SEQ ID NO: 704357 - DNA, 652 bp, Homo sapiens
tcatcaagcgctatcagaaatttatcattacatattattttttacttaagctcaaagactttatttaagtttccaaatcttatttaaaaacacattccaaattaagttatgggagagtgaacagttctgtgtaaattctaatttaacttaattttttaaaagacgaagatctgatctctcgatcaggaggactctctaaacttgaaagcattggaaggtatcagaaaggaaaataatcactgtatttgctttcctaaaaatgtaaaatatatgtatctaaaaagtgtcattcaaaaattaagaaacatataaaactgagtaaatatttatgatgaatattgcaaagggttgcattcttaatttaaattgataaatgaccaccaaaatatcattatacaaaagacatgagcaagaaattcacaggtaaggaaatataagtagcaagtacatttaagaaaaaagtgttcaacctatcaattaaactgacaaggtgttatctttcttttaataaattgayactattttataaatatattatttttaatataaatatcatttattcttggcattagtattagtagtattatgttagtactctcagtattagaattagtagaattataaattagtcccatcttgctaaaaaaaaaat

SEQ ID NO: 704358 - DNA, 1540 bp, Homo sapiens
tgtaaaaaccttggcttatttgattcctcaagttgcacaccaccagaagaccatggagtaagtagtactgaattaaaatttaagcacagaaaactaggtcccaaactatcagaaaatgattcccaattctaaatgttcaaccacatctatcttaaaacatttataatatttttttcaaattctctcataacattccaaatgactagttttctctgctatattttctcaactttcaaattaaaattctttgctttaaagttaaaaaaaaaaaaaagaaacataaccatccctcctccagattttctagtagattctatagtgaaggtgaaattaaaggaaccatttaagtaaacaagaggaatgtatttttggaaaactgtctcatgaagagtgcaaagaaagtatttgaatttgctttgaaacatagaaagaaacatytaaaggaaagtaggccttgttggcatggtggaagaatctgaaatagccaagagcaaggccagcgtaaaccttccaagggccattcattctaataatcgtgtcttctttggacatatagcttactcccatttaatctaggaagatatctgaattaggcctttgctatagaactgtgattctcattaccagctacacattagagttatctgggagctttaataatacaaatgtctgaatctcactgactgatcagtgggtctaatcggtctgaagtatgatctgattaccagaattgctgaaagcatttcagagatttttaatgtgcaggtagactaataaccactgctctagttaacttagcaagtactgcagcagtataaaattaacctaagattgacagtagagtaattcacaatgctttgcatttgcagttcatcattagctaaaaactcaatattttcagtgtttcccaggcccttaaataaacaaagctcttattttgaggatttgtcaccacactgttaagagagtctttttttttttttcttaagtgtcacttttgtaatcagccctgtgtacattcattgttcagggacaactgcctgatctttcacagagaagcttttacttctgaaattcccagattctttccccaaagtccctgttctctgcatagaacttccctccccgctctagcctcgataatataccctatgagatcggcacaaacaagacattctgagtcttgacagaaggacagaatgtgagaggagaataaaagtttcctttgtgtagagcattggttgaacttgctggtgttggtgaaggaattcagcttcctggttgcatagtatctgtgtagtttcattttcattttcacttttcccttgttcattcaacaaatatttgaatcattaccatatgctactcactttgctgagcgttaaggatacagtaatgaataggaaagaaaggagtgatgaataggaaagaaagaatagaactgaaaggagggtggtggagagtcctttctcctcaaatttaattttaatagaatagatttaaacacgcagagattgtataaagctgacagtagccatca

SEQ ID NO: 704359 - DNA, 1281 bp, Homo sapiens
ggcactgggtgaaaagggagaatttccactgacctaattgataaattgatcaattggaaattgcccattgggtgaaggaagaagggaaaaaattcagcaggccaaagagagctcagaatcttagcaaattcatccttcttagtgtcaactggtgattcaccttttcctgagcgttttggttcttctattcagtaggattctcttctaagagtagggtagcgttacagctgcgtcagtggcctttttatgccgtatgagggctattttgtagtatcatgtctagtgcctcagtttctgtaaagtacagtagcccttctttatttgtggtttcgctttccatggtttcagtttcttgtggttatctgtggcctgaaaatatgaaatggaaaattcccgaaataaacaattcatacgttttaaatttctcgctgttctgagtagcatgatgagcacgctgagcaaatttctttgctgagcaaaaatcttacgccatcgcggctccatctctgccaggatgtgattcctccctttgtcctgcatatccactctggatatggtacccgcccactggccacttagtagctgccttggttatcagattgaaaaaacagaggacatgtaggatttggtactatccacagtttcaggcatccactgggggtcttggaacatattccccacagataagcgtggactgctgtactcttttgacaggatggctcaaggaaactacaagttagatgaaacccaaggtcttttgggtcagctttacttaaaagtggatttgagaacatgattgaccccagacatgcaagtcaaaaagcttccaggtgcttggcaaatggcattccctgttacaaaggatgtcactggcgcttctcgggagcaagagcacataccttggctgttgctatgccattttattggccagagaattctcagtttatcatcatctctgagtcttagacttataacctttttattgctctggggtgtgggtattctgtaagctccagggtttacactcaagatgcggttggtttttgaatttttgaaagtccctcaagcatgaatgaacagtgtgccacctataaaagggaaggagcatgaccttttcatgccaactttaattgcccatcacagagcaaaatggccaccaggaccaggccatctgactttmtagaaaattactgaaccaccaactataaaatatatttttaaaatcccaacaggtctcagaaggtaaaggataggcaagttttgatttcccatatttgtgag

SEQ ID NO: 704360 - DNA, 1281 bp, Homo sapiens
ggcactgggtgaaaagggagaatttccactgacctaattgataaattgatcaattggaaattgcccattgggtgaaggaagaagggaaaaaattcagcaggccaaagagagctcagaatcttagcaaattcatccttcttagtgtcaactggtgattcaccttttcctgagcgttttggttcttctattcagtaggattctcttctaagagtagggtagcgttacagctgcgtcagtggcctttttatgccgtatgagggctattttgtagtatcatgtctagtgcctcagtttctgtaaagtacagtagcccttctttatttgtggtttcgctttccatggtttcagtttcttgtggttatctgtggcctgaaaatatgaaatggaaaattcccgaaataaacaattcatacgttttaaatttctcgctgttctgagtagcatgatgagcacgctgagcaaatttctttgctgagcaaaaatcttacgccatcgcggctccatctctgccaggatgtgattcctccctttgtcctgcatatccactctggatatggtacccgcccactggccacttagtagctgccttggttatcagattgaaaaaacagaggacatgtaggatttggtactatccacagtttcaggcatccactgggggtcttggaacatattccccacagataagcgtggactgctgtactcttttgacaggatggctcaaggaaactacaagttagatgaaacccaaggtcttttgggtcagctttacttaaaagtggatttgagaacatgattgaccccagacatgcaagtcaaaaagcttccaggtgcttggcaaatggcattccctgttacaaaggatgtcactggcgcttctcgggagcaagagcacataccttggctgttgctatgccattttattggccagagaattctcagtttatcatcatctctgagtcttagacttataacctttttattgctctggggtgtgggtattctgtaagctccagggtttacactcaagatgcggttggtttttgaatttttgaaagtccctcaagcatgaatgaacagtgtgccacctataaaagggaaggagcatgaccttttcatgccaactttaattgcccatcacagagcaaaatggccaccaggaccaggccatctgactttctagaaaattactgaaccaccaactataaaatatatttttaaaatcccaacaggtctcagaaggtaaaggatagrcaagttttgatttcccatatttgtgag

SEQ ID NO: 704361 - DNA, 645 bp, Homo sapiens
catgagtaactgggactacaggcatgcaccaccacacccgcctaattgtgtttattttttgtggtggcggtctctctgggttgcccagtttgtcctcaaaactcctgggctcaagcaatcttcccatctcagcctcccagagtaatgggattacacgcataagccaccacacctatccaataaaattatttttttaaaaactgttatggttggaaaatgcagctgaggcacaatacaaacttcacgcttgatagtcgtagcaagctcaaaggagccaaagataactttgtcctaaatgcaaatgttgatgccaatggataccaccacttagataaatgtaaygaacaattgcttttttgcactctcaaggtatcagtgagatccagggagaggctaatagagggccggtatggtacagaaaacacaaaacttatttatgagactctgagtggctctgcactgacctgggaataaggttttagttttggctttgccaccaggatggacatgtctgtcactcaacctgtctgggtttgcttctatattcctagaatggcaggggcagactagattatctctaagattctttctcaccctaatgttctgtgagttttaattcttgctagtcctaatcttttgccaatt

SEQ ID NO: 704362 - DNA, 847 bp, Homo sapiens
tcaaagtagtacttatatccatctgatagccatccaggaattttcatctttgatctaccaagtgatgacaactgaggtgaaaagggacaaggtccccattgtgaatatgaggtctacgctcttgagaagccctatgcacacaggagccaatctctcttgtaaaaacttcacagacaaagtttccagggctcctgcaaaagatgtgccaatgtgcagaattcattcactaaggaaagcctaaatttaaggctccccaccgggyacttatagtacttcccaggtagatgcaataggctaatctggagccacatttgccacatagctgatgtttcatctgtctttacatttcctggggagaagagttagaaaaggattgtaaaaacctagtaattgtgacttctaccaaagttccattgtaatcagataccatactctgtttttagatgaagttcagcttctcatgtcaaagaaaaaaaattgtgttaaagatgcagtcaaaggaaaattagtgatattatgcttttcaaactatgaatgcattctatctcttcagttatttacattattttaaattcctctaattaatgttctgaaatttttagggtaataatcatgttcatattttgctcaatttactactaaatgttttattaatttgatgctatttcaaatggcatataaaaaaatcctacaaatgaacaatttcttcatgtaagcctcaaaatgcatcactattatttatgcagtcaattataatttaaatagtataagaatagaaaaaaatagacaaggatttctatttgtccatatacttatatttccaaactccattccttttcatggatcc

SEQ ID NO: 704363 - DNA, 584 bp, Homo sapiens
ggccctttcaattccctctactgatttgctttcatattaagccctgtatttaatagtttcaagcacttctttcttattgttctcactcaatccaaactaataatactttcttactgcactaggtacagttcttcacagcccataggtgagtttgtgagctcctggcatgatctactgcttgcaaggaagagaagtcttagccccagcctttaattccttctccccagtgatgcaccaagttcytgctttcctaaatggtaaaaacagataaaaactgttttcttgtccttgtgataaaaaaacaaataaattgctgatgtcctgaaaaaggaaaaaagttagattttggacaagtttcagaacaatttgttttggcagcagttgattcaaaagataggacgtttcaaaatgttaagacgcctgtgatttttttctcctttttcttactcggtttgtagatttatttttttcagtttcagattttagacttcacctttacttggctccctttcttgttcttcttcaaactctcctctaataatgccattcattgttgtttatcctctacatgaataaaatagaga

SEQ ID NO: 704364 - DNA, 1129 bp, Homo sapiens
tacgtgattaagtattcactaatgagtaccaaaagggatgtagccatggttgatgcagttcaacaagtggtccttaaaagtgtgaataaccagaaagaattttaatgctttcaatgcaggtaaaagggaagtagttcagttacttaaaaaaaaaaaaatgtactaggctaggagtgaagatgattaagttattctccgaagtgactaaccttaaattattttaggtttcatagtttcagtatcactgtgaaggtactgttacttttttttcacaaaaaaagtattggaatataatgaaaatatgcataaaaatacaaaatgccattcagacttcatatgcgtgaatcatttgaattagttctatgatatcactataatagcataggtagtagacaattacattaaagtactatgttgggctattatgatccttgtatttttactgtgatacttgtgagacagatctgtcatagaccactgactatatggttcagatggtggcagtgcaaaaacacccaaagcacattaactaccagtcagttcagttccaagatattcagtccactctgtgaactcattctgtgtgcccaaccctgtgacagatcctgcaaatatagtgactccccyaaaatgttctctggcaactgggatttaaggtatttaaatctcttgtgtgaattaaaaatcataagtataacctgatgttgagagcaaattatcaaagatagttattactattccatttttgttgctggaaatgaggccaaaaatggataagtaaactccagtagccggaaaacaaagccttttttccaattattaggagtaatatttaaagtggggattgggacatagggaatccattctctgtctccctcacccaccttcccccactaatcaaaaaatcctcatgaaatagaatatatccaacttacattcacattaaattataactctttcctggggtagcttttgatagcgaaagagggaggagaagatcccaatagaaaggcaggcagagagaacagaatttgttaccgagaggcaagtgctttaattctaagctcattgtgctgtaaggtggttggaaaatgctctgatatgggcaattaagaggctgccttgagga

SEQ ID NO: 704365 - DNA, 646 bp, Homo sapiens
cataactcagtagcaaaataaccccaaataacctggcttaaaaatgggcagagggtgactatgtgaagtgctagatatattaatttgcatgactacagtaatcatttcatatatatatcaaaacatcatcctgtacaccataaatacacaaaataaaaaataaatttaaaaaatatattaaaaaggaaaacaacccaatgaacaaatgagaaacttaaaaatgggatgtcattgaaaaagactacagccaatgaattaataaaaatatggtcaatctcacacataatttaaaaaatgaaaaataactcaatgttataytttttctcagcagaaacaacagatggtatatttttaaaaatatcaaagatctcatatatgaaaattaacagtataaatacgttgtttataagcattttagtgtttattaaataggaaaagttattagaaaactaccaagcaaaaataattaccgcaaataaagagggggtagaagcagcagaaacagtggtggaaggcaaaatatgtgttgtgggggtgaaggtacccacagaggcaggagcataccaacgacaggaagctgagcatgtggcagtgaggtagcaagtgaagagaatttgaaaactggaaactaggtctgaagaaagta

SEQ ID NO: 704366 - DNA, 629 bp, Homo sapiens
aatacacagtcttatacctattttaattcctttgtggggcttagcgactttaacctgcttactgaatttacatatctacctctccatgccatcaaaaattacattgtatgttacgttaaaaatccaatcagtcttcygaacattgtgtattcacgatgctgtgccactgaaagaactgatatttttgtattgatgtgaataaataagactccatctatcagtatttggacaacatgttgacttattctataccttttagtgacataaagatagagttttaccttgcatatcactattttcagaagatttttttagtataactctgaagaaacaaaaaaatgtgtatattatgaaggactgccttgaattccacatatagacaccagaaatctcattaaaatcctgcagtgttgtgtttaagattatacaaggctttgagtcagagcttctcagaactgaatgtttttctatcacttactgatcgcggtatgatgctgaacttctctaagccttagttttactcatctaaaaatatgaataaatgcctctcataggtatgttgtaaaaatttaacgaaatgatgtatcaaacatcttaacacactatctgcccttgatggatagcatata

SEQ ID NO: 704367 - DNA, 442 bp, Homo sapiens
  misc_feature 415: n = A,T,C or G
tgggggtgagggtccaccaggtgtcaatactgaatctctcttcacccaatgccagtttgcaactccaaagaaggggtccctgtgggccccacttgagatcctgaagacccttcagggtctrtcttccccaccttgctgccatccaccccctctagaagtgccagccctctgagaggaggtgccttcctcaggcctggcatccactggcaccaaaaaaggctagaactgattctgggcgatgacctgcggtagagcttgacatctcttttctaaaagccaggactccaggatcagccagctggggtgggtaaaaagaacataaggaaggggcaagaggcatcaaacaaaacccacgaagacagaaagccccctacagtgtcaacacaggcctggtcccagaaactgtgcggccctnaatgcaaaccgtgcaaccttggcttgt

SEQ ID NO: 704368 - DNA, 518 bp, Homo sapiens
ttaaatgagatgatgtacttacatggtgtatggtaaatattagattctataagccaggtgcagtggctcacgcctgtaatcctagcactttgggaggccgaggtgggtggattatttgaggtcaggagtttgagaccagcctcgccaacatgatgaaaccccatctctactaaaaatataaaaattgactgggcagacctgatggacgcctgtaatcccagctactcaggaggccgasgcaggagaatcacttgagcctgggaggcagaggttgtggtgagctgagatcacaccactgcactcctgtctcaaaaaaaaaaaagattctatggtagcgatttgatgatacatattgaagcttgaaaaacatgcatgtctattgatccaacaattccatttctgaaaatggaaacttaatcctaataactttagtaatttagagtaaattaatgattatgataatcttggttagtcagggccgggcgcagtggctcatgcctgtaatccccacactttgg

SEQ ID NO: 704369 - DNA, 603 bp, Homo sapiens
tttattgagatgaggtctcgctctgttgcccaggctggaatacagtggcgtgatcatagcccaytgcagcctcaaactcctgggctcaagcgatcctcctacacagatgagattacatattcaagccaccatgcttggctaatttcttttttcagtgtctcgctatgttgcccaggctggtcttgaactgctggcctcaagtgatcctcttgcctcagcctccagaatagctaggactacaggcatgtgcaccatggttttcaaaccttggttctctcaacttccttctccacagctcctctatctacgtaatcatggagtcctccatcctacctcctatagcactggttcccactaggagtaataccaccttggcaatttatgggggtccttggtcatcaaaactattgagttagtacttctggcctttaaggggttgagaagcaggaacggcagaaagacaataatgtaaaacaaagcactgtccatgccccgcaagaggttctaacatcccaatgggcatttgtataggcaaaaggcctttctataattatctgagtctaaaatttcattttatacatagacacaaaatacttttttaca

SEQ ID NO: 704370 - DNA, 1147 bp, Homo sapiens
ctgattattgttattcctccaggaaaagccatggagacttcagcatcctcctcccagcctcaggacaacagtcaagtccacagagaaacagaagatgtagactgtacgtttgccttctctgaccctctgggcaaaaccacatgggaggtggagtccaaaagtagaagggacagaagaagaccctgctcarctcacgttgcacagggcctcaaatcacagctgaaatggggaagtagtggttttacacacatgcacacacacatttgcatggtccaatctgtcctcctgtgctgtctagctatggggaccctcagctgcttgccaaatctcaagaattctctgggggcttgggctggcactagggagcacccctagaaggtggagagggtcctgtgtgaccccagaatggggaatgggaaggtttaggacttgatcacacctcatcttggctgtaatgtacagaggatcctaaattagcaactactctacagaatctagctgtctctgggcaaggcagggggcttagaaaccccttttctggccgggcgcggcggctcacgcctgtaatcccagcactttgggaggccgaggcgggcagatcagaaggtcaggagatcgagaccatcctggctaacacggtgaaaccccgtctctactaaaaatacaaaaaattagccgggtgtggcggtgggcgcctgtagtcccagctactcaggaggctgaggcaggagaatggcatgaacccgagaggcagagcttgcagtgagccgagatagcgtcactgcagtccagcctgggcaaaagagcaagactccgtctcaaaaaaaaaagaaagaaaccccttttctgagtccatattcagataaatctctgtattgagccttccgtgagcccctggcatctctgagagccttggtctcctgcatgttgcattggctctagatatttgggaagataatccagtccttcctggctctccaaatccaagtagaaccctggagaggactgggtggtccctggggtgggaagggtgggaaacgctcatcccctggcctctgtgtgccttgtagatggagagacagatttccacaagcaagatgggaaggctggactcttttcccaagaacaatatgagagaaacaagtct

SEQ ID NO: 704371 - DNA, 1147 bp, Homo sapiens
ctgattattgttattcctccaggaaaagccatggagacttcagcatcctcctcccagcctcaggacaacagtcaagtccacagagaaacagaagatgtagactgtacgtttgccttctctgaccctctgggcaaaaccacatgggaggtggagtccaaaagtagaagggacagaagaagaccctgctcaactcacgttgcacagggcctcaaatcacagctgaaatggggaagtagtggttttacacacatgcacacacacatttgcatggtccaatctgtcctcctgtgctgtctagctatggggaccctcagctgcttgccaaatctcaagaattctctgggggcttgggytggcactagggagcacccctagaaggtggagagggtcctgtgtgaccccagaatggggaatgggaaggtttaggacttgatcacacctcatcttggctgtaatgtacagaggatcctaaattagcaactactctacagaatctagctgtctctgggcaaggcagggggcttagaaaccccttttctggccgggcgcggcggctcacgcctgtaatcccagcactttgggaggccgaggcgggcagatcagaaggtcaggagatcgagaccatcctggctaacacggtgaaaccccgtctctactaaaaatacaaaaaattagccgggtgtggcggtgggcgcctgtagtcccagctactcaggaggctgaggcaggagaatggcatgaacccgagaggcagagcttgcagtgagccgagatagcgtcactgcagtccagcctgggcaaaagagcaagactccgtctcaaaaaaaaaagaaagaaaccccttttctgagtccatattcagataaatctctgtattgagccttccgtgagcccctggcatctctgagagccttggtctcctgcatgttgcattggctctagatatttgggaagataatccagtccttcctggctctccaaatccaagtagaaccctggagaggactgggtggtccctggggtgggaagggtgggaaacgctcatcccctggcctctgtgtgccttgtagatggagagacagatttccacaagcaagatgggaaggctggactcttttcccaagaacaatatgagagaaacaagtct

SEQ ID NO: 704372 - DNA, 640 bp, Homo sapiens
gccaggaacactctacctatctcttctcatggccgacgccttctagtccatcagatggagcttatgtgcccccaccccagattctccctatgcccccaaacaatgtcatctcctcactctactgggatctgttttattttcttcctggctttgattattatataatgtgatcgtaattgcttgttatttctatcttcagcatgccatctccagggcagtggggaccttgtctgtatctacccggcccagcacagtgcctggtgcatagactgtgctcaataaatattttagtgaatgagcgaataaattaatgaatgtgggttccctcttcccaatctttggacactgggtttcttctattcctcggyacctggcctaggggatagaaaagactccacccaaacccgggaaccctgggtgtactgtctccaagccctttacatggtcccaggggcccgtctgcctctgtgtaagttcccccggggccgaagcactctccaaagaggtctgccggggctaggactcggccggctggggccccgcgcctggaagagggcctggcacacagtgggccttctcaaagtgttagaacaaatgggtgacaggccagcagactgccgatcctggcacccgagggcac

SEQ ID NO: 704373 - DNA, 640 bp, Homo sapiens
gccaggaacactctacctatctcttctcatggccgacgccttctagtccatcagatggagcttatgtgcccccaccccagattctccctatgcccccaaacaatgtcatctcctcactctactgggatctgttttattttcttcctggctttgattattatataatgtgatcgtaattgcttgttatttctatcttcagcatgccatctccagggcagtggggaccttgtctgtatctacccggcccagcacagtgcctggtgcatagactgtgctcaataaatattttagtgaatgagcgaataaattaatgaatgtgggttccctcttcccaatctttggacactgggtttcttctattcctcggtacctggcctaggggatagaaaagactccacccaaacccgggaaccctgggtgtactgtctccaagccctttacatggtcccaggggcccgtctgcctctgtgtaagttcccccgsggccgaagcactctccaaagaggtctgccggggctaggactcggccggctggggccccgcgcctggaagagggcctggcacacagtgggccttctcaaagtgttagaacaaatgggtgacaggccagcagactgccgatcctggcacccgagggcac

SEQ ID NO: 704374 - DNA, 1239 bp, Homo sapiens
gaccattgatggaaaacctttatatatatatgtttttcaaaatatataaggaacttctacaattcagtagcaaaaaagccctaatatttcaataaaaaaatggctgaggacttgcatagacatttctccaaatatgacacataattgggaagcagatatatgaaaaaatggttgacttcactattcatcagggaactgaaaatcaaaacrcattatcactttatatttgttaggatagctattataaaaaaagataagtataggtgacaatgtgaagaaatcataactcttgtacactgctggtagaaatgcaaaatgatgactctgctatggaaagcaatataaggattcctcaaaaaattaaaaataaaactatcatataacccacgatcccacctttgggcatttatccaaaaaaaatgaaatcacattaaccttgttttcaccactcattcttaccatagtccctcctgcaatgggacctgtgcacattatatgttcctaccggtaatgagatttttctctcatattaacgaagtaaattcctcttattcttttggtctcagcgccaccattacttcttttggaggctctgtgaaatgtagtgtgccaagagaggtctctgtaaccagaaacactgtggaaatgataaagtaattcatggatttattagttaataaagcaaatgtggaccagctgcataacttctcaaagcatccgcttccttgtctataagactagaataatacctactttataggattgctttgaaagttataaatggtcattgcctagcagagttctagcatatgtcatggctcaataaatgcagcacacattattttttttaatgatgacactactcttgacaacataattcagaacaaaactgctgttaaaattgtgttctattgtgtttgtggggatagaacctacactactctaacaagaacctgccaaataaattgcttcatcaagatgaaagtcaatttcattcttaaatctaaccagcttggaaggcatcgcagggtggttaggacaatttatagtgttgaagatccagaatgcttgctcagtaatctttggggtgttacccttgtctgcacaaagatgaccacacccacaggaacacctcccgcttatggtcataaatcaaaaagttgcacatactgctttcactaacatttccctggcccaaacttaaactcagtcatttggtcatgactaccagcaaggaag

SEQ ID NO: 704375 - DNA, 632 bp, Homo sapiens
  misc_feature 535: n = A,T,C or G
ctgaaatgtctcctctagtccacagtcactgttgactcaccatgatgatgtgctggacttcagttccctgtttcatctttggtgatggctgtgtttgtttctacagacctgtcatctgtactatgaggcctctccaagctcaccaactctttcttatctaaattccactctgtttggaggtttgtgaatgtttacttgctctactataccccactgggattatgagaaactctctagcactgtcatgcatgcagccatctttatgctgaagcttgcacactgtagtgggtggagtcttgcagggctgccatctccagggatcacgaggggtcctcracttttggaccccaaacctggaaagggatctgctgcccactctaacctcttctcagagcccacagcaccccctcacacatgaccgttttcctcactgatgcttcacttccagttcagaggaatttttttttcaccactggagtagtaaaaacttgctcttatattttttaaattcttccaaatatgttcttttgacatnaattttatgctttgatttcctcagcatctagccttctgagattcaaaaactttaacataattgccccattttgtgtttccaatatcaattttgaaag

SEQ ID NO: 704376 - DNA, 632 bp, Homo sapiens
  misc_feature 535: n = A,T,C or G
ctgaaatgtctcctctagtccacagtcactgttgactcaccatgatgatgtgctggacttcagttccctgtttcatctttggtgatggctgtgtttgtttctacagacctgtcatctgtactatgaggcctctccaagctcaccaactctttcttatctaaattccactctgtttggaggtttgtgaatgtttacttgctctactataccccactgggattatgagaaactctctagcactgtcatgcatgcagccatctttatgctgaagcttgcacactgtagtgggtggagtcttgcagggctgccatctccagggatcacgaggggtcctcgacttttggaccccaaacctggaaagggatctgctgcccactctaacctcttctcagagcccacagcaccccctcacacatgaccgttttcctcactgatgcttcacttccagttcagaggaatttttttttcaccactggagtagtaaaaacttgctcttatattttttaaattcttccaaatatgttcttttgacatnaattttatgctttgatttcctcagcatctagccttctgagattcaaaaactttaacataattgccccattttgtgtttcyaatatcaattttgaaag

SEQ ID NO: 704377 - DNA, 2268 bp, Homo sapiens
  misc_feature 1240, 1241, 1242, 1243, 1244, 1245, 1246, 1247, 1248, 1249,1250, 1251, 1252, 1253, 1254, 1255, 1256, 1257, 1258, 1259,1260, 1261, 1262, 1263, 1264, 1265, 1266, 1267, 1268, 1269,1270, 1271, 1272, 1273, 1274, 1275, 1276, 1277, 1278: n = A,T,C or G
  misc_feature 1279, 1280, 1281, 1282, 1283, 1284, 1285, 1286, 1287, 1288,1289, 1290, 1291, 1292, 1293, 1294, 1295, 1296, 1297, 1298,1299, 1300, 1301, 1302, 1303, 1304, 1305, 1306, 1307, 1308,1309, 1310, 1311, 1312, 1313, 1314, 1315, 1316, 1317: n = A,T,C or G
  misc_feature 1318, 1319, 1320, 1321, 1322, 1323, 1324, 1325, 1326, 1327,1328, 1329, 1330, 1331, 1332, 1333, 1334, 1335, 1336, 1337,1338, 1339: n = A,T,C or G
atttccgtctgaatgctatacttccattgacttctctttaatttgggttgttaatatttttgcccttcatattcctgtttttttaatgccctaggtgaatgtttcttattatctgttttttccttctttaaacatgttaacatagttgttctatactctaacttaatcatttcaatatttgaaatcttggcagtcttttcctgatatctgtgcttctgctgaggcttgctgtttttttgtgtgtttgggtatatttgtatatcactcattaccctattttgacattacacatgaaggcaaaccagctggatataatggagcattggctgatcttgtctctttagtggtttctaatctttaatctttaggaaattagagtgagtcccatgtatctgtctattttcctttattgtagtgtttgcaattagagcaatcatttatttatcagtgatttggtagagcaaatttgtttcttaatgttttkttctatgtggctttaccaaacaatattttaaggattatctataaaagcttactttgtaatagcattttgctgaaaaacacacccgcaggaataaaatatatttaatacatttggtttgagatttctcctctcatcattttgtttattccaaatcaaaataaaagacagtatatggttagcttcatttttattcagaatatacttaaagacttaagtatgttttctaaatcttactgatactttaaataaaatattcagtgtcaagaattatgagacttgaataaccaaaaagactaataatgttcctggttgagaaaattcaacactgtaaatctgtaaattttttaaagtgtacctgcaaatttaatgtattaccaactgaaataccatgagataatattttggagcttgacaattgactataaaatttatgttaaagaacgactaataaaaagaaatgctgaaaaagaataaaattaaggaaacttttccaactagaggttaatatatatattcctgactcaggaataaataaatcaatgaaaaaaataaaatattcagagacaaacttagtatataagatcatataataacaatagtgaaaataactatttaattattggtatttagacaagttttaaccacttgaaaaaattaaatagcaaaatactcaccatacgttaatatagtttccagacagagtaataattgaaagcaatgaatatggtattatgagatcaagctctattaagtttnnnnnnnnnnnnnnnnnnnnnnnnnnnnnnnnnnnnnnnnnnnnnnnnnnnnnnnnnnnnnnnnnnnnnnnnnnnnnnnnnnnnnnnnnnnnnnnnnnnnctcttcctcactttactactgaattatttatttaggaaattattatttttaccccaggatgtctctttagagcttcactaaaaccttcataagtgttctattttttattatttttataatcaaaatgtcatctgtctccttcagcaatcgttttagtagttgtgcatttttattcattgccttattcttcatattttttactgggctcccctgggcttctttaagtggcttcttgagattttatagatctccaaggcacaaatcctttggcctcttgtggggcagattgaagaggtacactcatgcagaaccaaaaactacctacttaaggtgtccagaaatctcctttcagaatccaccactctctggcctttggcctggggttattgatgctaaccttaggtttttccaccccaatagagccaaaataaaatccatgattttcacctacatctggagccccacacagtttagcatcacagttgtctagcactgcttagaagcgccaaaattgttgactcaggattaattggtttgaaagcagacgagggtgattttctaggaaccatattgctggaatccttttgtctataagcagaagtagatcaagtgtgcataagtcctatcatcactcactctttcaagctatattaggggtacagtatcataatccctctcttactctttcaagctattttatgtcactatcacttctttcagctcgaataaacacaaaacccagagagcacttagagggagaagagattgatcagcagctcaatctctttttcttttgctcagcatcctcagcaggttgctttcagcttcacagagttgtttacaaagacagaaaggagagagtagtggagaggtaatgctgcccccattcccacgtagaaagctttccccttggtcaaatcagattcaca

SEQ ID NO: 704378 - DNA, 853 bp, Homo sapiens
ggagtcagcaccagagagttggctggatgatcttacagtggtgtcatcagatagactggtaacgtgggttggactctcagagtgggctggccctctctccttagaatagcattggctgtacactgcccgcctttgctcctctgagtcctcctcttctatagtttcttcgtggaccacacatcctcattaatcacacagtccccactaaccacaccccacactgatatgtgtgtctcagatatgttgaatacattcagtcatttgtagttggccttgccttgagagccatgattcctcttcaagtggtttctcttcaaggacataacttgggaggtgcatgcagcttaagctcctatactactggctagggcagaggttcccaaaccctctcaattctctgcgccttagcatctcagtctttttttcatggcccccctaggccaaaagcaataactaacatgtcaaacaacttaatatgtatctatgtcctaacaacttagtagctgtttgaaaaaataatacatataaattaaaatattattttttctctcatttttattcttaaataactacaactatcttaaaccttgcartcaaactagatatcaccacctttatgtcttgttccacattgatttgcacactgtttttgctttttattccagcaagtaccaaacccccagctttataaagatgcaacaccatctgcaagaatataatgcaatttgatgttgaagttgggaactacctgggctgggcgtggtggctcatgcctgtaatcccagcagtttgggaggccgaggcgggtggatcacctaaagtcaggagtttgagaccagcctggccaacgtga

SEQ ID NO: 704379 - DNA, 1741 bp, Homo sapiens
tatttttgtttttctagttttttaatatgggagggtaattctggtttctgttatttcttcatgaccaaaagtggtttacctttttttttaaagttattaatasaaagataatttttacctttaagttagagcagattttctacactttgttatatcctatacagttttattttatatattatgagcagaatatatagtggaagaggatgaattttcattttcatattatgttagttcaaaggtttatttaaagagtcttgctttctattttagaagcaaaacggacaagtcggtttttaagtggcattatcaactttattcacttcagagaagcatgccgtgaaacgtatatggaatttctttggcaatatgtaagatttaaatatgttttggggttacatgccagatcagtaacattatttatgaacttataatctgttttgaaatgattgtcatagacagcaaattgctgtattgcctttagaattgaactcatttttatatttatattaacttgcagattttagttactggatagcatatctcagaatcagattttctttgaaatttggtaacactatggagaggctgagttctgtttgttttaaaatcttgtagctgaggcttgttttcctatattaggaaatgttagagaatattgatatgtttacatttttttctttgaagtttgcgtagatagtgtagcttttattaaataacggacatatttgaggtttatatttgccttttaaataatggcataattggactgtttgtggtggtgtttatcatgcttgcccagattcagtccaaggcaatctctttaacagacagaaactcattttcctttcatcaacaacttaaagaactgggggagattatgggtcatctgtgtgatttttcccatttgtcttcaataatggggtaccatactcttagaaaaacaccagagtaactccaaacacttagaccctaggcttcagctttactgagctatatagatccgtacttctttgcacaaatcatgctaaccttataactcctaaacatcatataatcttcaaagcttaccacattcatgtgccaacatacacacactctcataattttgcttggttaattactatctttaagacacacctcagacatctatcacctctatgatgtcctatcacccttcttcccagccattacccaagttgggttagatgtcactcttgttggttcccattatatgaaaaataacaagctattttgtgggtttttattcttgtatctggctcctcaaggaggcttagctacttaaggtcaagacctataagttagtcttcttgagaattctcagtaccgagctcagtgcctatgatgagaatccagcatttgtgttgagtaaagaaattcctaattcatttgtcatgaaggcctaactctatcttaaattttttatttctgatggttcaaactatagtatgagtaaacattttggacacactgattgtgttgaaatgcactaatatgagatgattaaaattgctttaatagaaatcctctgcggacaaaatgcaacagttaaacgccgcacaccaggaggcattaatgaaactggagagacttgagtaagtgggagatttacaagtaaaataaatgcaatttcaaaatgcaaaatgaattgtaagtagtattttacaaccctatattccaccttaagtctcttttatctcccttaataaatagcagagta

SEQ ID NO: 704380 - DNA, 1862 bp, Homo sapiens
cttaaagtataataaaaataaataaataaacaaataaaagaaatgacatgtctccttagctcacatagtattttttggaatccagtgatacaacgtatccaactatgtgggaatttgggaaatcagttctatgtgtcaaggaagaaggtgaaactcagaagtctctgccacacaggtaagaacaatatgcacaagagtaccgaattgttaaagttcttgagaagcttgcagaagtaagaattcaatacagttggcgtgtagggaacataagtaaaatacaaagataatgagagtaaagaagctagcagctcttttatgctattaattaaacttttaaatttatgtaaagcttttaatgcttattttattctattaaaattttatatataatttaattcacttttgacgtttttttctcttggtcaattctgctatttttgtgacatttttacactgctctaattatttttggagcattacaacgcacagagagtatgtctgaataaatctatccactataattatttcctaattataaacatcaaatttgtaaaatttaaacacttaccaaagcctatagttaatctggccttccatttgttcagggttacttcaagtagaaaatttgcattccaatgttttatttattcagcaatatgaataaataacattctttcccacaaacaaaatagcagtgtaacaaattcctgaagtagcagtataatagatttctctggccaaaaaaytaaaaaaaatagtttctgtcctccctagggtatgtttttgccttggtcctctctctaacaccttcaagttatttcattaatggaggagattcaggataatattttatgttttaatgtttactttagttgcttaaaattattcagataaaaatggcctttcagagatacccttaatcactcatcagattgtccgtaatagcaacaacaaaatttgacagttgggacagtagggaatgggcattctcataccctgctggagagactgtaaattggtaaaaatgttttacattacaatttggcaggactcagtgaaaccataaatataattcaatatttattttctaagtaattccctaaagaacatttttataagcgcagagaaaaatttctctttagcagattttggaatgaaaattaaaaaattgaatcagtttaaatgcctcttatcagagcaataagtaaataaaatgatatattcaagaggtggaattcaatgctatggataaaagattgaactaaaaccatatttggaatatggagagattaaaaaatcagtgagtgggaaaaaactcaacaatatacagcgtgatagtttgcatcacatatgttatgcaatttaaacaaaatatacctccagtagagggagatgaataatggttctagggataggaacaaaagataattcaactttatctgtaatactaaacaattattgaaaatataaagcaactaaaaatgtgattagtgtattttattctttctgattttctatctcttgagtgtcttagaaaaatatttaaaatgttgtgtttatgattcctaaagagttagtggacaataataaggtattaagtaaaaatattgttagttcttaggagctaagatttagaggggtaaactggaggatgataaatgctattgtttggtctgatgtctgttcagtgttctctttaaagtcatctaggaaagtgtgaactaaaactaatctacaggtgtacaatattaacttgtacatagagtgtccatcagtatcaggaggaaggtgacatattcaaaacaggctctccagaatgtcacctgatgagtatttcaggaaacaaagctctccagataaat

SEQ ID NO: 704381 - DNA, 945 bp, Homo sapiens
ggaaaatatctgatttttatgtgacgaacatcaccttagtagaaacaaatatgaaaaaatactgtaatacaaaagggctgtctacagtagatgaggcttcagacttgagagggaagagtggtttggtatgactttgcacagagtagggaaaggaggaattgagaaaggcatcccactcacttctcccagagttggagaaaattagatcttaatactaatgcctgatttatggattctccctgttatactgtttggtttacttttctataagcaaaatgcaagcatagcttcatttcaagcttaaacattattttttagagaacccaagatttatttaatctcgttgttacagaagtttctaataccctgtactttttcctttctttctagcacatacaacaatttaattaattatagctgcaaaaatatttagttgttaattgatgtagtatgattaaaaattaatttcctaattcaaaaatgaaaccaagagcagattctttccctctgggttggctcttccctagtgaacagacacacaatatgtctgatgacaagaaaacagacttttaatgcagcctccttcatttgctgccccacagtkaaacctcattggggaaaaaaggatcttgtgcctcaggaagagaaaagggctattagcagtcctcaccactccagactctatgtagctcagactgatggtgaagagagaggtggctgtgatttaagcagtttggacccagaggagtacttggggtgggacagcaagaacagttgtgttagtagctgcaataggatctctatattgagacaggatagttccttgaccccttcacaggacttgtgagggggtgactcacttactcagcccacagctctcaaaccccttgagggggaggaagcatgtaggcgagcaggtgcaggagggggacgaaatgaatccta

SEQ ID NO: 704382 - DNA, 1084 bp, Homo sapiens
cattaaaaaaaataagtgaaggatttttctccagagctcccagttctgacttatgtcccattgtccagaaataagtcagatgtggccccacagtcactgggaacagcactgcagtaacgatcagaccagtcttgttagatcctctgggttgggaatatgactggcccaataacatcaggtttaggaaactgggagacagtgagaatggctgctggtgttggccaaaggaggataacagctttgggcacaagttggttttctgctgggtgggagataatgaagaaagtgctcgtttgggagttttgactgtgaaaaggtcctattaatgagcaccagtgaattatttttaaaattaccgcggttatcctttttcccttacaaagaaaagcaatacaggtgaaaattagctactttcttaatctaaacttgagatttcccagagattcaccttctggtcacctctaacctaaaaattggctctttgtattraacatgactaccataatgccacattgctctgttagctgccaaagggagatgtttagaagtgaaatgataagaatattttttaataaactttaatttcaaagtgtggacaaatagaattctttcaagatcccctgtgcaaatcaagaacctggaaggcagttttaggtagaaggaggaaattttcttttacattgaaaacaaaaaaagcaaaagcaaatgtaattttactacaatttctgttgagttttccagattaaatcaatcatttagtgacaaattatttttcgtagtcatttttcatagtcatttaagtcattgattggggtggttcactgaagtgctgccacaattaaatatttcacaatcaagtcaaatagatccttaacaatgatatgcaaaacccacgtattgtagtggtactaactttgcaaaaactgcattcatttatcatggatgactcagacatgatgtggaattcgctcatgtgcaatcaagcctacatgagcttattttggttacattaatagctgaatctctgatgagagacaccaggaaataataatcaaactcattcagacttttctgctgtatatgt

SEQ ID NO: 704383 - DNA, 576 bp, Homo sapiens
gcggcgcttgcagtgagccaagccattgcactccagcctgggcgacagagtgagactctgcctcaaaaaaaaaaacaaaaacaaaacaaaaaaaaaaacaaagaaaaaaattagctgggtgtggtggcgggcgtctgtagtcccagctactcgggaggctaaggcaggagaatggtgtgaaccggggaggtggagcttgaagtgagcagagatcgcgccactgcactccagcctggatgatagagcaagactcygtctcaaaaataaaaaataaaaataaataaaaaaagaaacccctggagtcaacagtctatcttagcaggtatgccgttttgatcttgaatctatatgaaagaatctgttgtcatgtacatgatatttacatttcaaatggaaataggacccaccttaacaatattcgatgactaacccctacacccgaaacttagtagtgtactacggccatctttctttctctttttttttttttttttgagacagagtcttgctctgtcacccaggctgaagtgcagtggcacaatctcggctcactgcaacctctgcctccaggattca

SEQ ID NO: 704384 - DNA, 693 bp, Homo sapiens
tttatgtttagatatgtgtggatactcaaatatcactgctttaaaattgtatacaatagtcggtatagtaacatgctgtataggtttgtmgcctaagaacaataggctccaccatatggcttgggagtgtagtaggctacaccacgtaggcttgtgtaagtacgttctgtgatgttcacacaacaaaaccgcctttcaatgcatttctcagaacatatcccttttggtaagtgatacagtaccatacttaaattcttatatatttgaatttttaccttatgcatatattactacagtatttaaataaataaatggtgtattttccaataaatgttttaaatacaattttctagaaatttgtcaaagttgggcctcaaaaggtggtgagaaaatgaagaaatatccattttgttaattagtttacatgaaggtgggtcatgtgacagcctggataggttgtcaatgtatatcttaaatgttttactccactggtctgccatgaagccctgccttgatatctggaaggaatgatatttttctttaaaaaaaataataaaaactagagcagaagtccaaagaatagaagtgttttaaacattggcatgagcttgagagggtgaatatagtgatgtggactaatggaaaagggaagaatgttcaggcaaagtcagtggagggtcattaaaggtgagc

SEQ ID NO: 704385 - DNA, 620 bp, Homo sapiens
tcacatagaaaacaagaggatggaggtatttttaggagttgatccagaagcgaaataaatgaaccgttagtcaattaacatggtaatctgcaggatatatgagcagtacattttcatagtcaccaatgcatggggaagtagaggtagcctgggaggtagggtaaggatgagtgggatatcacatcattaaaaaagttcatcaaaatggctttttagtgactgaatgttgtgttcccccaaagtttatatattgaaattttaagccccaagttgaaggtattaggagtaggcttttaagagatgattaggttatattctggatctgacaggaataggattagtaccttaatttttaaaatgacccaagggagctctctggccccttctgccatgtgaggacacagtgagaagacatccatctgtgaaccaggaatcaggccctcaccagagaaggaatctgtggataccttgatctgagactccccagcctccagaacagtgataagtaaatgctcatttttaatcaatctaatctatggtatttgtgttacagccaccsaaataaagacaagactgaattaaaaagctgaagtgtgagcaaagatttgaagagggtatga

SEQ ID NO: 704386 - DNA, 699 bp, Homo sapiens
ttaccaacacatgaatttggggtgccacattcaaaccagagcaggacaaatgaataaaattatctgatttacatttaaatttttgggggggctattatgttaaagtagaatgtgagagtcaagagtcatagttggggaagccagtttggagacttttgcaagaagcaagcaacagaggattgtagctctgactaaggctataactgtggaggtgaatgctcaaaagtagtcagatttcaaatatatttcaaagttagaactaacaagatgtcctgaccccagtgccctttgtttattttctaaatgctactgatttgatatctgcctgcctattactctcttctgttcttttcacattgacatgatagtgtttatattcattaatatttcattaagtattcttaaatacttmaatattctacttaaatatttcatttaagtagaaatatttattaaatccatgtcatgaaccaaatatgccattagtttctgagataataaaacccagttctaggttgtaaatgaccacctaagatatagattgatatatagatacaggtatagttacagatatacatataggtatagacaaggatgaaagcagtgggggagaatatgaaataccaagcatgaagggtagtggggtaaagatttgaatccagtatggtgagggcaaaaactcagaccctgaagttgttt

SEQ ID NO: 704387 - DNA, 699 bp, Homo sapiens
ttaccaacacatgaatttggggtgccacattcaaaccagagcaggacaaatgaataaaattatctgatttacatttaaatttttgggggggctattatgttaaagtagaatgtgagagtcaagagtcatagttggggaagccagtttggagacttttgcaagaagcaagcaacagaggattgtagctctgactaaggctataactgtggaggtgaatgctcaaaagtagtcagatttcaaatatatttcaaagttagaactaacaagatgtcctgaccccagtgccctttgtttattttctaaatgctactgatttgatatctgcctgcctattactctcttctgttcttttcacattgacatgatagtgtttatattcattaatatttcattaagtattcttaaatacttaaatattctacttaaatatttcatttaagtagaaatatttattaaatccatgtcrtgaaccaaatatgccattagtttctgagataataaaacccagttctaggttgtaaatgaccacctaagatatagattgatatatagatacaggtatagttacagatatacatataggtatagacaaggatgaaagcagtgggggagaatatgaaataccaagcatgaagggtagtggggtaaagatttgaatccagtatggtgagggcaaaaactcagaccctgaagttgttt

SEQ ID NO: 704388 - DNA, 652 bp, Homo sapiens
ctgagatctttgaacctctggttgtgtgtggacgtgtgtgcaagtgtgtgtctgtatgyatgtaagttgtatacattgaagttcctgctttataatgtacagttctacagatttttccacactcataaacgttcaccacctcagaaccgttagagaatagtttcattatccccaaaattagtgtgtgtgtcctcttagtcaactactttccagttctctctggtaactaatgatttgattcctatttatataattttactctttcaataatatcatatgaattaattcttgtaacatgtcaccctttgggtctgacatctttctcttagcaaaataaatgtaaagtttccataatgaatctaaaatcatttcagataaaattgtagattcattttgttaagatccattttcctttttttggtgacgtttggaaatgtacaattgttctagcactatttgttgaatttattgagaaaagacttattctctacttgagacaactttgcatctttgtgaataatcatttgactgtatttgtacgggtttatttttgtgctatctattccatttcattgatctatgtctatcatttaccattactacactgtgttgattactacagctttatgatagttcttaaaagtaggcaata

SEQ ID NO: 704389 - DNA, 652 bp, Homo sapiens
ctgagatctttgaacctctggttgtgtgtggacgtgtgtgcaagtgtgtgtctgtatgtatgtaagttgtatacattgaagttcctgctttataatgtacagttctacagatttttccacactcataaacgttcaccacctcagaaccgttagagaatagtttcattatccccaaaattagtgtgtgtgtcctcttagtcaactactttccagttctctctggtaactaatgatttgattcctatttatataattttactctttcaataatatcatatgaattaattcttgtaacatgtcaccctttgggtctgacatctttctcttagcaaaataaatgtaaagtttccataatgaatctaaaatcatttcagataaaattgtagattcattttgttaagatccattttcctttttttggtgacgtttggaaatgtacaattgttctagcactatttgttgaatttattgagaaaakacttattctctacttgagacaactttgcatctttgtgaataatcatttgactgtatttgtacgggtttatttttgtgctatctattccatttcattgatctatgtctatcatttaccattactacactgtgttgattactacagctttatgatagttcttaaaagtaggcaata

SEQ ID NO: 704390 - DNA, 1125 bp, Homo sapiens
caatgacagaaagcactgacctaaaacctgcacatttcctctgtagattatctgttgcaagaatgatttctgtgatcttttgaaacagaccatgtggtacatagtaaactatagaatctcaaaatagtatttctttcatcatttgcatgatagttttgaagaaaatatatactggggagccaaagcatacttgtgtgtcttcagacataacaactaccgagtgcaaagtgtagctaatagaattcaaccaaaacgatgacacaaccccgaaggagtagacagacatagtgtttatcataatttacacccaaccttggcaagcaattttttaaaattaaagaagatataactaactgccaaatgaaatagtctgtgtgattcatcttggtggtgtggtaagtggttttctgattgaaaatctatggaaaacaaatatatytttatattccccaggaaattaggcagtcaaatgttttattatcttctcaaattgtattacgaaaaaaattccaggaattggagatttgtgggatgcatgagttttggtatttcattaaaaatcatgtaaacctctaaaatagagttctcagtttaaaaaaattatcttcaaaatgctgttaataccatatgcttattttcagtaccttctaaatggaagtattttctttatacagagatggctctgtttttagtatgttctcccaaatgcctatttcttagagaagttagaactcagaatacagcccacttctgaaccagactaaatcatttcccttcatatttttaagatggatctcgagttcagaaagattaattaccatgtgtatgaaataatgccttggcatattgtactcaaaagctatcttgttcaatgcatggattaattaatattacccaatacattcataattggcgtggaatacatttttgttcttgatccttctgttgtttaaagacctaatgctaagtctctagccttttgccatgatgtaatatattttgaatagaggtgtaaagctattctttgtgaacagtgatcttcatatcttggtttgtgctgtcagcatgaattgtagagacataattgtagatacagcattttggtgctatgggttttttatctac

SEQ ID NO: 704391 - DNA, 1125 bp, Homo sapiens
caatgacagaaagcactgacctaaaacctgcacatttcctctgtagattatctgttgcaagaatgatttctgtgatcttttgaaacagaccatgtggtacatagtaaactatagaatctcaaaatagtatttctttcatcatttgcatgatagttttgaagaaaatatatactggggagccaaagcatacttgtgtgtcttcagacataacaactaccgagtgcaaagtgtagctaatagaattcaaccaaaacgatgacacaaccccgaaggagtagacagacatagtgtttatcataatttacacccaaccttggcaagcaattttttaaaattaaagaagatataactaactgccaaatgaaatagtctgtgtgattcatcttggtggtgtggtaagtggttttctgattgaaaatctatggaaaacaaatatatctttatattccccaggaaattaggcagtcaaatgttttattatcttctcaaattgtattacgaaaaaaattccaggaattggagatttgtgggatgcatgagttttggtatttcattaaaaatcatgtaaacctctaaaatagagttctcagtttaaaaaaattatcttcaaaatgctgttaataccatatgcttattttcagtaccttctaaatggaagtattttctttatacagagatggctctgtttttagtatgttctcccaaatgcctatttcttagagaagttagaactcagaatacagcccacttctgaaccagactaaatcatttcccttcatatttttaagatggatctcgagttcagaaagattaattaccatgtgtatgaaataatgccttggcatattgtactcaaaagctatcttgttcaaygcatggattaattaatattacccaatacattcataattggcgtggaatacatttttgttcttgatccttctgttgtttaaagacctaatgctaagtctctagccttttgccatgatgtaatatattttgaatagaggtgtaaagctattctttgtgaacagtgatcttcatatcttggtttgtgctgtcagcatgaattgtagagacataattgtagatacagcattttggtgctatgggttttttatctac

SEQ ID NO: 704392 - DNA, 651 bp, Homo sapiens
gtcttactgaataagtgcaagcctgactatctgatccgggctgagttgcaactgtttacagaactcagcttggagcctgtaagcggctcagaccctcagctggactggcagagcagaatatgtgtgtgtcagtgtatgttttactcatccatcgcggaatcaggggtttgcaggaacaatccccccggcagctagtgcccccaggaaaggagtgctgcctcacttattatttctgctgctgatgctccttcatccgtgatattccaaatttatttctggtatccttcygatggaaaagcttcttttagtaggtcttttggtgcaggtctaatggtaacaacttgtcttggttttattttatctgaaaatgtgtttatttctccttcactcctaaagaatattttcactggatatagaattacagactaaaagtttatttatttaacactttaaaaattttgtttcattaattcttttataaattatttctgaggtcacgtttgtcaaccttcaaattattattctcctacaatcaacatgttacttattctggctaatttgaaatattttttgtctttaacttccagtacttttattacaattggtgtaaatgcagatttcttaaggtttattctctttgaagtttgatga

SEQ ID NO: 704393 - DNA, 570 bp, Homo sapiens
gggaactgcaacatcatcattttttttttttttttttgagacagagtcttgctctgtggcccaggctggagtgtagtggtgcgatcccggctcactgcaacctccgtctcctggttcaagcgattctcctgtctcagcctctcaagtagctgggattacgggcacctgccaccatgcccagctaattattgtattttagtagaggtggggtttcaccatgttggccaggctggtcttgaactcctgacctcaagcgatccatttgtctcagcctcccaaagtgctgtgatttcaggcatgagccaccatgcctggccttgcaatggyctttttaatcttacaaacatgtgtccatgcctggaggacccagctgcagggacagacactccaacccggtccaatctccttacctgcatattcactccttttaaagcagcttgaaaccagtgaaataagtgctttagcaataaagagtgaagaggagagtagaattttgtgttgcagatcattttgttggctcaacatctttctccacacacaagccgtaggctgtgtaagtggagatgaaca

SEQ ID NO: 704394 - DNA, 570 bp, Homo sapiens
gggaactgcaacatcatcattttttttttttttttttgagacagagtcttgctctgtggcccaggctggagtgtagtggtgcgatcccggctcactgcaacctccgtctcctggttcaagcgattctcctgtctcagcctctcaagtagctgggattacgggcacctgccaccatgcccagctaattattgtattttagtagaggtggggtttcaccatgttggccaggctggtcttgaactcctgacctcaagcgatccatttgtctcagcctcccaaagtgctgtgatttcaggcatgagccaccatgcctggccttgcaatggtctttttaatcttacaaacatgtgtccatgcctggaggacccagctgcagggacagacactccaaccyggtccaatctccttacctgcatattcactccttttaaagcagcttgaaaccagtgaaataagtgctttagcaataaagagtgaagaggagagtagaattttgtgttgcagatcattttgttggctcaacatctttctccacacacaagccgtaggctgtgtaagtggagatgaaca

SEQ ID NO: 704395 - DNA, 570 bp, Homo sapiens
gggaactgcaacatcatcattttttttttttttttttgagacagagtcttgctctgtggcccaggctggagtgtagtggtgcgatcccggctcactgcaacctccgtctcctggttcaagcgattctcctgtctcagcctctcaagtagctgggattacgggcacctgccaccatgcccagctaattattgtattttagtagaggtggggtttcaccatgttggccaggctggtcttgaactcctgacctcaagcgatccatttgtctcagcctcccaaagtgctgtgatttcaggcatgagccaccatgcctggccttgcaatggtctttttaatcttacaaacatgtgtccatgcctggaggacccagctgcagggacagacactccaaccckgtccaatctccttacctgcatattcactccttttaaagcagcttgaaaccagtgaaataagtgctttagcaataaagagtgaagaggagagtagaattttgtgttgcagatcattttgttggctcaacatctttctccacacacaagccgtaggctgtgtaagtggagatgaaca

SEQ ID NO: 704396 - DNA, 1045 bp, Homo sapiens
  misc_feature 96: n = A,T,C or G
tgaaatgtgaaaactaacatgataaacaatgattcattttaatggactgaaaaataacttgcatagacactggaggccaagaaaagaaaaaaaaanaaagaaagtaaagaaaaagcattatccttttatccatttaaagaaaaaaaagcaaaatacatcctattatcagctctcaatagatgaacaggcactaagcagaagcttcgggaaggctgctgtttcagaaaaacttaacaggtttttgaaaagaagaattccaaccccctgaactcccaccctcttgtgcacacaactggaagaatggcacacccagatctgatggtgataacttttatttgcaaagagatgggttaggaacggccagcggttgggggcagattggagatgggaggagagctcatcaaagggcttcagttagttgtaggtaaacaggccttgtcccctgacactgttcttttccttgcaacccatcaaaagatgtatctgaatggtgactggacccaggggtgctggggcgagggtgtcaggaagccgctttcrggaatcagccatcctactgctcttcctgtaaggatttctgttgctctttaaatcagtaagtggagactagggcattctaatgttgcaaacattaaacagtcaagctaccacttaaattttctgctgcaaaagaaatttcaaccactgactagttaaggggaaggatctcccctaccctataattcccatggctaaaacgcttgacatttcttatttcagactggaagattctgtaggctgtccgatttaggtaaatggcgctgtctttggctttcgttatgatgctcagaagtgagagctgctgcagtttgaccccctctccctggctgtgggctttgctgtgacacaaggtaaagtgaggagtcagtgctgccctgggacccagcccaagcatatggctacactgtggcttagtgtccgggggctgctttaacaaatgaccgcaaactgggtgtcttcaaacaacagaagctcttctcctggagttctgaaggccagaagtcca

SEQ ID NO: 704397 - DNA, 621 bp, Homo sapiens
cagaaatatttaaagcagccttaaagaatgaataaggaaaagcttatatatttgtgatctttattactgcacatatcgtcctaatatattttatattttaagaacaaacaatcttttttataaagaatttggattgttttgcattcctccagatggtaaaatgtctaagtcacacacaccacgctyatctaagggcttccaaaaatggaatcagctttagcaacagttttgagaagtgatctgtaaagcatttgctttttattttggaaagtgttcacacaaagctttcaaattaataacaatcaccattatttactttgttacttcaatgagtaattgttgcagtgtactctagtccacactatattataatcacaagctccattcagtcttacttttaataaaagtttttaaattatcgaaaactaaaatgtttgtagaatttcaaagtgactcattcatactaagcattctacacatgagaggtcctgtttttattagtcaagttaagattatgtgctgggccaggcgtagtggctcacgtctgtaatcctagcactttgggaggctgaagcagttggatcacttgaggtcaggagttcaagaccagcctggccaata

SEQ ID NO: 704398 - DNA, 1946 bp, Homo sapiens
ctgtgatcatttcgaggaaatgcatgtggtcttttcagaactgacagatcttggtctgtctgattcatgtgctcattccacaagcatgggcaaccgagaaaatggtccttcaccattacttgaagaaatcagaagaaccaggttgaaaagccccttggaaaattatttttcttaagtttccacattaagtacattatctgttgtcatggcatcaaaaaaacacaatagaaaaagtataggttcagggccatacaaaataacccacaatggagatagcattccactgataagagaaaagtattataatcggtcagaggtaggaaacaggaactctcaaacatcattttgcggttttcctggcttatttgcagcatcctttcagccacttcatcttgtcccatgcatttcaaatgtcagactattaagatgaattaattaaaagtcatatttgagtgaatatgattttttcccaaagccagctctatcataaattaatttttctaaaattattctactctagtcatcacatggaaaaaaaggaaattgttgagtgctgtatagtgtcttcagctatattgttttaatattattaatgttctccagttgtaaaagaaatgcaaatttgcacggctcagattttgcatttaatctgactaaagttgatattgtgagaaaatttaatatccatctaagtaggttgtaatattgaaaacctgagcttcatttccttatcagtgatttaccatatttctgagaaagattattagccccagaaaattaattgacaaaacaatgttttaaatctttgcatatttgtatttgtctcaattgtagttatttatgggtcttagtttcttttcctgtggacacagtcaaaaagggaactaggaaaaactgataagcattgtaaccactcctgcaattacagccttttgtaaagttgctacttttatgaaacaattgggaacaccaaagattatccccacagctttaagaacactttgaaattttcactatgaaaaaatttgagttcttagtatcacaatactgcaataccacaaattaaaatttaaactaataaatttaattctaaatgtacaattaaggatttaagacataaatatcaatagactttcctaatgttccacagattctgcagttatttagaaatgagaaatgtatttaccaaagactaaataaaacacacaaaaatagattgggtactcttttaaaaaagactttaaaactttaaaaagtttgattttttcaaaaaacagctcctttgactcactgcaggtgaaatagcatagaaatagttggactgtttcacccactaagttgtaaggacaacaaaatactaaaaaatacttaaagattggatcaactattttaatcatcttaaagagctaattcatttaatggagaaatccaatttagttgacagcaaatactccattttcttgtcaatgaagcaaaactatgcagataggattttattcactcagagctgaattctctcctctttactagaatttgcaggcacactgaataaaaacgaacattcggtgtaaaaaaagccaaagctgaaatgatataaaaggattcatcttttcataagtgacttttaatattcaatatatatatttagaaactttccgggacccatagaatatatctgaaacctgccatacttggccaaacctccagaaagcaggtcacttgcattttcatgcttgtggcctctcttttttctcgctatttcactatttcatctggacygtggcatgaggccattgcctgagaaggcatacctgcctgacaacttgttggctagtggtccataaccaccagtctgctgttcactacggccggagatacccgattttaaatgatttaagattcacattgacctttttaaaaacacttgcttctctccaaactctgca

SEQ ID NO: 704399 - DNA, 963 bp, Homo sapiens
tggcactttaactgtttcttacattcatgcagttggctcaaactctgttacatcttttaagaaaaggaagttgaaaaagtcttgtcaggaaaatagcaatgagactgcacactgatgctcacaggtaaagtcagaagagttcgagacaggcatgtgtggtttgcaatatagatctgcacacaggaacgctctcatagtgacatcattaagttggttgagcaagagaaagtggttgtagttgtttcggtagttaaaaagaattacctgtttttacaggggtagttctggttgttcagaaagtctgggggcctacctgaggatatttactttttttaagttttctgtttcctcttggacatttgtataattattgatctgggactcactatgaatgaacagttgtaattaggtgtctagtgattgactagcaataggctatttatcagacacactatgtaattagcttgattttcagtatgctttccagaagtattaaatagcaaaacgttgatgatgtagttaaaatttactgaaatatttaatagtctgtattatatttaagctctccctgttcagtgtaataaagaatataacccttgctgatgggcaaatgggaagcctgcgcaagtttcttaagaattggtcgatgcaaatgcaacaataggcgcaggttttaatagaagcgtctctgtccgtggtgctgaaatgagatttacccaagagctgtactgaagatgaagatactgcagtgacctttagtagggaagatgtaatgacagtatctctataagccttaatgttttgttccaagggtaatttcttacacaacacaataaacgggtactgcttttcaagggaaataatacaccacattctctctctttctctcctactttcccaatcccatatacaagcagaacaactgtycctctgtctcacttgcgttctgctgggaaaataaag

SEQ ID NO: 704400 - DNA, 1056 bp, Homo sapiens
ttaaatctagcatatttgcattatttttttcactcaagaaattcaagaattaaaagaatcagccaggtgcagtaactcacgcctgtaatccagcactttgggaggcggaggcagtgggactatttgaggccaggagttcaagactagtctggcctgggtaacacaatgagactgtcgctacaaaaattttttttaattagctggttgttgtagcgcacacctatagtcctagctacatgggaggctgaggtgggaagatgaggatcacttgagcccaagagttcaaggctgcagtgagctatgatagcgccgctgcactacagcctgggtgacagagcgaaatcttaaccccccaaaaaaaagaaaagaaaagaaatttaagaatcacattttaaataatagtttatctgaagaaaaaataataaagtttaaaaagccttcccattaaaagtatttccccaaggaaaaataaacatggaaaatgactttctagtcaactaagtcctaacaattgcaaaatagaagtaattttaataagtgattttttaacagcaaaaaaataagatccattttattatttcyattatcttgaattttcaccttctcatccttaagtttatatttcagcctgaacttcagaaacagacacttaggcctttatatttttaaaggaattaattttctaactcaattcttgttatctcaggatttgatgaatctagctcacaaaagtcaatgctttcaaaatcaaaacacttttacgatcacctataattctcactaaaagctctgtatgttgttatgtaattatcatattgacagtttaacttcatctgaaatttagaagagctagttttaactttagaagatcatactttccatacataatacacggtattcagcagacatagcaaaacgttaccaatatccaaaatcactcactcacaaaaggccctccaatagactacaggtccgaagtcaaaagtgcaggaaaaatcaattcagccaatgagcctacctacaactcccagagcagactttcacctagaaacaaag

SEQ ID NO: 704401 - DNA, 1137 bp, Homo sapiens
tgccatgaatgaccttttagtagtctagtgaaatgtgtgagctcctcaatatggagcttttatatgcataaaatraaatacatagggttacaaagaaacaaattatgttgaaatattgtcctatctttgggtcctttggtacaaggtgggagtttgcagaacccacattaagagcccctgttaccaatacatttaataacaccagagtgtactatgttgcatatatttctataattgataactacaatccagtgatagaacacaagtagattgcatattgctataagatgatggcagtttttttctaacttatttttctagcttttacttgtaatatgagtatattgagatggaaagaagtttcgatagtttgatttattgtgtgttttaaacatttttgtgttgtaaagatatagccctaaagtttgagtaaatcttacttattgtactatatatgaaaagtattgagtaatagtttgaaggttgtaaattcaaaattatagtgttgcttggcagtgagaggagtcaagggttttttcattctgatgtctgcactgttgcttagaatgtttttagacattttttgataaaatgggaatcctgcattcctgttatatatggacaagtccttatcctttacttaccataccaactgagattgtttttggacactttaacagccattttttttattttttattttgtctttgaaacctaaatattttaattattttccatttaatcttgtttttcagaatgtgtgctttatcacaccccagtttttatatcagttctactgtttgttttctcagcaagtaagtaaatagaaacttgtgttttgtgttttgtccttttagagtaacgtatgtatgttcagattttgatagacgtttgaagggacttttttcatttttcttagtcctgcagggaaccagacagaacttttctgtttagtatatttaaccagcatgacattcagaatatttatttattctggttttcagtttgaggtgagtgttaataccaaaatgtaattctggatgcttttaaaaatagataataacccttaacagcttatgagagaattttgataacttatttgtgatatttctgtaaaatccaaatcaagccaggcca

SEQ ID NO: 704402 - DNA, 1210 bp, Homo sapiens
ttatatttagacaaaaacaaattgagcagcatccaaacattttttttttwaaataaattattttataaatatcacaggctttcatttacaaaagaaagcttctcaccactcctaatctttctttctttatatatgtcgtccccatgaatacactaagctccattgctttttgttgtttttgagacggagtttcactcttgttgcccaggctggagtgcaatggtgtgatctcggctcaccgcaacctctgactcctgggtgcaagcgattctcttgcctcagcctgtcaagtagctgggattacaggcctgcaccaccacacccggctaatttttgtatttttagtggagaccggagtctctccattttggtcaaggtggtctcgaactcccaacctcaggagatccgcctgccatggcctcccaaagtgttgagattacaggcttaagccaccgcgcccagcccactgagctccactgtaaattttcattggcataagaacaaaacataaaaggaaatttgattttttaaagaaaagcctatgaagtgttaatcacctgtcactttgctaggaattcatttataaacaatgcagatacttcagcttgcattgggttatgtaacagttcatttttatttacttttaattatcactttggaaatatgtgactaagtgcaaatttagaaaaggtttcagtaaagggatcaatgataagagtaatactgaagccatttctctccttgcacacatctgcaagtcattacctaagctttctgaaattcataaaattacatctatctagccaaatgggcaatatttatctaaaacattcattttcaccattgatacattatttaacatgtatatgtaatgtgtagtattacagtgatgaacatcatagtgccctttaacaacctcagaaggcaaaacatccatgttacagccagttaataaaatgagggaagacatgaagcaagtttgcttggtgtttctgtcctgcctgtctctgttccaaatggatacaattacttctatgtctatatctatgaattccaagatgattacagctagaactgatcattctacatgcaggaactagaagacaagcaaatatgcattcacaataaactaattaaaatgctgtgttgagactgaaaattaattagagaatgtatgtctcatattttggttccctgaatattttttttg

SEQ ID NO: 704403 - DNA, 1210 bp, Homo sapiens
ttatatttagacaaaaacaaattgagcagcatccaaacattttttttttaaaataaattattttataaatatcacaggctttcatttacaaaagaaagcttctcaccactcctaatctttctttctttatatatgtcgtccccatgaatacactaagctccattgctttttgttgtttttgagacggagtttcactcttgttgcccaggctggagtgcaatggtgtgatctcggctcaccgcaacctctgactcctgggtgcaagcgattctcttgcctcagcctstcaagtagctgggattacaggcctgcaccaccacacccggctaatttttgtatttttagtggagaccggagtctctccattttggtcaaggtggtctcgaactcccaacctcaggagatccgcctgccatggcctcccaaagtgttgagattacaggcttaagccaccgcgcccagcccactgagctccactgtaaattttcattggcataagaacaaaacataaaaggaaatttgattttttaaagaaaagcctatgaagtgttaatcacctgtcactttgctaggaattcatttataaacaatgcagatacttcagcttgcattgggttatgtaacagttcatttttatttacttttaattatcactttggaaatatgtgactaagtgcaaatttagaaaaggtttcagtaaagggatcaatgataagagtaatactgaagccatttctctccttgcacacatctgcaagtcattacctaagctttctgaaattcataaaattacatctatctagccaaatgggcaatatttatctaaaacattcattttcaccattgatacattatttaacatgtatatgtaatgtgtagtattacagtgatgaacatcatagtgccctttaacaacctcagaaggcaaaacatccatgttacagccagttaataaaatgagggaagacatgaagcaagtttgcttggtgtttctgtcctgcctgtctctgttccaaatggatacaattacttctatgtctatatctatgaattccaagatgattacagctagaactgatcattctacatgcaggaactagaagacaagcaaatatgcattcacaataaactaattaaaatgctgtgttgagactgaaaattaattagagaatgtatgtctcatattttggttccctgaatattttttttg

SEQ ID NO: 704404 - DNA, 1210 bp, Homo sapiens
ttatatttagacaaaaacaaattgagcagcatccaaacattttttttttaaaataaattattttataaatatcacaggctttcatttacaaaagaaagcttctcaccactcctaatctttctttctttatatatgtcgtccccatgaatacactaagctccattgctttttgttgtttttgagacggagtttcactcttgttgcccaggctggagtgcaatggtgtgatctcggctcaccgcaacctctgactcctgggtgcaagcgattctcttgcctcagcctgtcaagtagctgggattacaggcctgcaccaccacacccggctaatttttgtatttttagtggagaccggagtctctccattttggtcaaggtggtctcgaactcccaacctcaggagatccgcctgccatggcctcccaaagtgttgagattacaggcttaagccaccgcgcccagcccactgagctccactgtaaattttcattggcataagaacaaaacataaaaggaaatttgattttttaaagaaaagcctatgaagtgttaatcacctgtcactttgctaggaattcatttataaacaatgcagatacttcagcttgcattgggttatgtaacagttcatttttatttacttttaattatcactttggaaatatgtgactaagtgcaaatttagaaaaggtttcagtaaagggatcaatgataagagtaatactgaagccatttctctccttgcacacatctgcaagtcattacctaagctttctgaaattcataaaattacatctatctagccaaatgggcaatatttatctaaaacattcattttcaccattgatacattatttaacatgtatatgtaatgtgtagtattacagtgatgaacatcatagtgccctttaacaacctcagaaggcaaaacatccatgttacagccagttaataaaatgagggaagacatgaagcaagtttgcttggtgtttctgtcctgcctgtctctgttccaaatggatacaattacttctatgtctatatctatgaattccaagatgattacagctagaactgatcattctacatgcaggaactagaagacaagcaaatatgcattcacaataaactaattaaaatgctgtgtygagactgaaaattaattagagaatgtatgtctcatattttggttccctgaatattttttttg

SEQ ID NO: 704405 - DNA, 569 bp, Homo sapiens
actcagtatgcaagcacttttccattaacaggcaacttagtggaggggtatttgttgcctggttggccatgcagtttggcaataagcccactacatatttccgaggacttctctgaaattccattactcagccggcaggaaggtctttgtcttcctttttcagaaagccatgaatctgtcactttcatatccttgtaatcagaactgccaagaactgtgagtaactgcaagagtcattgcaagctaacaagttcgcctgccacaggttcatggatgttggtaggaaaacaaacctcttgtgttaaagacaaaggatagtttgttaacctcctctcgaacttcttattttccttaatcctgcccctctttacactttttcytcgggaatatcttggatatttttgacttttgctcctagatttaaattttagagacagctcatcaatttacttgaaaacaatatgcaataaacaattcctttaaaaccatagataaatatagggaaaattggcatttttaaccatatttagtttttctagtaaatagcttgatttgtgtctccatttatt

SEQ ID NO: 704406 - DNA, 530 bp, Homo sapiens
atacaataaaaataaatgaataaaaataaatagactatactttctcctttgctgtcttcttggtgtacccttgctaaaaattagttgattgtatatgcatgggtttatttcttggctttccattttgatctattggtctatgtctctggttttatcccagyaccatattgggtttgattactattactttataacataatcatagcattatttatacttatgtttttatcaagatagtatatatatatatatttgctaattaatcaaatagtatgaagggcttatggagaaagcagtagtgtgaaaccataatcctatttaccttaagattttccctaattttaatatttttaactgaatataaacacatttatggaaaatacatacttctatttttaattcatatcctacagtctttgtatttatgaaaaatgagaatgttgcttatttatgcaaacttttctgcctctaaattttgtcagatgtttgatagttacattattattttagttaatgtatgataccttcta

SEQ ID NO: 704407 - DNA, 1062 bp, Homo sapiens
caatttgtaactgtcagcaatagacttgaacccaagtattctggttccagaatctacacactaatccaggaaagtaaaggactgcgtatgttttaagcacctattaacgtgccaagaactgtggaatatatgaaaaatacataggagtcaatatgtaaatacacatagtttaaatagcaggttgggggaaaaaataacatactctgtaactagttttttcaaccgtatatcatagaaagttaagttattcagttgttcaaagtcagtcagtttccatgagagatggttaaaatgaaaaaccttccttataggtgaaatttagggtgaccattgccatttttaatcagatatccccaaaattcacctttccttgactagcatttaagaaagtactgcaaaatagtatatgcaaacattggctttggtaacttttgccaactaacttaccatagttttaatcagggaaaatggtgagttcatgtgtggaagttctactctgactcaggtaggtagagattatgaacaaaaagggaaaaggcaatttcctacctgatggtgtggaactctctaaatctgccagtccagtttttttcccccttccgtttaaggttttataagactttctaaataggcaatttagtatttgttactagtttggaaattatttttctggagccatatgaagtactaagtatttatagacaaaaatgttggcaaagaatatagaggttcttgaaatggcctttcactgtggcagaagaacttgaatacattcaagtgcaaatccagatttgtagagagtactgtgggtttatggaaataaagcatttgattgaaaaagtcattttttccagtatgacttagtgattattaaataaccatgtttttaatctgactcactggagggaagctccatagcattagtggtaaacagtttatgcagttagaatatgaaaaagacaaagaaaagcaaactaaaaagacattttagagtagagtgggaattgagccaatgtgcctgactggtaaagtctttgragggaagccaggaagtctgtgata

SEQ ID NO: 704408 - DNA, 1291 bp, Homo sapiens
tttttaaaaattgacttttaagaagtctgaactactatggaaatgtagaaagaaaataatgtgcaaaatcagataaaacatctgtacacttatgaaagatttgaaattagactccagagtaatggaaaaagccatcaattataaatactgactacaactaaccatctccatgaaataatacggtttgatgatttttttctactactctctcactcttcctcaatttatgactatataactatgattatctataatttcaaagtatcctatgacatcaagggatactttgattttagttttcaaataaaggtatgttctatggaaaaaaactggaaaaataaaacagatgacacttcatcactcattctgctttttccaagataaaataaggcaattaactacttaatattatcattgaaacatgcttttaaatatgcacactaaaatttaatttaaggaatcaatatctgaattttgtgtgaggatgaccaagaagtttctaaaattggcagggcgcagtggctcatgcctgtaatcccagcactttgggaggccgaggcaggtagatcacctgaggtcaggaatttgagaccagcctgaccaacatggtgaaacyccatctctactaaatatacaaaaaattagccaggtgtggtggcgggagcctgtagttccagctactcaggaggctgaggcagaagaattgcttgaacccgggaagcagaggttgcagtgagtggagatcatgccattgcactccagcctgggcatcaagagcaacactccatctcaaaaaaaaaaaaaatatatatatatatatatatatatgtatatatatatatgtgtgtgtttctaaaattaattattcaaagatcaaatattgtcattccttagtaaaaattattttgttactgagtagtgttaaatttacttattgaaaaggagtatcaaaaaatccattaatgaatccaacaaacattcattgatatcttactagagctcaggccctttgcttgttgcttaggatacaaaatacccaggtgttcacatttactgtctagtagaagcacagtcacctaaaccaaaattacactacatgttgctctaagtaaaaaattacagagagtctaaaggaaaagcacaagtgatagaagactggaaatttagacttcatcacaatttaaaccttttttgctttgaaggacattattaagtgaaagaaaacctcacagaatgggagaaaacatttgcaagtcatatatctgaaagggacttatatccaaaatatata

SEQ ID NO: 704409 - DNA, 608 bp, Homo sapiens
cataagtagtttaaacaaaattagtggaaaaacagggagtttmagggagcaagagatcaggtcttctgggctcaccacacatcaggtgatttaagctaaaaatggcttaaaataccgcaatcacttgaaacgccttacataaactgaccaggaatctggggcattcgcgttagagacaattttcttctcctcaagataagggatggggaattagtcatagggtatttccagataatgtagttaacacctcgtgtaatattaggtgggcagggagctctgctctcaggaccaaaattgctcctgccagctctaatagggaatgtgtgtatttttaaagtctgggtaagcactgtgagtcatttccacaatacgcctccctttggcgtgaaatggggcagaaagtgccccaaacagctgttattttcgcagtgattcattcattcattcattcattcattcattcattcatccacccatccattcattcattcactcatcacatggcaactcatcacccctgtataccagacccagtgccaaatactggggagatgtgtgtgaacaaaatctcattttcaaggagcttattgcctgctgcacattttagc

SEQ ID NO: 704410 - DNA, 608 bp, Homo sapiens
cataagtagtttaaacaaaattagtggaaaaacagggagtttaagggagcaagagatcaggtcttctgggctcaccacacatcaggtgatttaagctaaaaatggcttaaaataccgcaatcacttgaaacgccttacataaactgaccaggaatctggggcattcgcgttagagacaattttcttctcctcaagataagggatggggaattagtcatagggtatttccagataatgtagttaacacctcgtgtaatattaggtgggcagggagctctgctctcaggaccaaaattgytcctgccagctctaatagggaatgtgtgtatttttaaagtctgggtaagcactgtgagtcatttccacaatacgcctccctttggcgtgaaatggggcagaaagtgccccaaacagctgttattttcgcagtgattcattcattcattcattcattcattcattcattcatccacccatccattcattcattcactcatcacatggcaactcatcacccctgtataccagacccagtgccaaatactggggagatgtgtgtgaacaaaatctcattttcaaggagcttattgcctgctgcacattttagc

SEQ ID NO: 704411 - DNA, 661 bp, Homo sapiens
aacccgggaggcggagaggttgcagtgagccgagatcacatcactgcactccagcctggacaacacagagagactctgtatcaaaaaaaaaaaaaaaaaagaaatgagaaacactatcttaaaatgaggtaactttttgggtaacaccaataagaattcactcatgttaatattccagagaaggacacctctatttagtgctccaatctccgagaaagaaaaagaatatggcataaaattgagattttctttttatggtgggtctgaattctaaagcccagatgagagaaatattataacaagttttgtctattaaagatggggtttcactgagaaggtttaaaaataacttatttaaaaaactgaattctcttagagagctacacaaagagaacactatgagatactaacacctaattatagtatgtaaaactaaacccatcaacagccaacagagaagaaaatttcactctatccctcaggttgtttttaaaaaactttttttaacataaagtcacaacagtttcttaagattgatgtataaaaggaaaagctattttcttttgttaattaaaaaaaggacaagaaattgagaaacagagttctaaacattccagttacaaattacartaaaatttaccttacaaaagcagcaaagcaa

SEQ ID NO: 704412 - DNA, 1830 bp, Homo sapiens
tgcatttggttcgcttgcttattagatattgtactcagtagtttggaaaataagccagggttataactaaaaatgcaagagttaagacataatcaccaatataggttgcatgaattttcctaattctggttttctagcactttagtgagtagatacaaaataaaatgagactggtttaactcaccacagagcatattcatatttagtgattaaaaaattttacttggtaccaacagatttttttttctaaaacatttacagagtgatatatggcctaaaataatgcaagtggcagctcaccagcaacctttgttttcctgttgggaccgtctgcactcgttgtattcattgtattaacccattaaacactactgttttgataatgatgctgaaaattgtaggctaattgtttcttcaaagcttgatggattgctaaaagcagttgcagatctgtaaataatctaatagttccttgccgaatgggatgttcgaaaaacttactcaggttgccagattaagtgatgtacagttgatgtggctcagactgttaatatgttcctcttaattttttcatctctcttaaactcatagctttgcgtcttattttcttccatcttcctcttctttcttcttccctgttagctttcttttaactttttctgttttatgcttattagagctgctgttctctatttctttacctgaccataatatgaaatttaagacctgtttaatgaaaatgtctttaaatagtaagtacaatgtttttctttttataaattactattctgtcacttttcctaaatatattcttttcttgtacatattcctttattgacttttctcggtagattagtggcctttgggggaaagaaggcttgmaaagtttctcttgaaagatgtttctcccaaattaaaattttaagccataagaaatgaagtttttctagttctgcattcacagtctggctgttatttgtgctttcaattcataattgttgttgactgaagacagaatgacttatgaggaagattttcccttttgcttttggaaacgaaattgttttaatgacatgccatgattttacataccctagtgtgtcttttccacaattatatttcttttgagcataatagtttcagtattttacagactatggatgggaagcataaattactaacaggtaatttttcttcccttttgaggtaccagattgttttctagtttaggtcatgttcatggtcattatttaaatcttggtctttattttctctgttacattggaaaagaaagttaaagtcactatcctctataggtttactcgtgagatcaaggtgttattaataagatacaaagacttgagcaaattttgagacttacaaataactttgtatgtgttagtacagcatagccttatgctgtatcctgggctagatacagcagcagagctgttagaggctttagagatcatctagcccaggatacagaaagtcttaataaaccagttggaaagtgatagctcccctgttttgagagagatattatataaatataaaacataattttggaaaagtctaaactgagtatgttgtcttttgggggtatttaataaatataaaccagctaaatttaattgtactttatttatttttaattgacacaaaataattgtattaatacatatttatatggtacactgtgatgttttgatatatacaacataaagtgatcagatgtgggtaattactatctcaaacatttatcatttctttttattctaattatacttttatattaatgaaattacttcaatttatagatttaaaaga

SEQ ID NO: 704413 - DNA, 1169 bp, Homo sapiens
tataacacaagtataaacaagataatgattccattcaaatatattattaataaaccatctttctctcttaatcataccttttacttggcttaatgtaacactgtacaaggtcttattaacaatttactgaggagttagtgcctggcactattctaagtgttttatatatagtaattcattttatcctcacaataaccctatgatggaaaggctattattatcccaattttagagacaagaaaactgagacagaggaattatggaacacttaaaaaatcatgactacagtcatatggcaagttgccagatggcagtcaaaagtgaagacagttaagaccaatttgaagttactgcagcagtcaagtgacagtastttggtctagggtattgacagtgaaaggggaagaaggggtagggaatggaagcactggacagagactaagatggtagaatggccagactttagtaaaactgcattgggttagaccacactgattggactggattgaactggattggattggatgaggataagggaagtacgcagaaaaagaagagttgagactgatcccaagatttaagttagatgaactgggtggatttcagtagttgaatcagaataatgatggtagagagggtctcgttttggctatttttgtttgtttacttgcttgcttctttttggcaggaggtatcaatcatgaattctattttaatcatattccactagagatacctaagacactctacaccagcacaatgcctgtcaaataacaggtcccaaataaatatatgtgaatgaacaaatgacaaataaagtagaaaaatatgggaggtggctgaatataattggtgtaaatcttagaagcagggtcaggtataggtttgggaatcatctacagatactgtctgaaacttgccttaaagtgtttgatgggaaatgaaaagagcctaggacaagtcttatggaactccagcaatttaatagttagaaaagaagtcagcaaacaaaactaaaaaaagaagaagaaaaacagaaggggatacaagatgtgggaacatttcaagaagttcagtaagagagttgtcaatcatgccaattgaagcaaaatggagactaaaaagtgtctcctgggtttggaagtcattggtgaccttggtgagatgtt

SEQ ID NO: 704414 - DNA, 1169 bp, Homo sapiens
tataacacaagtataaacaagataatgattccattcaaatatattattaataaaccatctttctctcttaatcataccttttacttggcttaatgtaacactgtacaaggtcttattaacaatttactgaggagttagtgcctggcactattctaagtgttttatatatagtaattcattttatcctcacaataaccctatgatggaaaggctattattatcccaattttagagacaagaaaactgagacagaggaattatggaacacttaaaaaatcatgactacagtcatatggcaagttgccagatggcagtcaaaagtgaagacagttaagaccaatttgaagttactgcagcagtcaagtgacagtactttggtctagggtattgacagtgaaaggggaagaaggggtagggaatggaagcactggacagagactaagatggtagaatggccagactttagtaaaaytgcattgggttagaccacactgattggactggattgaactggattggattggatgaggataagggaagtacgcagaaaaagaagagttgagactgatcccaagatttaagttagatgaactgggtggatttcagtagttgaatcagaataatgatggtagagagggtctcgttttggctatttttgtttgtttacttgcttgcttctttttggcaggaggtatcaatcatgaattctattttaatcatattccactagagatacctaagacactctacaccagcacaatgcctgtcaaataacaggtcccaaataaatatatgtgaatgaacaaatgacaaataaagtagaaaaatatgggaggtggctgaatataattggtgtaaatcttagaagcagggtcaggtataggtttgggaatcatctacagatactgtctgaaacttgccttaaagtgtttgatgggaaatgaaaagagcctaggacaagtcttatggaactccagcaatttaatagttagaaaagaagtcagcaaacaaaactaaaaaaagaagaagaaaaacagaaggggatacaagatgtgggaacatttcaagaagttcagtaagagagttgtcaatcatgccaattgaagcaaaatggagactaaaaagtgtctcctgggtttggaagtcattggtgaccttggtgagatgtt

SEQ ID NO: 704415 - DNA, 826 bp, Homo sapiens
gaaaacctcccaattgagtcaaattgagggaagagcaggcaatccatgtgagcttttcatgctttactttggaaaacagggtagtcacatctcaaaaaagcccaaaaggagtttcatctctatcactacatatactctatcactgcatatactctatcactgcatatactctatcactacatatgcactatcactacatatacactatcactacatatactctatcactacatatactctatcactacatatactctatcactrtatatactctatcactacatatactctatcactgcatatactctatcactacatatactctatcactgcatatactctatcactgcatacactctatcactgcatacactctatcactacatatacgctatcactacatatactctatcactgcatatactctatcactgcatataccctatcactgcatataccctatcactacatatactctatcactgcatatactctatcactacatatacactatcactacatatactctatcactgcatatactctaccactgcatatactctatcactgcatatactctatcactgcatatactctacatatatgctatcactacatatactctatcactgcatatactctatcactgcatacactctacatatatgctatcactgcatatactctatcactgcatacactctatcactgcatacactctatcactgcatacactctatcactacatatatgctatcactgcatatactctatcactgcatacactctcactgcatatactctatcactgcatatactctatcac

SEQ ID NO: 704416 - DNA, 826 bp, Homo sapiens
gaaaacctcccaattgagtcaaattgagggaagagcaggcaatccatgtgagcttttcatgctttactttggaaaacagggtagtcacatctcaaaaaagcccaaaaggagtttcatctctatcactacatatactctatcactgcatatactctatcactgcatatactctatcactacatatgcactatcactacatatacactatcactacatatactctatcactacatatactctatcactacatatactctatcactgyatatactctatcactacatatactctatcactgcatatactctatcactacatatactctatcactgcatatactctatcactgcatacactctatcactgcatacactctatcactacatatacgctatcactacatatactctatcactgcatatactctatcactgcatataccctatcactgcatataccctatcactacatatactctatcactgcatatactctatcactacatatacactatcactacatatactctatcactgcatatactctaccactgcatatactctatcactgcatatactctatcactgcatatactctacatatatgctatcactacatatactctatcactgcatatactctatcactgcatacactctacatatatgctatcactgcatatactctatcactgcatacactctatcactgcatacactctatcactgcatacactctatcactacatatatgctatcactgcatatactctatcactgcatacactctcactgcatatactctatcactgcatatactctatcac

SEQ ID NO: 704417 - DNA, 826 bp, Homo sapiens
gaaaacctcccaattgagtcaaattgagggaagagcaggcaatccatgtgagcttttcatgctttactttggaaaacagggtagtcacatctcaaaaaagcccaaaaggagtttcatctctatcactacatatactctatcactgcatatactctatcactgcatatactctatcactacatatgcactatcactacatatacactatcactacatatactctatcactacatatactctatcactacatatactctatcactgtatatactctatcactrcatatactctatcactgcatatactctatcactacatatactctatcactgcatatactctatcactgcatacactctatcactgcatacactctatcactacatatacgctatcactacatatactctatcactgcatatactctatcactgcatataccctatcactgcatataccctatcactacatatactctatcactgcatatactctatcactacatatacactatcactacatatactctatcactgcatatactctaccactgcatatactctatcactgcatatactctatcactgcatatactctacatatatgctatcactacatatactctatcactgcatatactctatcactgcatacactctacatatatgctatcactgcatatactctatcactgcatacactctatcactgcatacactctatcactgcatacactctatcactacatatatgctatcactgcatatactctatcactgcatacactctcactgcatatactctatcactgcatatactctatcac

SEQ ID NO: 704418 - DNA, 826 bp, Homo sapiens
gaaaacctcccaattgagtcaaattgagggaagagcaggcaatccatgtgagcttttcatgctttactttggaaaacagggtagtcacatctcaaaaaagcccaaaaggagtttcatctctatcactacatatactctatcactgcatatactctatcactgcatatactctatcactacatatgcactatcactacatatacactatcactacatatactctatcactacatatactctatcactacatatactctatcactgtatatactctatcactayatatactctatcactgcatatactctatcactacatatactctatcactgcatatactctatcactgcatacactctatcactgcatacactctatcactacatatacgctatcactacatatactctatcactgcatatactctatcactgcatataccctatcactgcatataccctatcactacatatactctatcactgcatatactctatcactacatatacactatcactacatatactctatcactgcatatactctaccactgcatatactctatcactgcatatactctatcactgcatatactctacatatatgctatcactacatatactctatcactgcatatactctatcactgcatacactctacatatatgctatcactgcatatactctatcactgcatacactctatcactgcatacactctatcactgcatacactctatcactacatatatgctatcactgcatatactctatcactgcatacactctcactgcatatactctatcactgcatatactctatcac

SEQ ID NO: 704419 - DNA, 742 bp, Homo sapiens
tgaagatctagattgttcagaaaaatggagcatgaatcagtgttttctgactttgtcactttcagaacttgtccacatgaagtcaagatggtaaacgtcttatctcataacaaatgcgaggaagtgatttaccatcttcagttgctgaggacagatggtcatatatcatacacagcaggcattatcaggagataaagtaagcggtaccttgcatagctcagtttgaggaatattacaggacaccttatttcaaaatacccacttacctaaagtcattccattcttaaagctttgctactctagtttgtgatgtgttttcctttgatgttagcagggattgattgacagtctattagaataaagtactatgcagcagggaaggggagggagaagggaaaatgggaggaatccacttagaaaagtatagagtttcctagggctgaggaagggttccaggtgttaaatattttccttctttccttaacctgaatagatcgttgtcactttccttctcttaatattttataggaaaaccgttatgttcaagattctcggccaggcgtggtggttcacacctgtaatcccagcactttgkgaggccgaggtgggtggatcatgaggtcaggagtttgagaccagtctggccaagatggtgaaactccatctctactaaaaatcttaaaaaaattagctgagcatggtatgggcacctgtaatcccagctactcgggagactaaggca

SEQ ID NO: 704420 - DNA, 621 bp, Homo sapiens
tttccatgtgcaaagtgctacactgggtattacagaaaatacaaaaataaattagatgatttgagtatttcacttaattggatttaataatttcagagtttcttaaattcagataatcaaagttatcttacgtttaggaactcgaagctatattcatacttttaagaaaatggaacataattttaaaaagcaagttgccaaaacgagagatcaagttgtactttgttttgttttgttttgttttgtttttgagacggagtctcgctctgtcccccaggctagattgcagtggtgctctcttggctcactgcaacctctgcctcctggattcaagcgattctcctgcctcagcctcctgagtagctgggactacaggcacccaccaccacgcctggccaatttttgtatttttagtagagacggggtttcaccatgctggccaggctggtctcaaactcctgaccttgtgatccacacacctcagcctcccaaagtgctgggattacaggcgtgagccccgggtcccagccgtactttggtattttttattttacattttctctcacatagtccagttgaaattttcttacttaactatcttggcgtrtgtctaaaatttgc

SEQ ID NO: 704421 - DNA, 626 bp, Homo sapiens
atgtcctagtcaacgtgtcaaatggttacctggatattctagtctggcatttgagatgttaggaaatttggaagttgcaaatgtatggatgatatttaaagctacggaaatggaaaagaccactgatatagtttggatatttcaaatttcatgttgaaatctgatccccgatgttcaaggtggggcctggtttgggtcatggaagcaggtccctcatgaatggcttggtgtagtccttgtggtaatgagttaatttttgtgccattagttcctgtgagatctgattattaaattaaaaagagctgggcacctcctcccctttctctctcatttcccaacatgtgatctccacatgagggctcccttttgccttctgtaatgagtggaagcttcttaagccctcaccagaagcagatgctggtgccatgcttcttgtatagcctgcagaactgtgagccaaataaacctcttttcattataatttacccagcttcaggtattcctttatagcaattcaaagcagactaagayaagcatatagggagaaaacataaaaagagaattgctctagatcagtgatctctatgtgcctcctggtttccccctctgggaacgagaagattatc

SEQ ID NO: 704422 - DNA, 812 bp, Homo sapiens
agttgtgtccgaccacctgaaagagaataatggagacagcagcatggttgcccacaaattagtggcatcagctcgtgatgctgggtcaagtgataacatcacggttattgtggtattcctgagggacatgaacaaagctgtaaatgttagtgaggaatcagattggacagagaactcttttcaaggagggcaagaagatggtggggatgataaggagaatcatggagagtgcaaacgcccttggcctcagcaccagtgctcagcaccagccgacctaggctatgatgggcgtgtggattcattcactgatagaactagcctgagcccagggtcccaaatcaacgtgctggaagacccaggctacctagatctcacacaaatagaagcaagcaaacctcacagtgcccagtttttgctaccagttgagatgtttggtcctggtgcaccaaagaaagcaaatcttattaatgagttaatgatggagaaaaaatcagttcagtcatcattgcctgaatggagtggtgctggagagtttcccactgctttcaatttgggttcaacaggggagcagatatacagaatgcagagcttgtctcctgtctgttcagggttggaaaatgaacagttcaaatccccgggaaacagagtttytagattgtctcatttacgccaccactactcaaagaagtggcacagattcaggtttaatccaaagttttattcatttctctctgctcaagagccttcccacaaaataggcactagcctgtcctcacttactggaagtgggaagagaaataggataagaagtt

SEQ ID NO: 704423 - DNA, 1700 bp, Homo sapiens
gttgggccgttgctggactttccaacatctgaattataagtactacatgatgcctgtctccaagtgtttccctaaagtagttgataatataacgaaaactagagctctacacagaaaaaaaaacaaagctttattctattacctggagggaagaaaagctagggagccctctagggcacttagggttatagcactgtctctaatctagcctgaggttcttggactatggatgatgcttcctagttggagctcagcgctactcaccttctgctttctaaatctctttgtctcttgtttttcactatcacttacctctctggtttgattctattccttctcttctttcttcctcttracaattatgtccagtctgtaccacctactgaatgatagagaatgacagcattaccttcttaacatatgacaatcatagcccttcaaatagtgaagcaatagatcagctctgacctctgtttgctttttacaagcagagtacagataactaatatcagaaatgaaagagaggccatcaatactgataccataaacactgaagaagatagtaagaaatactatgaacaaccctacgcccacacatttgattattagcttaaatgaaattgactaattctttgaaagacatcagctgccaaaactcacacaggctgtgtccccttaacaataccgggagaggcaaacactacattatcagcctctgcccactagctgatgggaacaagagtttgaggtagtacaatgccaaggaacccagggacactctcttcacagcttttcatttgtcatctatcatgttggctcaggctgctttcatgcttagaaattgagattctctgtgactgcagctttgcaaacatcggcattatgtagccaatacttgatcttcttctcatgatctttgtctcatgagattggactgtgctatctgtactcttacctgttgatgaaggccatgtcataatcagattgatgggccaagcccaaaacgccatctgtagtagcctcattcattaaataataaatactaccacttcactaaacaatgtgtttcttggattcctctttgggtatcataatgtccaaccagatcaatttttgtctacctccttgtcctcctttctgagtttcctttctattggcccatcatgacaatttctagatattgcctatataatggcatgatgtctcatattttaatctacaggcagagtaagaagcaaaaagcagtttaatgcctcagccattggaggtacgtcatagcagtcaagaaggtagcaacactggaatcagacctggcttagatacctggtgctgccctataccctctacataaacttaagccatcactcattctttttatttggtcaagtctaacctgagtatacaaatatcaaattcatatggattctgtaaaaaaattatatataattttatatatatatatatatatatatatggaatatatcacagaaactgcctaaatgctcaataaatagaaattaaaataaagcctgacctaacatttgcttcacaaataactacatcatctgtccactagcagcattttatttgaatcaattctgttcctcccaatatctttttcctcctttcttctatatatagaacttaaaagctctcaggaaccatgtgttgcccttttgttgaggaaggggtcacagctt

SEQ ID NO: 704424 - DNA, 661 bp, Homo sapiens
aaataggggtatcttatgtgatatctgctatcccagagtctttggtcctctgttccttctcaagtcttggctcccgtgtactacttcaaagccctatagatattttattctaaagaaaagaaacttggttcctttaagttgtttaaacatttctttctgggtataaacttgggtttgtgtctgggagctctgttaaaaaaaaaaagtctttagtaagccaaagctgttagaagcttataagtaagtgacattacaattgacygtcagtaaatagtggaaagattgcatgactagctactccttcagatctgagacaacctggagctagatttttgtactctctactcagaaaagcatatagtgacttggggtttgatgctgtacaaaaatgacatgcttatgcacaactttaactttctgcaacacttttacaacttcttgtgaatgaagtaggcagggctcgcatttgacagatgagctatgtccagcgtgaggcagagttaaaacccttttcctggctcaggaacttcaggctggggcctgtgtctgctctccctgcatccctgtcctctagcagatacctctctgctaacatgctgagtgtccttggtaaattactcattctctctgtctccgtcttctaacctccacaataaagtcc

SEQ ID NO: 704425 - DNA, 1151 bp, Homo sapiens
atttagaagaaaacatgtaacactatattaggattattaggacaatgtgccatccactgtttaaaaatgaaacctaccatttacttagtgtttattacatgtcaggtatgtgccaaatcttttatataattatttaatttaccactcatatcaaccctgagaagtatgcattttacctccatttatatatgaagaaactgaagctgagtgaagttaaataacttgctgaacttcacacagctataagcagcagaaatcccaacccaggctatctgcctccaacgcacttactttttgcatcatgctataactgatctctaacttgtaaaggttgccagtgaaatgttttctccaattctaattaccacaaagaagaataagaacaccagatccaaactcagtgttggtactatggccagacatttttaaaagaatgaaacttgtcaagccagaaataaagtatttctatcaacaatgattcatgtaaatgctgcctcatgtttaggcttcttccagctcattcagaaaacactgaggaagatgcataggatcccatttcttaacagaaaataattgggctgataactactgtgtcagggtgagaaatcctacggtggtaatctcctgagccaggtggttttagtctttctttggccaaataagacataacactgctttctccaagtctgccactgtctctccttcagagaagacaattcacaaaattccaataaaytctgacttagtgtaaaagatagtacttggaagtggaaaaagacaaacatttatttaatagttcatatgataactactgtaataaatgtataaaatggattatagggaagaatagaagtattccggaaaggaagaatagcttgctcaagaactataaaaagttgtctataactgaaacactggatatatcaaaggatgtggcaggaatgaaggatgaacatgagggcaaggaccagattacaaaattccgtatttgccatactcaggagattggctttattttataggtgatagggaagttctttaaagatcttaaacagttagaaaggtcacttaagctataacatgaaaaatgttggggcaaggtaggtgacagggagactagttagtaagctaataaaagaggacaaaagcct

SEQ ID NO: 704426 - DNA, 1151 bp, Homo sapiens
atttagaagaaaacatgtaacactatattaggattattaggacaatgtgccatccactgtttaaaaatgaaacctaccatttacttagtgtttattacatgtcaggtatgtgccaaatcttttatataattatttaatttaccactcatatcaaccctgagaagtatgcattttacctccatttatatatgaagaaactgaagctgagtgaagttaaataacttgctgaacttcacacagctataagcagcagaaatcccaacccaggctatctgcctccaacgcacttactttttgcatcatgctataactgatctctaacttgtaaaggttgccagtgaaatgttttctccaattctaattaccacaaagaagaataagaacaccagatccaaactcagtgttggtactatggccagacatttttaaaagaatgaaacttgtcaagccagaaataaagtatttctatcaacaatgattcatgtaaatgctgcctcatgtttaggcttcttccagctcattcagaaaacactgaggaagatgcataggatcccatttcttaacagaaaataattgggctgataactactgtgtcagggtgagaaatcctacggtggtaatctcctgagccaggtggttttagtctttctttggccaaataagacataacactgctttctccaagtctgccactgtctctccttcagagaagacaattcacaaaattccaataaactctgacttagtgtaaaagatagtacttggaagtggaaaaagacaaacatttatttaatagttcatatgataactactgtaataaatgtataaaatggattatagggaagaatagaagtattccggaaaggaagaatagcttgctcaagaactataaaaagttgtctataactgaaacactggatatatcaaaggatgtggcaggaatgaaggatgaacatgagggyaaggaccagattacaaaattccgtatttgccatactcaggagattggctttattttataggtgatagggaagttctttaaagatcttaaacagttagaaaggtcacttaagctataacatgaaaaatgttggggcaaggtaggtgacagggagactagttagtaagctaataaaagaggacaaaagcct

SEQ ID NO: 704427 - DNA, 655 bp, Homo sapiens
tgtgcaaagtgccctacatccaggtgatatttcatcctgctctgttccttcgtaaaggtctccagcgagcagaagggttccatgagccttactcctctggtcccaggccttgccaggcacatgttgcttttccctgggagtagggctgggcactcctgcctccccatgcccatcagccatggggttccctttaaaggctctggattgagcacagtcacctctaatgggaccatggaggaccagcccagcaacctagagctgcttcccaggctgcctgggaatcatttcattttctatttgcagaatcacagatgttgacttttgatctcttcctctctcccttgggggcctcaaatcagtgatgacagctatttcattyctttttaattttttttcttttccctataaagagaaaaggtcagaaagggctcagaaaggttttgaaaatattggaagagctacatactggctactggaatgcaaaagaaaagctctagccctctctatggaaagctcatggcaatgaccaggcagaggctggggtgggcactctttaaggcagtaatgttaacctttagtgtgtctgtaaatcattcaggagtcttgttattaatacaatgcaaattcagattcaataggtctaatgcactcccag

SEQ ID NO: 704428 - DNA, 1109 bp, Homo sapiens
ttgcaaagtcttaatgctcagatgactgtatgcattttacacggtcaaaatagttactgattaaggagcactgatgcaggctgcaggtgtcgtaccagatgtttgctatcatctcttgtaactcttcacaccaactctgcaaggtgggtgttattatccccgccccctccttggctggcaaggaaattgaagctaagagaggttaattcatgcattatatgtgtaatttccaaaagatttcattgctaccttccctcctttcacagtgatctgaaataacccaaagacaaaagataataaacgcctgtggtagagacgggtgttgtctgcttgtggtgatcggccctcttggcacctggaaatgagtaatttcgtccgtacattgtcagggccaagctcaggaattcagaaatcctggttatctaggtttggcctaggaggtcctctcttcaaaagagagagtagctccaaaaggtggacaagactggtttttcagatccctctggtgctgatgtgttcgcccctaggacacgcagttggagaaagttcttgataccaggaggagttgctttgatgtgtcagcttggaaagaatgcctcgtaagggccattcaggactccaggagagcaacaaaaacaaaaaagccccagctcgtggaaacatcaaagtgaaggcaaatataaccagactgacccacctggaggtatttaaataccttgaagaatggtggtgtgtccttgcaaaacccaggcagctttcaggtagaaacttgagtcatgtctggatcataaggagtgaggtggccccactggctgtccctggccactcattataatcaggaaaaagtgaggacaatgtgagactctcccttggagagtctgmaaacttggaagacctgaattttggtgaccactcaacaagtcagtctgctccagggacccattaacattgcaacctcattcctagtggtgccaagatgcagccatgatttgtactgcagtgtggggaggccagatttgggccctcctggaagtccacagcaattccgtccctggaaagttgttgcacagaggaaaatacagcgccacgtcccaagacaaactgaaggc

SEQ ID NO: 704429 - DNA, 1109 bp, Homo sapiens
ttgcaaagtcttaatgctcagatgactgtatgcattttacacggtcaaaatagttactgattaaggagcactgatgcaggctgcaggtgtcgtaccagatgtttgctatcatctcttgtaactcttcacaccaactctgcaaggtgggtgttattatccccgccccctccttggctggcaaggaaattgaagctaagagaggttaattcatgcattatatgtgtaatttccaaaagatttcattgctaccttccctcctttcacagtgatctgaaataacccaaagacaaaagataataaacgcctgtggtagagacgggtgttgtctgcttgtggtgatcggccctcttggcacctggaaatgagtaatttcgtccgtacattgtcagggccaagctcaggaattcagaaatcctggttatctaggtttggcctaggaggtcctctcttcaaaagagagagtagctccaaaaggtggacaagactggtttttcagatccctctggtgctgatgtgttcgcccctaggacacgcagttggagaaagttcttgataccaggaggagttgctttgatgtgtcagcttggaaagaatgcctcgtaagggccattcaggactccaggagagcaacaaaaacaaaaaagccccagctcgtggaaacatcaaagtgaaggcaaatataaccagactgacccacctggaggtatttaaataccttgaagaatggtggtgtgtccttgcaaaacccaggcagctttcaggtagaaacttgagtcatgtctggatcataaggagtgaggtggccccactggctgtccctggccactcattataatcaggaaaaagtgaggacaatgtgagactctcccttggagagtctgaaaacttggaagacctgaattttggtgaccactcaacaagtcagtctgctccagggacccattaacattgcaacctcattcctagtggtgccaagatgcagccatgatttgtactgcagtgtggggaggccagatttgggccctcctggaagtccacagcaattccgtccctggaaagttgttgcacagargaaaatacagcgccacgtcccaagacaaactgaaggc

SEQ ID NO: 704430 - DNA, 602 bp, Homo sapiens
attcttaggtatttcacagtgttttgcagccactgtaaaagggattggattgttgatatgaactctcagcttggtcgtagttggtgtatagtggtgctactgattggtattcatttattttgtaacctctgagactttactgaattcatgtatcaaatctaggagtgttttgtaggagtctttagggttttctaggtataagatcatatcattggtgaagagatagtttgacttcctcttttctaatctggatgccctttattcctcttgcccaattgctctgcctaggacttcccagttttattcttaatatgcatgaaataaaagtaaaatggaaggtgcttaacaattagtttatttcacatctctctcatacaccgataaaattaattcaaagtcatatgttaaaaacataatattagaccctgtgttgttctaaaaggaatttctaagttgtttataaaatacataggaatcaagaatataagtggaaagtgtttccaaaaaataaacataaaagtatgtgttacaggccacrgaccagtagcagtccctggcctgttaggacctgggccacacagcaggaggttagaggcaggtga

SEQ ID NO: 704431 - DNA, 619 bp, Homo sapiens
attatcaggagtcggcgccgtggcagctttgggataacttgagggcgcatcctggggaagaaacacctcctgtccgtggtgctgactgcggaggacagcgcttcggcgtggcttctccgtggcccagcttctttggtgcatttttctttcatggtgagtacrgaagctttcgttttctggaatgttctgtgtatttctgctagattctcactcctttttcttttctctcttgatatcttaccattaactttacagtaatactcattccctgagggcttttgaggttggaatgtgtaggaggctttagggctgtttctgagggagactccccatgtaggtggagagagaggaaagctctggcagtgggaggaaggggaagcccggcccaggtggggtgtaggggccaggccccagtttggctgccttgctttcaagcctcaggtggaaggaaaggatccaacttagcctccagggtttgctaattttggagatacggtctcgtcctgtttttggagatacggtctcaccctgttgcccaggctggcgtgcagtggtggatctcagttcactgcaacctccatttgtgggctcaagggattctccagccttaacctttcca

SEQ ID NO: 704432 - DNA, 619 bp, Homo sapiens
attatcaggagtcggcgccgtggcagctttgggataacttgagggcgcatcctggggaagaaacacctcctgtccgtggtgctgactgcggaggacagcgcttcggcgtggcttctccgtggcccagcttctttggtgcatttttctttcatggtgagtacagaagctttcgttttctggaatgttctgtgtatttctgctagattctcactcctttttcttttctctcttgatatcttaccattaactttacagtaatactcattccctgagggcttttgaggttggaatgtgtaggaggctttagggctgtttctgagggagactccccatgtaggtggagagagaggaaagctctggcagtgggaggaaggggaagcccggcccaggtggggtgtaggggccaggccccagtttggctgccttgctttcaagcctcaggtggaaggaaaggatccaacttagcctccagggtttgctaattttggagatacggtctcgycctgtttttggagatacggtctcaccctgttgcccaggctggcgtgcagtggtggatctcagttcactgcaacctccatttgtgggctcaagggattctccagccttaacctttcca

SEQ ID NO: 704433 - DNA, 438 bp, Homo sapiens
ggataatgagagtgctggctaaagagtgtgaatttctagaagtgtggtagactaactgtagcacgttcaatggaagacagcagtgagaaaaattagtctccttaatactcagtcctaggatggggattattcaacctacagaagcaattaatagtcatggagtataaatgtgaaaacttcctgaatatttggaagcggtatcatgtgaaagagagaatataatttgttctgtgtggctctcaagtttaggctgacctggcatcagttgtatcaacatcattacattaygaataaaggaagaatactctattaattagaattatcccaggatgaaatgcatagtcatgtagtcatggaaaacagagaatttcccaacactggaagtctttatgaagaaactcttataaagatagtgtacaaactatttcatatttggtg

SEQ ID NO: 704434 - DNA, 1776 bp, Homo sapiens
tagaatataggatgccaacagtcaccaagttaactgtcagggacacagtgccaaattatgtttaagatgtacttacttaatatttctccttcaagcagccagcaatgatacgatatctaatcctttgggctgaagaagctgtaggcgaatgccatcacctcactccttttttttttttttttttttccttgagatgaagtctctctcttgtcccccaggctggagtgcaatggtgcaatcttggcttactgcaacttctgtctcccgggttcaagcaattctcctgcctcagcctcccaagtagctgggattacaggcgcccaccaccacgccyggctaatttttgtatttttagtagagacggggtttcaccatattggccaggctggtcttgaactcctggcctcaggtgatccacctgccttggcctcccaaactgctgggattacagaggtgaactaccatggccagccggccatcacctcatttcttaaagtgtcacgtttacatctttggaatagctaagcaattatttaaattatgttttgtctattttgtttcaaatttttttttgttttgtgttatttagggatatgattctattaaaagtctgtcataactgcatccattatccataacgattattccataagtatcagcatataaaagatactgctggtggctgaataattttaatctgcaagtacatcctcccccatgttccatctttccagagttaacttagtaccaaggtaaaaattattttaggattcttctaaaggacagttggcatgctatattagtctgctcaagctaacataataaaataccacacactgagtggttcaaacaacagaaatttattttctcacacttctggatgctgggtggtccaggatcaagctgcaggctgatttggttccaggtgagagggcactttctggcttgtaggtgtcttagtcttggttcttgctgcatccgcacatgacagacagagagagagcaagcaatctctccaaagtctattcttattaggttattaaacctatcatgagggatcccctctaatgaccttatctaaccctaattgcctcccaaaggccccatctccaaataccatcatattggagggatagagtttcaataagtaaatttgggagagacataacaaacattcaatctataacacttcactcccctacttgtgggcttctaacgtatttgaagagtcgtaattgtaaagagagacatggtttaattagttttgtgccttgatatgcttttatgtttcctttaaaaatatgaaaatccaaagtggtgtacttttccccacaatgcaagtttcatatggtaatattaataaaactttcagatttatggtaggtttctattaaatttttcatacacatcaccctaactagggaaatgttaaagaattcatgtaatgagaatatatatatatatgttgtctttgtacacacatgtatacatacatatcataataatggtgatgaagatgagacaatgaaagaaaatgacagaagctagtatttattgattcatttaatatgtgtcagatacagctctaaacatatttatatgaatgaacctgaattgagcaattttcagaagctagtttctaaatgtttaggcatttagctggtgactaaggtaataatttctcccacaaaatggtggcttaagtaacagctaaaaggcattgtaggttaataaatgtattgacttgcttcctatatatatgtacttctgtcacta

SEQ ID NO: 704435 - DNA, 1200 bp, Homo sapiens
gtctcaaaaaataatccttgacaagttatcccaagataaaccttccctgacttgctttctgtcagcatctggttctacagtgagaattcttctggaatgtgcttttattatatcctgccatttaattgcttttcagtataagaaatctaaatgttcttcacattytttgtctttatatacgatgcttaattttgcccagtctgctcaaatttggggcacaaagaagtagcttatttttatttaaagtttaatgttaaaagaaaaatatttatagacaatgtagaaaatgtaaaaaaatgcaaagaaaaatcctctactcaattatacctttaacatttttggtaaattctttatataccagagattgtgtatagtgagttttaattatgtttagtgaataaactaatccatgctaattcacttaaaatatcaagcttcttttttttacaaaaaaaagaatacttcgttgattttcttaattcacaaataataatctattatatatatattagataaatatatacattggtaatggttctcattttgtcaggtagtacatttagattgactatttagctctaaatcaagatcctggtaacagtaatcaaaggtaaatgagccataggagataacaatcttattttaattgaggtcttacctaatctctctggataggtaaagactcaatgatcttggcttttattacaagcccgcatcattatgttgtaatatattaattttgatcccaacaaaatacctttaatcttaggccttagaggcagtggggcaatgaaaccttagataaaaatgaaatgttatttttatatttaagtaaagaaaaaataaggatttcttattatattctttctgtgtccagcctctttgaaaaacctgaggtcaggtgaggcctaagggcagtgaaaagttgaattgatcttcccattcatttatctcctgaatgagtctgaatttaatttatcttaaacaaagatgttgaatggatgcttgatatggaataagagtctagtcctcaaattaatttttatggatactggaagtgtttcagaaattgagctggccagttttatcattttctattagatgacaaagatgttaaatgttatatttcattacagaaaataacgtattaaaatatttttttaataaaacagtttttattgcctacacattgtaattcaa

SEQ ID NO: 704436 - DNA, 1022 bp, Homo sapiens
  misc_feature 2, 3, 4, 5, 6, 7, 8, 9, 10, 11, 12, 13, 14, 15, 16, 17, 18,19, 20, 21, 22, 23, 24, 25, 26, 27, 28, 29, 30, 31, 32,33, 34, 35, 36, 37, 38, 39, 40, 41, 42, 43, 44, 45, 46,47, 48, 49, 50, 51, 52, 53, 54, 55, 56, 57, 58, 59, 60,61: n = A,T,C or G
  misc_feature 62, 63, 64, 65, 66, 67, 68, 69, 70, 71, 72, 73, 74, 75, 76,77, 78, 79, 80, 81, 82, 83, 84, 85, 86, 87, 88, 89, 90,91, 92, 93, 94, 95, 96, 97, 98, 99, 100, 101: n = A,T,C or G
tnnnnnnnnnnnnnnnnnnnnnnnnnnnnnnnnnnnnnnnnnnnnnnnnnnnnnnnnnnnnnnnnnnnnnnnnnnnnnnnnnnnnnnnnnnnnnnnnnnnntctagacaataaattaacatcccaaagaagttctggaaattattttctttcatgagaaatagtctgttcaacttgatgaaataaagtgaaatgtaatgatatatgaaacattttactaattggaaatcactcacacatagagaaacaaatcaacatcactttgggtatatggtttatactcttagctaactttctcaaatagaattattgatctgcttattttttgatttgtttagtttatctcaaggttgatagcctttatcaagattgcccctcatttctgaaatactcgattttttaaaatttttacctacttcaattattttattcttttgtttttattatagcatattatcaaataactatatctattttaatatcaccctctctctttttgaataccctggtattcaagagctatatagtacctaccatccctacgamcaattattttaatgaaataaggtgcctggatgaaactaatgattttaccaagccacctgtactcttttctatcattactcactggattcttacctttgaactttctttcttcacctgctgtgctagccctgttttcctctagcatgactttaattctgtaaaattttgatctctaagtgttagattcatgttcaacactgatgcaaaaaaaatgctgtttaaatgcatattatctttatttcgatattcctaaagcttgtcttgccttatctttataaacttagacacctgcctggctcttaaatttctactatcggcacatctattcatgtaggtatccatgcatacaacctggtaattataagtatctcatctcttctgtctgccttgactgcaaattgtttctagtttctcagacttctagttcttactctcctttcccctaacctatctcttacccctgtctactgtctctaa

SEQ ID NO: 704437 - DNA, 649 bp, Homo sapiens
gggtgggtatggaacatcaacactgatgccagtgttggaggcagctaagtcaacaagttgcagatcacaggaaactcaatcagaaatgaaggcaacagacttcttarctgtgttagcatatacatttctttatttttaaaattagtttgtctggggttcttaattttatttgtgtgttatttaaatggaattttgctagaactaagtacaaagagaaccacaaaagtgaaggccataatttttggccaagcgtttcagataaaaaacaagtggggaaaaagtacagcacgtatttatatttactaggctgaagtttcagcagtgactaatgtaaatcactttatagatcctgattccaatgccctttttgtatttttgtgtctttttgtctaacttaatttaaatgtttattttacattccaatcctgtttacgtaaaatattagttattgtgcagccttctggcattgtgtctaataatgacttgaattatcagtttactatcagactgttttgcctattgcaaatttgagaaagaaaggaaatatgtttttaaagagagagaccacaggcaatacagtcaggtctttaacaatccccacctccctttccattgaagacaaagagaaaaagagaaagagggagagaaa

SEQ ID NO: 704438 - DNA, 649 bp, Homo sapiens
gggtgggtatggaacatcaacactgatgccagtgttggaggcagctaagtcaacaagttgcagatcacaggaaactcaatcagaaatgaaggcaacagacttcttaactgtgttagcatatacatttctttatttttaaaattagtttgtctggggttcttaattttatttgtgtgttatttaaatggaattttgctagaactaagtacaaagagaaccacaaaagtgaaggccataatttttggccaagcgtttcagataaaaaacaagtggggaaaaagtacagcacgtatttatatttactaggctgaagtttcagcagtgactaatgtaaatcactttatagatcctgattccaatgccctttttgtatttttgtgtctttttgtctaacttaatttaaatgtttattttayattccaatcctgtttacgtaaaatattagttattgtgcagccttctggcattgtgtctaataatgacttgaattatcagtttactatcagactgttttgcctattgcaaatttgagaaagaaaggaaatatgtttttaaagagagagaccacaggcaatacagtcaggtctttaacaatccccacctccctttccattgaagacaaagagaaaaagagaaagagggagagaaa

SEQ ID NO: 704439 - DNA, 1092 bp, Homo sapiens
ctgattcaaggctctgaaacccacagttttatcattaataattgtaacagctgtttttaaatcagctcctatgtgcttagcattgtgctaagcactttgtatactgtctcccttttacttcttacaaacctatgagatagggactatttttaacatccccactttacagatgagaaagctgagacacagaaactatgtaatttgcttgcaattaaacatctagtaaggttcatttttttaaaaggatttctggtctaggaaatataaaaactatcattgctcttctttgtgacgtctttaagttatgaaggtaagagcaacagctaaataatgctattttttaatggcaaaacctgctattactttggcgctaacctattaccttctaaaatgcatctgtttgctcagtttattttctttgaataactgttgaggggccctaagacacactgaaacatttctgagtttaaaaaatatataaagtaaaacaaagtttgtaaaagttgaactcttgcaaatagtccatatttcaggtgacacttggcccttgaactgcacgggtctgaactgtgctggttcacttatatgcaggtattttcaataaatacatttaaaaatttttggagacttgaacaatttgaaaaaaacttgcatatgaacmatgtagcctagaaatataaaaaaattgagaaaaaagctatgccatgaatgcataaaatatatgtattttatcatttactactaaaaatatacacagttctattataaaaagttaaaatgtgttgatacttatgtacacagacacctacagaccatgcatggcaccattcacagtccagagaaatgtaaacaaatataaagatgcagtattaaagtaactgcgaaaattcactgtgtatatacagtgatactcattgacagataagaaagccaaaacacagaaactatgtaatttgctttcaattaaacatctagtaaggttcatttttttaaaaagatttttggtccaggaaatataaaaactaccattgctcttctttgtgacatctttaagtgatgaagctaagagcaacagctaaataatgctatttt

SEQ ID NO: 704440 - DNA, 1092 bp, Homo sapiens
ctgattcaaggctctgaaacccacagttttatcattaataattgtaacagctgtttttaaatcagctcctatgtgcttagcattgtgctaagcactttgtatactgtctcccttttacttcttacaaacctatgagatagggactatttttaacatccccactttacagatgagaaagctgagacacagaaactatgtaatttgcttgcaattaaacatctagtaaggttcatttttttaaaaggatttctggtctaggaaatataaaaactatcattgctcttctttgtgacgtctttaagttatgaaggtaagagcaacagctaaataatgctattttttaatggcaaaacctgctattactttggcgctaacctattaccttctaaaatgcatctgtttgctcagtttattttctttgaataactgttgaggggccctaagacacactgaaacatttctgagtttaaaaaatatataaagtaaaacaaagtttgtaaaagttgaactcttgcaaatagtccatatttcaggtgacacttggcccttgaactgcacgggtctgaactgtgctggttcacttatatgcaggtattttcaataaatacatttaaaaatttttggagacttgaacaatttgaaaaaaacttgcatatgaacaatgtagcctagaaatataaaaaaattgagaaaaaagctatgccatgaatgcataaaatatatgtattttatcatttactactaaaaatatacacagttctattataaaaagttaaaatgtgttgatacttatgtacacagacacctacagaccatgcatggcaccattcacagtccagagaaatgtaaacaaatataaagatgcagtattaaagtaactgcgaaaattcactgtgtatatacagtgatactcattgacagataagaaagccaaaacacagaaactatgtaatttgcttkcaattaaacatctagtaaggttcatttttttaaaaagatttttggtccaggaaatataaaaactaccattgctcttctttgtgacatctttaagtgatgaagctaagagcaacagctaaataatgctatttt

SEQ ID NO: 704441 - DNA, 1092 bp, Homo sapiens
ctgattcaaggctctgaaacccacagttttatcattaataattgtaacagctgtttttaaatcagctcctatgtgcttagcattgtgctaagcactttgtatactgtctcccttttacttcttacaaacctatgagatagggactatttttaacatccccactttacagatgagaaagctgagacacagaaactatgtaatttgcttgcaattaaacatctagtaaggttcatttttttaaaaggatttctggtctaggaaatataaaaactatcattgctcttctttgtgacgtctttaagttatgaaggtaagagcaacagctaaataatgctattttttaatggcaaaacctgctattactttggcgctaacctattaccttctaaaatgcatctgtttgctcagtttattttctttgaataactgttgaggggccctaagacacactgaaacatttctgagtttaaaaaatatataaagtaaaacaaagtttgtaaaagttgaactcttgcaaatagtccatatttcaggtgacacttggcccttgaactgcacgggtctgaactgtgctggttcacttatatgcaggtattttcaataaatacatttaaaaatttttggagacttgaacaatttgaaaaaaacttgcatatgaacaatgtagcctagaaatataaaaaaattgagaaaaaagctatgccatgaatgcataaaatatatgtattttatcatttactactaaaaatatacacagttctattataaaaagttaaaatgtgttgatacttatgtacacagacacctacagaccatgcatggcaccattcacagtccagagaaatgtaaacaaatataaagatgcagtattaaagtaactgcgaaaattcactgtgtatatacagtgatactcattgacagataagaaagccaaaacacagaaactatgtaatttgctttcaattaaacatctagtaaggttcatttttttaaaaagatttttggtccaggaaatataaaaactaccattgctcttctttgtgacatctttaagtgaygaagctaagagcaacagctaaataatgctatttt

SEQ ID NO: 704442 - DNA, 610 bp, Homo sapiens
agtttcctgtatggggaaaaaaggtatagaacacaattccttcagagtataatctccaagctgatctgctgaactcagcagggactttcctttgtcattgaagtgtataatttrttgcttagaatttcatttttaaaggacgtatgctacacacaatagttgaaagtgatcatctgaagcttcgcagagggtatctaacccccaatttttgtggatttccccagttatgttttaatttttttttttttttttttttgagacagattctcactctgttgctcaggctggagtgcagtggcatgatcctggctcactgcagcctcgacctcctggactcaggtgatcctcccacttcagcctcctgagtagctgggaccaccatgcccccaagcccagataagtcttgtattttttgcagagacagggttttgccatgttgcacaggctggtctcgaacttctgagctcaagctgtctgccatctcaggctcccaaagtgctgggattacaggcgtgagccaccatgccaatctattttttcatttttaatttaaaacatagactactttttagagcaattttaagttcacagcaaaattgagcagaaagta

SEQ ID NO: 704443 - DNA, 610 bp, Homo sapiens
agtttcctgtatggggaaaaaaggtatagaacacaattccttcagagtataatctccaagctgatctgctgaactcagcagggactttcctttgtcattgaagtgtataatttgttgcttagaatttcatttttaaaggacgtatgctacacacaatagttgaaagtgatcatctgaagcttcgcagagggtatctaacccccaatttttgtggatttccccagttatgttttaatttttttttttttttttttttgagacagattctcactctgttgctcaggctggagtgcagtggcatgatcctggctcactgcagcctcgacctcctggactcaggtgatcctcccacttcagcctcctgagtagctgggaccaccatgcccccaagyccagataagtcttgtattttttgcagagacagggttttgccatgttgcacaggctggtctcgaacttctgagctcaagctgtctgccatctcaggctcccaaagtgctgggattacaggcgtgagccaccatgccaatctattttttcatttttaatttaaaacatagactactttttagagcaattttaagttcacagcaaaattgagcagaaagta

SEQ ID NO: 704444 - DNA, 610 bp, Homo sapiens
agtttcctgtatggggaaaaaaggtatagaacacaattccttcagagtataatctccaagctgatctgctgaactcagcagggactttcctttgtcattgaagtgtataatttgttgcttagaatttcatttttaaaggacgtatgctacacacaatagttgaaagtgatcatctgaagcttcgcagagggtatctaacccccaatttttgtggatttccccagttatgttttaatttttttttttttttttttttgagacagattctcactctgttgctcaggctggagtgcagtggcatgatcctggctcactgcagcctcgacctcctggactcaggtgatcctcccacttcagcctcctgagtagctgggaccaccatgcccccaagcccagataagtcttgtattttttgcagagacagggttttgccatgttgcacaggctggtctcgaacttctgagctcaagctgtctgccatctcaggctcccaaagtgctgggattacaggcgtgagccaccatgccaatctattttttcatttttaatttaaaacatagactactttttagagcaattttaagttcwcagcaaaattgagcagaaagta

SEQ ID NO: 704445 - DNA, 538 bp, Homo sapiens
ttatgctaaatatacagctctcatgctcttttatgtcaaaactgttttcccatgacattgtaaaccccatagacataattttctaatggctacatactattctatctaaccatttccagagttggatatttatccagcttctgagacttcctgtcataaaacaacactttgatgaacatcttggtacataaatcttttgcatgtgactacttccttaggacagattcctagaagtgaaattctgggtcaaagagtagtaatattttaaaggctgtttatgcatactgacaagctgcttcctggcaatttgtccaaacttttactctgactagcattgtatgggagcttccctgagtgaatgctgcctttgaagtggggtcagagactgaggaccaaggggcacagagaaagaagagtgtggtcctcgatgggaggacccatcacaaaccgtcttgcacagtgtaaacccwggagaggggctgaagaaaccactgcagcccggggccgcccattctacctggcccatggtaggcactca

SEQ ID NO: 704446 - DNA, 614 bp, Homo sapiens
gacagagtgagactccgtctcaaaaaaaaaaagatactatcctgaccccattaacaacaaacgtacaaaactgaaaataaagaaaaaacattcaacatatctgagttgatatcatagaggaaaaaaacccctgaaatctgaggagagaggagcctgcagagagaaccatatattagtgtacctgaggcagatattactggatggtattcaagataggagcaggctgacttggaaatattgagtaagttgctggaggatgcatgtgctcatactgttagactgtgaagctcctagtgcttgcasgcttttcctacagaattattattaattattctttctgaactttatgctaattatcaggccaaccatgagagcaaagtttattttgcaaacaattcagacgtataatgattacattctgacaaaaatcagaactggagagagaaaaattatgtttcaaaacatatcatacacttgtctttaaattctaatctcttcaattgttttaagtatttgcctccattttagactaactctgcttattcctgtgaaccaaccaatgatctctggctgcagctcagaagaaacaaagggagggggaatatagacatctg

SEQ ID NO: 704447 - DNA, 1004 bp, Homo sapiens
ttatttttctccgaaaattatttttgtgcacttttgagtattagtaagaagaaaacttgccaaagagaatttgaatttttttgtgagtctactaaaggcatcaccattctgggaccacattatgttaattcttggtctaaaggtgtttggatgtatgttcggactgcacatttaaacaattttttaattaattgctgtaaatcattagtgattgagtttctttaaatctgtccaatctcaagtcatttttatttgccatttccagggaatgtgaaatgggattaatttacctctgattcttctttatactgaggatagaaattttggtcctagctttagggaggagctcctgtgtgatgccctatcttgggaaamactatgtatttctttactgtcctatgtgatgtatgacagtaggaatctgcactcattcattttggtacatgtccgtagggcaaaatcagtttcggtgtttaggtatattttgtctgctccctgcagtcccatggttttgaacttatattttactttttttttgtgaacataccaatgcttcaatttttttccagtaatataatcaactatattatgagaaagagaaaaattttgagaaaacacaaatttcatgttttcctactctaattggcttttacataaaaatacaggtaaaatttatttttgcttttttgctatttctgttttgctattctgtttgtctatgtcttctccacatagacacaattagggaattttgtacactcttgtgccaactgctttgatagtaacaaaatgtatttctcgaactcctaggtataaaactcaagtatccgcaatttaaattctttttccctcacttctattatgtttccggtctcaatagaaatcgatgccaatccagaaatacaagcattattctaatacttctcacacattacagagatagattaaattttctagatctccttaaatactatcatttttcactacttttatcttaactgtta

SEQ ID NO: 704448 - DNA, 1356 bp, Homo sapiens
ttgagccaaaagatctttcctttatttttgatgggtggctgatatcagtgggatcataattacagccctctgtgccaaacatcaggttaatagaaactattgttgaagagaaaaacatcctgtagttctttgtctccaaaattccccagcagacatgaggacttcccacgagctgaagagcttaaaagaaagtctccattcgcaaaataattataaccatactttttgttaccctcagtggtttgatgagtggattaaaagaagagaatacacctaggtatattttcactttcttctcagctctaaaaactagatgtccctgttgataccaataacaggagaaaatagtttcattccctatggccattagctttttcaatacttattttaaatagtaaataaaattccttcagataatgaacatattatctcagttagagagggagaaatagctagtaaattgcttataacacaaaataatcaatgtgttaatgaacttctttttccattaaaacaatactacaaagtttgctgattatacttaactgattgattcttttgttcttaaggagcaaagtcatacatcttcacctgaagaattctagaatgtgttgggattgtcccaatttaacttttctagaaaggcagaatgatggatattacattggttaatgtctgcgagaggcagaaagatgaaggcataggacattgagtaagagcagagaagcccttaaaaaaaaggcaaggcttatattgctctattcacaactctcatgtctgtctttctctcctacctttcttaatctagtcaatttaaatcatagattatttactcaataggccatacattcattgaaaaacaacttgagtgaccttttcatttataaattcaaagaacataaaataaggtagtggcggctgctcagtttgtattgacagagttatctagtcttttgagattccaagactatttctatttaatcataaacatcctgtaaaaagaactgtcatctgctacatacatcccacttaagcgaaatcagattgtatgccattttccaactttgctcttgacataaaagaaaataggtttargggttagcattaatgtctatgttctgctgtcctctgctggtgtcataggaaaatatttaatagtgaactcactagttgggtctttaattccagctataaggataaaataagtttatacagagtctgatattaaaagtaaacagtaaaaacctaaattttttaaaaaggaaatataaaacaaaacattttattcttcctttagtgcaagctcacacttgtacaaaagtctatatctgatttagtaattctgtatttgtattt

SEQ ID NO: 704449 - DNA, 591 bp, Homo sapiens
agaaactaactgcttggttttgtttgaagtagaccttcacatttctttctaggttgtccagctctgtttacaaggagggaaaatatgacaaagagaggagaggagcatacctcagtgagtagagctcagcagacttctggactccagctccaccacttaccacttaccaagtgttacagaacctccctgaacttcaatctcttcatctgtaaaaygctgaaagtaatcttacccacctcaaagggctgcctggaggattaaacctgatactctaggtaaagagcttagcatggagcctggcacatcatatatgcccaatagatatttgggatgtttattacttgggaataaagaaggtacaaatgaatgatttcctttgtgttatttaggtcagtttgccacagtacaagagggtgcaccctgtccacatgcccatttacctttctagactgaaaatttggatggaagtattttcctcaatcttctataccattgataaatatatttgctttctttaaatccattaggtctttaagacacattaatgagcagtgaaaaaattatcttagatgctgaagcaacatgaaaatg

SEQ ID NO: 704450 - DNA, 969 bp, Homo sapiens
tcaaactcctcaacctcaagtgatccgcccaccttggcctctcaaagtgctgggataacaagagagccactaagcccagccctaaatgcattctttatttctctgccattttgcatagacttgagatcaactgtttagctttttcatgtcccaaagggttcatgtagactgtatactccctcttgtatgtaatttattttaaaaataataactagagtagttcaaccatatctgtattctgatacacattctgagaaatgtccagctatgcctaacctttgttcatcgtgtagccctctcctgagtcctgattttcaaaaatatttttcccaacttattgctgactgaatttacttaccagactttgtgtggcgtcttttcaaaawcacttggaaaatctgtttatccctgtcttccctgattatttatttaattctctttaagaactctagcgaatttgtctgacatggttaccctctttcaaagggaaagactctcctccgaaatgttatatttgcttaaaacagtataaatccactttccctacttccctacacatacactcatgtagaatttattttagatttcattcattccacaaagtccaaggaaaattccacagacactacattaaatttaccgtgagtctaagcaagccattatcttctatgaggctctcttttctcatctataaaatgggcataatatacttgccctttgccaaatagaacaagccatctccttgttcatgactgtgtataaaacactctcagagaagctcaaagtcctttacaagtattaggccatgaatctttctcaagtgaactgttaattatgtgtcattatagtttgttgaatagatgcaaaacctgaagcacaggaaaataattccagttaatagttaacttagaaatccatgcaaggtaatgaaacaatatgtataaaaacccctgtgactcatgtttgcct

SEQ ID NO: 704451 - DNA, 568 bp, Homo sapiens
ttgtgtccacagagcctacaacagtacttggcacaaagtaggtgcttaaaatatttttgtcaaatgaacagattcaagtaaaaaagaattgggggtggtggctaagaaattcaagtagagatgtctgtgggtgccttccaagttagataggctgggtttgaattcaattatcccaccgtggtagtcactrtgaattataaatctagatttctctatttctaaatttgtatttcggtcaattcagaaaatttaaggttactgggtagatatattcctccaccactccccgtcaatgcctccctccagaacacacagcttataactttctcagcacagaaagttttaatcccatgcttttgaatgttcttgtttagcacttaaaataccttttaattttttttaatttttttcttctcgtaatttggattaaattcagtagaaaataacccttccataatgaagttgatgatagaaaactatgtctctatgtaacagtcagacgtagcagagtataatggttggttacaaaataaatttgtaggcaggcacagtacctcactttgggagg

SEQ ID NO: 704452 - DNA, 568 bp, Homo sapiens
ttgtgtccacagagcctacaacagtacttggcacaaagtaggtgcttaaaatatttttgtcaaatgaacagattcaagtaaaaaagaattgggggtggtggctaagaaattcaagtagagatgtctgtgggtgccttccaagttagataggctgggtttgaattcaattatcccaccgtggtagtcactatgaattataaatctagatttctctatttctaaatttgtatttcggtcaattcagaaaatttaaggttactgggtagatatattcctccaccactccccrtcaatgcctccctccagaacacacagcttataactttctcagcacagaaagttttaatcccatgcttttgaatgttcttgtttagcacttaaaataccttttaattttttttaatttttttcttctcgtaatttggattaaattcagtagaaaataacccttccataatgaagttgatgatagaaaactatgtctctatgtaacagtcagacgtagcagagtataatggttggttacaaaataaatttgtaggcaggcacagtacctcactttgggagg

SEQ ID NO: 704453 - DNA, 605 bp, Homo sapiens
ctcattgcaaatgcattgatatctgggaaaaaacagaggcaagagcaaagactgaaacatgtaaagacacaatgggcaacaatgcaacctaccttatgtatataataataacagctgcttacatgcacttacctaccaggacctatcctagccactttatctatactgatccatttacccctcaaaaacacctatgagggaagtattattattctccccagtttaaaggtgagacacagagagattaagtaatttgtcctaggtcatgcaattaataagtaacagatttagaatttgaacccagataatctggcacaagagtccatcctcttagtctctcactccctaacttcacagaaattctgtaaactcagagatggacctagaccacagctaaagtttcctacaactaagaaggaacagaatacagctgataagctgattctagaacttcaagaaatatattatctcatccagtgaattttggtcttgtttcctgcagatattttcatcagaacacctatcattagaaagtgattgtgaagtctgaaaataaaaaaatcactctgaggttcaaaaaaaatttttttwaattatatctgatc

SEQ ID NO: 704454 - DNA, 2399 bp, Homo sapiens
aacctggcaaataagattaatgaacaatataatattgttatgtgtttttcttaaatacaaataacattttttaaaggtgataacaatgctttatacaaagactttcctcttttcttatgtggtttataaactattttgcgtgtaagtcccataaaggagttccacatacttttatcgaatggtattatcattagattaagtgtctaagtgatcactctgctgtgggcaaaactcacttttatgcataagctcatgaatgtgtgcatacaaatcagatcaatctcattaaataaaaatcttaaaaaggagcaaacaatttgcactaagagaaatatgtgtttataaatatttttaaaatggtatttgacttctctagagattttcaaaatgcctaggaggcacttttctattttctttgtgtttgcaaaaatacctctgaggattaattgacacaagcatcaagcatttggggtggaagtatgcacgggagtatacattttggaagataatttggagatgtatatcacaattcagaaaagaattgatatgtcctcaacccaataattccattcctaagaactgattacaaagaaataatccatgatcccaacaaagctgtatattcagggacattcagatagtgttattttatattggtgaaaaattaaaaacttaaatgcccaaaaattatagaatgagtacataaattctggaacatgtggtccagatgttgaaatactatgccttgaagttgccttggcttaaattccaactctgtccttccctagttgtgtaaccctgaacaaggcaattaacattaattaattttttaaaatggagattacaataatttctatctcaaggggttgctaagagaaagtacttggagcagtgtctggctcatagaaatgttatcacagttgtttatacaaatacaaagtatacctataatatgatctcaaatttttacgattaaacacagtcatatgccaaagactggaaaaaaaatttactgtacaccgaatatcttagtctttttgtgttgctataaaggaattcctgaggctgggtaattcataaagaaaaagcatttatttggctgatgattcttatggctgaaaaattcaagattgggtatctgtagctggtgaaggcctcaggatgcttccattcatagtggaaggtgaagaggagccagcctgttcagagatcacctggtgagggaagaagcaagagagagagaagcgggaggtgccaggctctttataacaaccagctctcctgggaactaatagagtgagaactcacttacccccaagggaggacattaatcttttcatgaggggtcagcccctatgacctaaacatctcccaatagactccacttcccaatactgccacaagagatttggtggaaacaaactgtaaccaaagcatagcattaaaccaagggttctcagacatcttgctcttaggatccctttacgctctttaaaattactgagtatctcaaagaatttttgttggtgtgagttgtatctaccaatatttactgtattcaaaattaaaataaggaaatttaaaacaggaatacagaagcacacatgttgttagaacaatgatgtcatcacatatcatgtagcttctataagacttcactgtatactcacgacagaataagagtgaacaaaacagataggggcttgctgttacaaaaataattctgaccgtgtggaccccttgaaagagttccagggacccccagagaatgttttggtcacacttagggtctgtaaagcatctgacacacagtagccagtcaatatttgtcaaatgagctcagctcttgaggatgtctctcaggtactccaccctgcttagccaccgccccaacctaggctctggcccgggccagtcagtctggagcttccctgttgcctgaatttgaaggctactagcaggactttgtggtgctcactgcagagatcaccagcaagattgagagggtcccctgactcctgcctgggatatttgcttgaagccactatctctgaacttatgccccacttatctcctaaaatcccagttgcttccagacgaggtacatgatgtcttaaagaagtttatgagtccaagtaagggaataagaggagagaacgaagggaagatatatatatagatagatagatagatagatagatagatagatagatagatagatatagatatagatatagatatagatatagatatagatatagatatakatatagatatagatatagatatagatatagatatatagatatatatgccactgagctctcctgcctcagagatgtttgtggagccattggcttatgatggcctcatcacttcatggtacatcaactctgctt

SEQ ID NO: 704455 - DNA, 2399 bp, Homo sapiens
aacctggcaaataagattaatgaacaatataatattgttatgtgtttttcttaaatacaaataacattttttaaaggtgataacaatgctttatacaaagactttcctcttttcttatgtggtttataaactattttgcgtgtaagtcccataaaggagttccacatacttttatcgaatggtattatcattagattaagtgtctaagtgatcactctgctgtgggcaaaactcacttttatgcataagctcatgaatgtgtgcatacaaatcagatcaatctcattaaataaaaatcttaaaaaggagcaaacaatttgcactaagagaaatatgtgtttataaatatttttaaaatggtatttgacttctctagagattttcaaaatgcctaggaggcacttttctattttctttgtgtttgcaaaaatacctctgaggattaattgacacaagcatcaagcatttggggtggaagtatgcacgggagtatacattttggaagataatttggagatgtatatcacaattcagaaaagaattgatatgtcctcaacccaataattccattcctaagaactgattacaaagaaataatccatgatcccaacaaagctgtatattcagggacattcagatagtgttattttatattggtgaaaaattaaaaacttaaatgcccaaaaattatagaatgagtacataaattctggaacatgtggtccagatgttgaaatactatgccttgaagttgccttggcttaaattccaactctgtccttccctagttgtgtaaccctgaacaaggcaattaacattaattaattttttaaaatggagattacaataatttctatctcaaggggttgctaagagaaagtacttggagcagtgtctggctcatagaaatgttatcacagttgtttatacaaatacaaagtatacctataatatgatctcaaatttttacgattaaacacagtcatatgccaaagactggaaaaaaaatttactgtacaccgaatatcttagtctttttgtgttgctataaaggaattcctgaggctgggtaattcataaagaaaaagcatttatttggctgatgattcttatggctgaaaaattcaagattgggtatctgtagctggtgaaggcctcaggatgcttccattcatagtggaaggtgaagaggagccagcctgttcagagatcacctggtgagggaagaagcaagagagagagaagcgggaggtgccaggctctttataacaaccagctctcctgggaactaatagagtgagaactcacttacccccaagggaggacattaatcttttcatgaggggtcagcccctatgacctaaacatctcccaatagactccacttcccaatactgccacaagagatttggtggaaacaaactgtaaccaaagcatagcattaaaccaagggttctcagacatcttgctcttaggatccctttacgctctttaaaattactgagtatctcaaagaatttttgttggtgtgagttgtatctaccaatatttactgtattcaaaattaaaataaggaaatttaaaacaggaatacagaagcacacatgttgttagaacaatgatgtcatcacatatcatgtagcttctataagacttcactgtatactcacgacagaataagagtgaacaaaacagataggggcttgctgttacaaaaataattctgaccgtgtggaccccttgaaagagttccagggacccccagagaatgttttggtcacacttagggtctgtaaagcatctgacacacagtagccagtcaatatttgtcaaatgagctcagctcttgaggatgtctctcaggtactccaccctgcttagccaccgccccaacctaggctctggcccgggccagtcagtctggagcttccctgttgcctgaatttgaaggctactagcaggactttgtggtgctcactgcagagatcaccagcaagattgagagggtcccctgactcctgcctgggatatttgcttgaagccactatctctgaacttatgccccacttatctcctaaaatcccagttgcttccagacgaggtacatgatgtcttaaagaagtttatgagtccaagtaagggaataagaggagagaacgaagggaagatatatatatagatagatagatagatagatagatagatagatagatagatagatatagatatagatatagatatagatatagatatagatatagatatagakatagatatagatatagatatagatatagatatatagatatatatgccactgagctctcctgcctcagagatgtttgtggagccattggcttatgatggcctcatcacttcatggtacatcaactctgctt

SEQ ID NO: 704456 - DNA, 2399 bp, Homo sapiens
aacctggcaaataagattaatgaacaatataatattgttatgtgtttttcttaaatacaaataacattttttaaaggtgataacaatgctttatacaaagactttcctcttttcttatgtggtttataaactattttgcgtgtaagtcccataaaggagttccacatacttttatcgaatggtattatcattagattaagtgtctaagtgatcactctgctgtgggcaaaactcacttttatgcataagctcatgaatgtgtgcatacaaatcagatcaatctcattaaataaaaatcttaaaaaggagcaaacaatttgcactaagagaaatatgtgtttataaatatttttaaaatggtatttgacttctctagagattttcaaaatgcctaggaggcacttttctattttctttgtgtttgcaaaaatacctctgaggattaattgacacaagcatcaagcatttggggtggaagtatgcacgggagtatacattttggaagataatttggagatgtatatcacaattcagaaaagaattgatatgtcctcaacccaataattccattcctaagaactgattacaaagaaataatccatgatcccaacaaagctgtatattcagggacattcagatagtgttattttatattggtgaaaaattaaaaacttaaatgcccaaaaattatagaatgagtacataaattctggaacatgtggtccagatgttgaaatactatgccttgaagttgccttggcttaaattccaactctgtccttccctagttgtgtaaccctgaacaaggcaattaacattaattaattttttaaaatggagattacaataatttctatctcaaggggttgctaagagaaagtacttggagcagtgtctggctcatagaaatgttatcacagttgtttatacaaatacaaagtatacctataatatgatctcaaatttttacgattaaacacagtcatatgccaaagactggaaaaaaaatttactgtacaccgaatatcttagtctttttgtgttgctataaaggaattcctgaggctgggtaattcataaagaaaaagcatttatttggctgatgattcttatggctgaaaaattcaagattgggtatctgtagctggtgaaggcctcaggatgcttccattcatagtggaaggtgaagaggagccagcctgttcagagatcacctggtgagggaagaagcaagagagagagaagcgggaggtgccaggctctttataacaaccagctctcctgggaactaatagagtgagaactcacttacccccaagggaggacattaatcttttcatgaggggtcagcccctatgacctaaacatctcccaatagactccacttcccaatactgccacaagagatttggtggaaacaaactgtaaccaaagcatagcattaaaccaagggttctcagacatcttgctcttaggatccctttacgctctttaaaattactgagtatctcaaagaatttttgttggtgtgagttgtatctaccaatatttactgtattcaaaattaaaataaggaaatttaaaacaggaatacagaagcacacatgttgttagaacaatgatgtcatcacatatcatgtagcttctataagacttcactgtatactcacgacagaataagagtgaacaaaacagataggggcttgctgttacaaaaataattctgaccgtgtggaccccttgaaagagttccagggacccccagagaatgttttggtcacacttagggtctgtaaagcatctgacacacagtagccagtcaatatttgtcaaatgagctcagctcttgaggatgtctctcaggtactccaccctgcttagccaccgccccaacctaggctctggcccgggccagtcagtctggagcttccctgttgcctgaatttgaaggctactagcaggactttgtggtgctcactgcagagatcaccagcaagattgagagggtcccctgactcctgcctgggatatttgcttgaagccactatctctgaacttatgccccacttatctcctaaaatcccagttgcttccagacgaggtacatgatgtcttaaagaagtttatgagtccaagtaagggaataagaggagagaacgaagggaagatatatatatagatagatagatagatagatagatagatagatagatagatagatatagatatagatatagatatagatatagatatagatatagatatagatatakatatagatatagatatagatatagatatatagatatatatgccactgagctctcctgcctcagagatgtttgtggagccattggcttatgatggcctcatcacttcatggtacatcaactctgctt

SEQ ID NO: 704457 - DNA, 579 bp, Homo sapiens
tgtatagtgtcaattttatgtatgatagctaatatttctcttctaataggtctgggagatacaattatttttctttattgcacaaatcaggaagctctataaaaaactgatttgtctaagattagtgatcttctaggaatcaatcctstttcttcactattataacccagggcatttgtttcactatttttaaagtcaaaataccaaaatgtgtgggatagcaaaactatggtaattcacaaattgcatgcttacttgggttcgtttatgtatttactttggaattccattatcaaattcatcccacacatttgaataataactggatgggtaatctaatatttagagaaaattcatagcaaaattctaaaaggtatgggttttggaaatctgtggacttaattgatttttctatatgatgaataatatattttccccattgctttctttgctatgttttgacttaatccttttataaagacacactggcaataaaatactgataagaatatctcttccacagcatttttatctgctccagtctaaatcctagtcttcttcattgttattttcaggtta

SEQ ID NO: 704458 - DNA, 628 bp, Homo sapiens
tcaatcttagttttttcagttattagctgtgtgactttagacagttacttaatttaatctttcatgcttcaattccccatctgtaaaatagaaatgatagaagaacttatagtactgtgcatattaaaaacaaacaaaaaattaatgtgtgtgtgtgtgtaaagtgctaagaatagtccctgtcacatagtcaacattatctaaaactagagaattattatgaacagtataattattatcctctaaaatgataatgcagttgttaagttgttcaytatatttgtcaagttctttttccagtagccttcatggaagaaaaaaaatgccccagtggcttttatttttcccacaatgcagtgattctaactctaaataaaactgaagtaggctatataaaatgtgtcaatgtgatattagatattacagctctttggttaaaatctagctttaaaaacttcagttccatattttttgaaacgtttttgaccacacaaactttacggtatctaatgaaagttgagaaacttgttttatacaaaaatatacatatgtgtctcaaaattaaacttatacataaatatgcagatacgtgtgtgtatgtatttcaggaattaatgaatccctgaat

SEQ ID NO: 704459 - DNA, 628 bp, Homo sapiens
tcaatcttagttttttcagttattagctgtgtgactttagacagttacttaatttaatctttcatgcttcaattccccatctgtaaaatagaaatgatagaagaacttatagtactgtgcatattaaaaacaaacaaaaaattaatgtgtgtgtgtgtgtaaagtgctaagaatagtccctgtcacatagtcaacattatctaaaactagagaattattatgaacagtataattattatcctctaaaatgataatgcagttgttaagttgttcattatatttgtcaagttctttttccagtagccttcatggaagaaaaaaaatgccccagtggcttttatttttcccacaatgcagtgattctaactctaaataaaactgaagtaggctatataaaatgtgtcaatgtgatattagatattacagctctttggttaaaatctagctttaaaaacttcagttccatattttttgaaacgtttttgaccacacaaactttacggtatctaatgaaagttgagaaacttgttttatacaaaaatatacatatgtgyctcaaaattaaacttatacataaatatgcagatacgtgtgtgtatgtatttcaggaattaatgaatccctgaat

SEQ ID NO: 704460 - DNA, 628 bp, Homo sapiens
tcaatcttagttttttcagttattagctgtgtgactttagacagttacttaatttaatctttcatgcttcaattccccatctgtaaaatagaaatgatagaagaacttatagtactgtgcatattaaaaacaaacaaaaaattaatgtgtgtgtgtgtgtaaagtgctaagaatagtccctgtcacatagtcaacattatctaaaactagagaattattatgaacagtataattattatcctctaaaatgataatgcagttgttaagttgttcattatatttgtcaagttctttttccagtagccttcatggaagaaaaaaaatgccccagtggcttttatttttcccacaatgcagtgattctaactctaaataaaactgaagtaggctatataaaatgtgtcaatgtgatattagatattacagctctttggttaaaatctagctttaaaaacttcagttccatattttttgaaacgtttttgaccacacaaactttacggtatctaatgaaagttgagaaacttgttttatacaaaaatatacatatgtgtctcaaaattaaacttatacataaatatgcagataygtgtgtgtatgtatttcaggaattaatgaatccctgaat

SEQ ID NO: 704461 - DNA, 771 bp, Homo sapiens
accttaaatacccttgtcttactttcttgagaaaatttaaacttaagtcttaagtttcagtcttacgtctttagtcttaagtcctttgttcatttttagcattmcccactagacccttaactccttgaggatctgagctctgtctttcttttctttacccttagtatttacacaaaatttggcagagaatagactgctttaaacatatgttaaataaatcatatagctgttgattttttttcatttcatgtgtttccttcgttctctttggcttctatcaaaattttggtgggcataaaaatctgataataatttgcaaagttttgatgatgtgttataacagtctccttataagtatctgagccccagtaactgggaaaatgttcttattaatactttgatgcttgtgtgtgtatttttttaatttaacaataacagtttgtaatccaattagttgctatttaaatgaatgaacaatatggcttatatttcattacgaagtctatattttcaacagtgaatgatttctattggaaaacaaagtcctgatatgtttttgaaggagttgcgtgattaaggttaaagccaaggtcccctgatatggatctttaactttttctaacatagcagtcatatttctcctggattttgaagtaaatcttgatacatcttggcaaaatataaatggattgtaatcaattcttcatgtagtttccacttttattctagaagggtaacttattttgacctaactctctagcaacaacaata

SEQ ID NO: 704462 - DNA, 771 bp, Homo sapiens
accttaaatacccttgtcttactttcttgagaaaatttaaacttaagtcttaagtttcagtcttacgtctttagtcttaagtcctttgttcatttttagcattccccactagacccttaactccttgaggatctgagctctgtctttcttttctttacccttagtatttacacaaaatttggcagagaatagactgctttaaacatatgttaaataaatcatatagctgttgattttttttcatttcatgtgtttccttcgttctctttggcttctatcaaaattttggtgggcataaaaatctgataataatttgcaaagttttgatgatgtgttataacagtctccttataagtatctgagccccagtaactgggaaaatgttcttattaayactttgatgcttgtgtgtgtatttttttaatttaacaataacagtttgtaatccaattagttgctatttaaatgaatgaacaatatggcttatatttcattacgaagtctatattttcaacagtgaatgatttctattggaaaacaaagtcctgatatgtttttgaaggagttgcgtgattaaggttaaagccaaggtcccctgatatggatctttaactttttctaacatagcagtcatatttctcctggattttgaagtaaatcttgatacatcttggcaaaatataaatggattgtaatcaattcttcatgtagtttccacttttattctagaagggtaacttattttgacctaactctctagcaacaacaata

SEQ ID NO: 704463 - DNA, 648 bp, Homo sapiens
agcatgggtgacagagcgaggtcctgtctcaaaaaaaaaaaaaaaaaaaagggaaacaaaaacccagtacatttcattcctcatctctctgtcaagctacacagagcctccttttacagaagagcaaataagcacagagtacaaaggagtttaaaggttaggcaaacattccttcaccagctcagaggcaaatgtccagaagagagcctgactgtttcacttttaaggaacaatgctgtataaatatggccactgatacgtcaaagtgacagcctaggacttggttctaggtgacttttacttcagcttggcaaacttcaactgtcctgcttgctccttctaaaactcattttctttttttgagacagagtctcactctgttgcccaggatggagtgcagtggcacaatcttggctcactgtaaacttcacctcctgggttcaagcaattctcatgcctcagcctcccaagtagccgggactacaagcgtaccaccatgcccaggtaattttttgtatttttaatagggctggggtttygccatgttggccaggctggtattgaactcctgagctcaagtgatccgcccaactcggccttccaaagtgctgggattacaggcgtgagccatcacctctggcctcattt

SEQ ID NO: 704464 - DNA, 540 bp, Homo sapiens
cattgggtgtgtgaagcaagagagagtagatatccagaaatattcatatttctggatatttgtaaatatttgtaaatatgaatatttctggatatctacaaaacactaataatgctttttcagaaattatgggctcgtgttctgaccaggtagatgaatgtcttctatgaaaaattcaagtgaacttagtraggaagaatcctctggaattacttgaggtagtcagaattttccaagtgctccagagaatctggcattctactttgagctgttttttgcagaatttactctgtttacattctgcagattgtaatctgtaccttcaagcttctaatctaaggttttttctcaaatacaaagcaaacaaaatagaaaaatcatttgacaattctaaacagagagcattgcttcaataaatagttaactatttatcagtataaaatttaagcttgtattttaaaagttgagattattgcttcagcaaaatttaaattgaggttgtgttttcatttttgtatatttttaactgcctcttttttg

SEQ ID NO: 704465 - DNA, 628 bp, Homo sapiens
acatattctaatccaccacgtggctcagttaggactttttgctttcgattttcttgatgacctcattctttggccacgatgtcttcttgctgagtatctggatctgctctttgggctttctgatgccagattgcttgtttggtttcacagtcctaactccatctgcagttttggcttctgggcccctctggcctctggccctataacctgaaccatgttttattttcagttttgttatsttttcctgtcttttatctgacaactcttactgaccattgttcatgtagaggagaagttattttgtaaatttatagcagaaaaaattatcaaaatactaattgatgaggttaaaacaaatctttttggttaaactcctcagtttattgatgagaaaacaggctccaagaggtttagtgaattgtatcaactgacagagagagttagtgactgactcaaatgtagaagccaggtctcctgacttctagcttggtgtattttttttttacttttgacttaaaaaattgtttttgattgacaaatacaattgtatatatttatcatgtacaatataatgttttgaaatatgtatacattgtggtatagccaaattgagctaataagatatgca

SEQ ID NO: 704466 - DNA, 628 bp, Homo sapiens
acatattctaatccaccacgtggctcagttaggactttttgctttcgattttcttgatgacctcattctttggccacgatgtcttcttgctgagtatctggatctgctctttgggctttctgatgccagattgcttgtttggtttcacagtcctaactccatctgcagttttggcttctgggcccctctggcctctggccctataacctgaaccatgttttattttcagttttgttatgwtttcctgtcttttatctgacaactcttactgaccattgttcatgtagaggagaagttattttgtaaatttatagcagaaaaaattatcaaaatactaattgatgaggttaaaacaaatctttttggttaaactcctcagtttattgatgagaaaacaggctccaagaggtttagtgaattgtatcaactgacagagagagttagtgactgactcaaatgtagaagccaggtctcctgacttctagcttggtgtattttttttttacttttgacttaaaaaattgtttttgattgacaaatacaattgtatatatttatcatgtacaatataatgttttgaaatatgtatacattgtggtatagccaaattgagctaataagatatgca

SEQ ID NO: 704467 - DNA, 628 bp, Homo sapiens
acatattctaatccaccacgtggctcagttaggactttttgctttcgattttcttgatgacctcattctttggccacgatgtcttcttgctgagtatctggatctgctctttgggctttctgatgccagattgcttgtttggtttcacagtcctaactccatctgcagttttggcttctgggcccctctggcctctggccctataacctgaaccatgttttattttcagttttgttatgtkttcctgtcttttatctgacaactcttactgaccattgttcatgtagaggagaagttattttgtaaatttatagcagaaaaaattatcaaaatactaattgatgaggttaaaacaaatctttttggttaaactcctcagtttattgatgagaaaacaggctccaagaggtttagtgaattgtatcaactgacagagagagttagtgactgactcaaatgtagaagccaggtctcctgacttctagcttggtgtattttttttttacttttgacttaaaaaattgtttttgattgacaaatacaattgtatatatttatcatgtacaatataatgttttgaaatatgtatacattgtggtatagccaaattgagctaataagatatgca

SEQ ID NO: 704468 - DNA, 628 bp, Homo sapiens
acatattctaatccaccacgtggctcagttaggactttttgctttcgattttcttgatgacctcattctttggccacgatgtcttcttgctgagtatctggatctgctctttgggctttctgatgccagattgcttgtttggtttcacagtcctaactccatctgcagttttggcttctgggcccctctggcctctggccctataacctgaaccatgttttattttcagttttgttatgttttcytgtcttttatctgacaactcttactgaccattgttcatgtagaggagaagttattttgtaaatttatagcagaaaaaattatcaaaatactaattgatgaggttaaaacaaatctttttggttaaactcctcagtttattgatgagaaaacaggctccaagaggtttagtgaattgtatcaactgacagagagagttagtgactgactcaaatgtagaagccaggtctcctgacttctagcttggtgtattttttttttacttttgacttaaaaaattgtttttgattgacaaatacaattgtatatatttatcatgtacaatataatgttttgaaatatgtatacattgtggtatagccaaattgagctaataagatatgca

SEQ ID NO: 704469 - DNA, 628 bp, Homo sapiens
acatattctaatccaccacgtggctcagttaggactttttgctttcgattttcttgatgacctcattctttggccacgatgtcttcttgctgagtatctggatctgctctttgggctttctgatgccagattgcttgtttggtttcacagtcctaactccatctgcagttttggcttctgggcccctctggcctctggccctataacctgaaccatgttttattttcagttttgttatgttttcckgtcttttatctgacaactcttactgaccattgttcatgtagaggagaagttattttgtaaatttatagcagaaaaaattatcaaaatactaattgatgaggttaaaacaaatctttttggttaaactcctcagtttattgatgagaaaacaggctccaagaggtttagtgaattgtatcaactgacagagagagttagtgactgactcaaatgtagaagccaggtctcctgacttctagcttggtgtattttttttttacttttgacttaaaaaattgtttttgattgacaaatacaattgtatatatttatcatgtacaatataatgttttgaaatatgtatacattgtggtatagccaaattgagctaataagatatgca

SEQ ID NO: 704470 - DNA, 628 bp, Homo sapiens
acatattctaatccaccacgtggctcagttaggactttttgctttcgattttcttgatgacctcattctttggccacgatgtcttcttgctgagtatctggatctgctctttgggctttctgatgccagattgcttgtttggtttcacagtcctaactccatctgcagttttggcttctgggcccctctggcctctggccctataacctgaaccatgttttattttcagttttgttatgttttcctktcttttatctgacaactcttactgaccattgttcatgtagaggagaagttattttgtaaatttatagcagaaaaaattatcaaaatactaattgatgaggttaaaacaaatctttttggttaaactcctcagtttattgatgagaaaacaggctccaagaggtttagtgaattgtatcaactgacagagagagttagtgactgactcaaatgtagaagccaggtctcctgacttctagcttggtgtattttttttttacttttgacttaaaaaattgtttttgattgacaaatacaattgtatatatttatcatgtacaatataatgttttgaaatatgtatacattgtggtatagccaaattgagctaataagatatgca

SEQ ID NO: 704471 - DNA, 1157 bp, Homo sapiens
ttttgtcattattgtaaatagccttggatggtaataacccactccattgctcataaaacccatttgatctgtgtttatcacttgctctataagtagctcttcatttctgtttgttgctatcatggttataaaatatactactataatagttcttaaacatacaatagcgctataaaacagtatctttggtgggtatttaagcaattttaatgctgagacaaaataatttaatttcctacccatatgttgaacgttccttaaggcactaaaaaaatctctaaaatccatatgcttgaaaatatctaaatttctgccaaacttagttcaggcttattagtaattccwaacgagtgaaatcattgtgattatacaagaaaaaattgattaaggtatggcagctttctctactatccactatttcagagctgaaaacaatacgtatatcagatcttggttctgtgacatctaaaagtatctacaacatttgtgagcaagaaaatgtagaacctatcaaataaactttgagaaccattaacttgttttactctacctgtaacactctctatagagctaaattaacattctttgtattgtcatttcaataaaaatgttatgactctttcatagttaaaatcaactttttaaattttcagtgctaaccattatcacttaataaacagcagttagattttgacaccttgatttattttaaagaaaagttaatatccattgagatgtgaattttacataaagagaataaacaaaatcagatgattatcttaatagatgcagataagccttgataaaattcaatatctcttcatgttaagagccctcaataaactaggaattgaaggaacatacttcaaaataataaaagccatctatgacaaacccacagccaacatcattctgaatgggcaaaagctggaagcattccgcttgagaaccacgagacaacaaaaacctctctcatcactactattcaacatagcactgaaagtccccgacagagcaatcaggcaagagaaagaaataaaaggtatccaaataggaagagaggaagtcagtctacccctgtttgcagacatgattctatagctaggaaacctcatggtctctgctcccaagctctttgctctgataaacaacttcaa

SEQ ID NO: 704472 - DNA, 575 bp, Homo sapiens
cctttatttttcctcatagttcttagcaccatcttttatactatatatatttcactgaaaaatggtttattggaccagaatctaagctctgcaggagcagagatttttgttttgtttaacttactctgtttctggtacccaaaacagtggcctcaataaatatttgttaaagaatgaatgaataaaagtcatgctgatgagtgttattattgaataccagaggaagagaaattctttatatcaaatagtttttctgactctcggcatttttttttaccagctctcaccagtcatcgtatctttatggtttagccactaaagttgtaattgggtcttctgtctcagcaacatgatgacacaccacagcagctgcttaratttaacagaattcagttttgataggtcgttcaatgcttttgaatgtgctttcagtattctaactttttctgtttttttaaaaattcctttcagaatttcctccacttccctacaatgctgactctgagattctctcatgaagcttgactctcttttctcagtgatatttatcttaacttctacagataccttccttt

SEQ ID NO: 704473 - DNA, 651 bp, Homo sapiens
aggcggagcttgcagtgagccgagatcgcgccactgcactccagcctgggagacagagcgagactccgtctcaaaaaaaaaaaaagagtgacttctctcccatgatttaaatatcagaggagatgtgcaagacagaaggttggcyatttccagtgttctgtatttaaatggcaagtataagtctacaaagattagaaagggtgtgagtctcctaccaggcagggaaggtgcctgggaacttgggcaggagggtcagccagggaaggaatgtcggcacgacaggcttccccaaattcatgccatgccttgcactggctctcgaattaagaaaatttaaaagcaaaggaaataaccaatttcaaaaacaaacgagaaggtagaaaatatatttttaaaatacaggatttctctgataaaagcagaaagggtaaatcactgtggttaacataaggcaattttcctaactctgccactgtttgaatactggattagctattagccttccagttaatagtatatacatactaaatatgattatgtgtaaaagtggatggatggatagatgatctgccttaacttaaaaacaatagtgagatcggcatgattacatggactaaaaaagaaaagctgcttgaaatgaagtaattccat

SEQ ID NO: 704474 - DNA, 651 bp, Homo sapiens
aggcggagcttgcagtgagccgagatcgcgccactgcactccagcctgggagacagagcgagactccgtctcaaaaaaaaaaaaagagtgacttctctcccatgatttaaatatcagaggagatgtgcaagacagaaggttggctatttccagtgttctgtatttaaatggcaagtataagtctacaaagattagaaagggtgtgagtctcctaccaggcagggaaggtgcctgggaacttgggcaggagggtcagccagrgaaggaatgtcggcacgacaggcttccccaaattcatgccatgccttgcactggctctcgaattaagaaaatttaaaagcaaaggaaataaccaatttcaaaaacaaacgagaaggtagaaaatatatttttaaaatacaggatttctctgataaaagcagaaagggtaaatcactgtggttaacataaggcaattttcctaactctgccactgtttgaatactggattagctattagccttccagttaatagtatatacatactaaatatgattatgtgtaaaagtggatggatggatagatgatctgccttaacttaaaaacaatagtgagatcggcatgattacatggactaaaaaagaaaagctgcttgaaatgaagtaattccat

SEQ ID NO: 704475 - DNA, 651 bp, Homo sapiens
aggcggagcttgcagtgagccgagatcgcgccactgcactccagcctgggagacagagcgagactccgtctcaaaaaaaaaaaaagagtgacttctctcccatgatttaaatatcagaggagatgtgcaagacagaaggttggctatttccagtgttctgtatttaaatggcaagtataagtctacaaagattagaaagggtgtgagtctcctaccaggcagggaaggtgcctgggaacttgggcaggagggtcagccagggaaggaatgtcggcacgacaggcttccccaaattcatgccatgccttgcactggctctcgaattaagaaaatttaaaagcaaaggaaataaccaatttcaaaaacaaacgagaaggtagaaaatatatttttaaaatacaggatttctctgataaaagcagaaagggtaaatcactgtggttaacataaggcaattttcctaactctgccactgtttgaatactggattagctattagccttccagttaatagtatatacatactaaatatgattatgtgtaaaagtggatggatggatagatgatctgccttaacttaaaaacaatagtgagatcggyatgattacatggactaaaaaagaaaagctgcttgaaatgaagtaattccat

SEQ ID NO: 704476 - DNA, 1297 bp, Homo sapiens
  misc_feature 572, 600, 604, 605, 606, 607, 608, 609, 610, 611, 612, 613,614, 615, 616, 617, 618, 619, 620, 621, 622, 623, 624, 625,626, 627, 628, 629, 630, 631, 632, 633, 634, 635, 636, 637,638, 639, 640, 641, 642, 643, 644, 645, 646, 647, 648: n = A,T,C or G
  misc_feature 649, 650, 651, 652, 653, 654, 655, 656, 657, 658, 659, 660,661, 662, 663, 664, 665, 666, 667, 668, 669, 670, 671, 672,673, 674, 675, 676, 677, 678, 679, 680, 681, 682, 683, 684,685, 686, 687, 688, 689, 690, 691, 692, 693, 694, 695: n = A,T,C or G
  misc_feature 696, 697, 698, 699, 700, 701, 702, 703: n = A,T,C or G
ttaatgtatgtaattgaaacaaattaacgcaagaacatacacttacctatttaaaaaaaatcaagagcatacacaaaatttccgaagagaaagttgaaaaaaggatacgataatatgaaatcacattcagctcttgaaactgaccactaccatagtttaaaatgatattcgattgtttattcaarttattcttgatgggtacccattggtctatttttttcccacatcctttaacgtcaacttaaaaatagtaaaggtactgcatttcagctcactgacttgtttttgacgtattacacaagagcagtcattgcgaatctgacactccacagttgctgatttgctagaactctgcccaaaagtcaatgctttgttcttgggcatttacagtaccaggcagaatccatttaaaagtgtcctcatccaaactattaagtggaccaaaagctgctctctttttaagctctccctgtcacttttgatatttatttttttcttttgagacggaatcttactctgtcacccagctggagtgcagtggcgtgatatcggctcactgcaagctctgcctnccgggttcacgccattctcctgcctcantctnnnnnnnnnnnnnnnnnnnnnnnnnnnnnnnnnnnnnnnnnnnnnnnnnnnnnnnnnnnnnnnnnnnnnnnnnnnnnnnnnnnnnnnnnnnnnnnnnnnntctactaaaatacaaaattagctgggcgtggtggcgcatacctgtaatcctagctactgggaggctgaggcaggagaatcgcttgaacccgggaggcggaagttttgatgagcggagatcgcgccattgcactccagcctgggcaacaggagtgaaacttcatctcaaaaaagtaaaataaaataaataaagcaaatattgatactaaagattatacatgaattgagctgcttgattgatgcttctaaaagttacactgttttgggagtgagaaattatgaaatataaaacttaaacaattgatggatcgttaatatttattgttttcaaattaagaatattgaaaccttgaattctaatgttggataatttggttaaaaaatggaaagttgatgtgttagcaaccgctctgttgacatgactcatggaacctgtgaagaagctggtctcatagtattaagtggtggtataggagcagcttggggatagcacctggcatattggaatggatgaggtctggcaccctgagcagtccagcgaggacttggtctcagtagagcagtttggctaggaggagagtatgcagcacggttt

SEQ ID NO: 704477 - DNA, 638 bp, Homo sapiens
caggtctgaattatccatatgttttgatggtaagggatagagagcttctgttaaaaaggagttgggaatggggaagagaaaatttataaatgcttttttgattgagaaacagtgttgcaaagtggttaagagcatggactcttgagctatatttcctgggttcaaaaagtcccaaagctttgtcatctctgacaagttacaaatctttctgtacttcagctcttcatttctaaaatgccagtaataacactctgctcataaaawtcttataaggattatgaattagtacatgcaagggacttaaagtagcatcatctaacacatagaaaactcagcgttaggtatgatttcacttaggaaggcatcctgcgagagttgggacttcgagcactcctgaagttaaaaaaaagaggaaatgcattgacaaatttaatcgagaaaaattaactaaagttgagagtataatgatttgcacaagtgctctgagtctgaaattaacattaagtatggctttaaaaaatcttaccaaatgacatttcaaatgaaagctctttttttctaatttctcttaatcgggcaaatagcgttggttggccctttgtgactttgtaaatgaagcttcctcggtatcagaccta

SEQ ID NO: 704478 - DNA, 638 bp, Homo sapiens
caggtctgaattatccatatgttttgatggtaagggatagagagcttctgttaaaaaggagttgggaatggggaagagaaaatttataaatgcttttttgattgagaaacagtgttgcaaagtggttaagagcatggactcttgagctatatttcctgggttcaaaaagtcccaaagctttgtcatctctgacaagttacaaatctttctgtacttcagctcttcatttctaaaatgccagtaataacactctgctcataaaaatcttataaggattatgaattagtacatgcaagggacttaaagtagcatcatctaacacatagaaaactcagcgttaggtatgatttcacttaggaaggcatcctgcragagttgggacttcgagcactcctgaagttaaaaaaaagaggaaatgcattgacaaatttaatcgagaaaaattaactaaagttgagagtataatgatttgcacaagtgctctgagtctgaaattaacattaagtatggctttaaaaaatcttaccaaatgacatttcaaatgaaagctctttttttctaatttctcttaatcgggcaaatagcgttggttggccctttgtgactttgtaaatgaagcttcctcggtatcagaccta

SEQ ID NO: 704479 - DNA, 590 bp, Homo sapiens
aaagattttaaaaaaacaagatgcctgggaatccatgctgcttttaactttccctggcaaactactgagcagttgtcccctccaaagcatttgcatgtccaagctaagtcgcccatgtgatggtttctgccctgtttcctcccatttattcttggaaaataaaaatagccaatcactttctatatgcatatattcgaagccctgctgagtgtctcctcttccagacctgactttcctcacccttcccagtrctaaacacagtgctaagggcaccatatcagtggttcatagatatttgccaaatgaatgaacattcccagtggagacaccacccagccttccaaaggactcttcttgttggtgggacacagagtcgggggaccacggcaccagcccagctctctccctgggcttttctgtctctccatataatgggggtgtgggtggggacatttgtgacctgggacccagatgctctgctaaagacccttagagctctttgcctggcgacctccgtgacgccataaaaaacccactggccttggtgtgggacctctcccttgaccacctcctagcctggtgacctttga

SEQ ID NO: 704480 - DNA, 579 bp, Homo sapiens
cagggggacctgaggggaagcagaaggaaagagggaaatcggggaaaatgaggaaggggccagcaccctcccctccctcatgagcagatcagtgctgaatgtctttcccagtttctcacttgtatgctctgacccacaccacctgcttctctgcacactcacctcctttgtagctccctccctccggacctcagctgctgtttctctgccccaacccaccattctgatcggtgcccttcccatgtccccacccaagcctgcccccgtaggacgcatcacatgctgccctggttgtaccccaatgccatccttcaggccagtctggctaatgttatgaggccatgtgccaaccacctcccagctccgcaggyttcacttcagcgctgctctgaagaggaggagtcagctggcatgggattcattgaccaatatctcggatgcccgatcagaaaaaaatggcttaccaaccattctccttctcccatccatatcaagccacttagctccttaagtcaacgagtgattatgttttaatcagttggggaatagatggtgaaagtagagatggggaggaataag

SEQ ID NO: 704481 - DNA, 639 bp, Homo sapiens
tccctaatggctcaccttctggatttcctcctgtgaagggaatttgcagtgaggcaagttgtagaattgaaagaaggtcaggactgaggcaggaagccctggttccctctattcctacctaactctgatcagcagctttttgaccctctctctgaaaagaagggtaccttcctacttacttcacagggctttgagctaatagatattaagcagcttgaaaattttaaaactttaaataaatgtaagaactttgcagtaaactccagtgcccggcattgacttcctttagtatgaaagcagaaataatgctccaggtttacatccactgattttatcccacctctgtgacctggagaaaccaattatccctggaacaggtggtcttgcagggtgttttcactggtccccacaggaggacaaaagaaatctgtcacactggttcaggccagtgtgggaaaggagtaaaatgagggctaatgattcataamagtagcaaacttattgactaataaaattcttggtcatgaagcctccgtgttctacgcataccgaaatcaaagcaattacagattgaaatgaaactggaatgcttagttcggaaaatgcttgttttagcccaagatgggggctggaggtgag

SEQ ID NO: 704482 - DNA, 1240 bp, Homo sapiens
atatgcatgcagtctaagagaaaagcactttgattattatctccatcttatacatagtgaacctgaggcccagagagtttaggcaacttgcccaaggctgcacagcagccgagtaggattcacatctgaagttcactgccttaggcagagaccctgagcccccatttttccatttatagactcagaataataatgtctgtttagatgattttccctgcatcacactgttgctgtttacacgtctgtctccctcagtaactgtgagccacttgaggcaggatgtaggatggagccccagggagctgaattagtgaagaaactgggaccttttgcctgaagagccggtcattgaaagccgtgataaatgctttcaaatatctgaggggttgccatgcgcaagcaggacagggcctgttctaatgtcattcttggagacagtgtgagtttgaagaaggcattttggggctccatgggacatagcgctttctaacaacctaagctgtaccagaatgaactgcattcccaggatagtgggggacccattgctgggaggctgtggaagatcctggatggttcctgctaggtttaccataaaggcaacatgatccctattccttccagtgctccaggattctgtaacagtcccattcccaggtgagcttaataccccctggggacatggacaggaccagagggctgcctgtgagatgctgtgtytccatgtgcaccagtgttcccgggccgcttatttctagccccaccaaagatgctaggaagctcagtctctctggctccaggcagctggagatatggaccatttggaggaagtcttccggctgtcaaggtcactgctgctccaggggccggtggaaaaaattgctgatgccttttgttcacaataacaaaacctgacccacagacattgcttcacagtcttaaaaatacttccatgcttttaactcattttatttttagaatagccctgctgtgtgagacaggtattattgccattttgcagatcagtaaactataccttagtgacagtaaataactccctaagccacagcctatatgtagaactggggctggaatccacgtaccccagcatttactcgtttactcgaataacctcttcacaacgttaggtcgcctttctggagaccagcctctggcacccacttgtcagaagtgacctaggcgttaatagaaatgtgtttggggacaagggagaaaaatccct

SEQ ID NO: 704483 - DNA, 645 bp, Homo sapiens
aggtatatcttatgccacatgcatgtacaatcactgagacactggaatctctcagctttctgtaaggaataaatgagaaggctgcagttgaaaactaattgccagaaagatgccaactgtaactgtggtattggtcagcagcattttatttttgtattctatttatttatttatttttagagacagggtctcactctgtcacccaggctggagtgcagtggtatgatacatgggctcaaatgcagcctcaatctcctggactcaagcctcctgaacagctaagactacaggcgcacaccaccacacctggctgatttttaaattttttgtagagagacagtctatgttgcccaggctggtctcaaattcatgggctgtgatcctccarcctcagccgcccaaagtgctggcattacagacttgagtcaccatgcccagccgagcagttttaaaactactaacattatctggatggaatggtagagattaaaaagaagaaaaacagaaaaaaactactaacatttaaaaatcaagacatttcacctaaaactgcactttttccaggttttccagaaaaatcagtaataatggaaaccctgggtctatattctataagggcaacaatggctggggctgagaagctgc

SEQ ID NO: 704484 - DNA, 1148 bp, Homo sapiens
tttttacaatttaagaattttcaacgggtgtctgttccttatcttaacaaatcaccctagcttggcaccagcaggttgaacatgccttgctagttattctctcatagactcatttttttcccatccatatgtattctatctgctccatgctcattgccaygcctgttctttggcataggctatatgcactcattcccttctttcaacaatttaaatggtaggattgtctcatggttcagatccaaacttacccacttttcattgacctcctgttatttgcattttacagtattttctgtcctctcccactattatgcatttactagtttgtttacttatagctatactttagttattttataactatcttatctctgtggctggctctatgttggaattgccaatgtaatatgaaatataacatccatggtatagatcgttgtccagaaacacagaaaacctagaaaatatcattgttctgaatactttatcaccctattcaagccaaatattctaccatcagaagtccaccagttttgttgacaacccatcattttttcaaatctccatacctttacaatggatactgctcatgacaattaagggattaggaattagataggaggtttgctgcccagaactagggccagatttagcaggccattctgaggacacctgagatgttggaaagcaacacagaataatagaaggagcactggctttggactcaggcctggttcaaattcaagttctagcacatattaacagttaccttattttttccattttctcatatttaaaacagaaattatacatacctcacaatgctagtgtgacaattagatgagatggcatggccaagtgcagtggctcacgcctggaatcccagcactttgggaggctgaggcgtgccgatcacctgaggtcaggagttggaaaccagcctgcccaaaatggcgaaaccccgtcccaactaaaattacaaaaaaattagctgggtgcagtggtgggcacctgcaatctcagctactccagaggctgaggcaggagaatcacttgaacccgggaggcagacgttgcagtgagccgtgatcatgccactgcactccagcctcggtgacaaagagagactccatctcaaaaaaaat

SEQ ID NO: 704485 - DNA, 1148 bp, Homo sapiens
tttttacaatttaagaattttcaacgggtgtctgttccttatcttaacaaatcaccctagcttggcaccagcaggttgaacatgccttgctagttattctctcatagactcatttttttcccatccatatgtattctatctgctccatgctcattgccacgcctgttctttggcataggctatatgcactcattcccttctttcaacaatttaaatggtaggattgtctcatggttcagatccaaacttacccacttttcattgacctcctgttatttgcattttacagtattttctgtcctctcccactattatgcatttactagtttgtttacttatagctatactttagttattttataactatcttatctcygtggctggctctatgttggaattgccaatgtaatatgaaatataacatccatggtatagatcgttgtccagaaacacagaaaacctagaaaatatcattgttctgaatactttatcaccctattcaagccaaatattctaccatcagaagtccaccagttttgttgacaacccatcattttttcaaatctccatacctttacaatggatactgctcatgacaattaagggattaggaattagataggaggtttgctgcccagaactagggccagatttagcaggccattctgaggacacctgagatgttggaaagcaacacagaataatagaaggagcactggctttggactcaggcctggttcaaattcaagttctagcacatattaacagttaccttattttttccattttctcatatttaaaacagaaattatacatacctcacaatgctagtgtgacaattagatgagatggcatggccaagtgcagtggctcacgcctggaatcccagcactttgggaggctgaggcgtgccgatcacctgaggtcaggagttggaaaccagcctgcccaaaatggcgaaaccccgtcccaactaaaattacaaaaaaattagctgggtgcagtggtgggcacctgcaatctcagctactccagaggctgaggcaggagaatcacttgaacccgggaggcagacgttgcagtgagccgtgatcatgccactgcactccagcctcggtgacaaagagagactccatctcaaaaaaaat

SEQ ID NO: 704486 - DNA, 644 bp, Homo sapiens
tagcttattttacacgctgttctatgctttgcttttttcatgtaatatatcttggaggtatataatcagtaagtactgtagctctgcctccttctttttaatataatattccattctgtggacgcaccataatttatttagcttagcttatgttgattgctctgctctgggttktcaaagcctcctgagtacagcaaaggcacaaacgatatgtggatttgggtgtgtacgtgtgtgtgtgtgtggattatgggagtaacactggcttagatgacaaagattggcagctgagggactgtttgctccctgttcttcctgatcctacaaccagctgcttgccccttggcactctgtggcatcagatgtggtgtgaggatattccacttattctttgagctggtccactgttgctggagagctctgcttgctgcctcggtttccagaggcatctgtgctttcctacaagcccaacttcatatattctgtggtttcgggttttgaatgtttcctagtttaatcaaagatgggcatttctgtttccattttttgttagttttagttatccatggaaagataaaaacagaactatctttaatattaaaactagaagtttccaggaatcaattctgaaatttgcatctttg

SEQ ID NO: 704487 - DNA, 644 bp, Homo sapiens
tagcttattttacacgctgttctatgctttgcttttttcatgtaatatatcttggaggtatataatcagtaagtactgtagctctgcctccttctttttaatataatattccattctgtggacgcaccataatttatttagcttagcttatgttgattgctctgctctgggttttcaaagcctcctgagtacagcaaaggcacaaacgatatgtggatttgggtgtgtacgtgtgtgtgtgtgtggattatgggagtaacactggcttagatgacaaagattggcagctgagggactgtttgctccctgttcttcctgatcctacaaccagctgcttgccccttggcactctgtggcatcagatgtggtgtgaggatattccacttattctttgagctgrtccactgttgctggagagctctgcttgctgcctcggtttccagaggcatctgtgctttcctacaagcccaacttcatatattctgtggtttcgggttttgaatgtttcctagtttaatcaaagatgggcatttctgtttccattttttgttagttttagttatccatggaaagataaaaacagaactatctttaatattaaaactagaagtttccaggaatcaattctgaaatttgcatctttg

SEQ ID NO: 704488 - DNA, 644 bp, Homo sapiens
tagcttattttacacgctgttctatgctttgcttttttcatgtaatatatcttggaggtatataatcagtaagtactgtagctctgcctccttctttttaatataatattccattctgtggacgcaccataatttatttagcttagcttatgttgattgctctgctctgggttttcaaagcctcctgagtacagcaaaggcacaaacgatatgtggatttgggtgtgtacgtgtgtgtgtgtgtggattatgggagtaacactggcttagatgacaaagattggcagctgagggactgtttgctccctgttcttcctgatcctacaaccagctgcttgccccttggcactctgtggcatcagatgtggtgtgaggatattccacttattctttgagctggtccactgttgctggagagctctgcttgctgcctcrgtttccagaggcatctgtgctttcctacaagcccaacttcatatattctgtggtttcgggttttgaatgtttcctagtttaatcaaagatgggcatttctgtttccattttttgttagttttagttatccatggaaagataaaaacagaactatctttaatattaaaactagaagtttccaggaatcaattctgaaatttgcatctttg

SEQ ID NO: 704489 - DNA, 2226 bp, Homo sapiens
taaaaatacaaaaattagtcgggcgtggtggtgggtgcctgtaatcccagccactcaggaggctgaggcatgagaatcacttgaaccgaggaggcagaggttacagtgagccgagatcgcaccactacactccagcctgggtgccagagcaagactccatttcaaataaaaataaaaataaaaataaaaatgctttaggggactcggatgaaattgaaaatgccctttttgactttgaacagacttggtgacttgttaagaaatctttgaagctttaaagttatggtaaaaataaaaatccatcttccttttcctgcataagttattcagaataggctgttttgacaagaaaggctccccagatttccagagggaagggtccaagctgccagtgttcacccagcaccaggactcatgccctgcccccaggagacctccccaggtctgcacccctcaactccgtgctgacttggtagagcaggagaccagggttcctgaggggccaaggcctccccgcaggtcctcgcctgcctagtaacatccacctccaatggacccagtctgccccagatccccccagcccaggtagaaaggagccccaggtcctcactggctccctcggtggccttctcggtgcggtgggccaggccctcggcagccagctttcccaggcctcccaacatcgtgtggcagcagacagtggtgaactaggaggctgaggactggcccaacatgcttttatagctgcctctggtgcctatctaggctctggggcaacaagccctcgccccagcccagtaggaggctggacaggtgagtcagcgagggcggcagcaggaaggggctgggcggagccaccctggcactggggtggcagcatcccctgacagcatgaagcttctataaccctgtcctagggaccccgtgaaggataggggcagggagcagggctggacaggagagatctggacatgcctcttccttgaggcagagggcctgagtgccagcccccctgagaccaaagcttcccaagcctgggtactgatatgtacctggagacaaggcctaggattccaagcctgctgctcaaggtccccagtgtggcctagtaagaggtttgggggttctatgggcctggagacctaggcagtcctttgggtcatgaacacaagtggagtgagggtgactgccctccccattcctggagaccctggctctgcagagcagtttgcggcctccatgggacagcgtggggtgttcagggtggtgccttgcccgagtcagaggggggcacagcactgggcagaagcgtagtcaccaggcgtcrctcagctgatgctcactcacccaagagtgtctgtgaggtcagcggtgccctcctatcccctggcagtcctggaggagtagacagaggcctccaccaccactcagggagatgcttctggccttagctagaatcccctagaaagcagcttccccggctcctggtgcatcgcatgaggagtggcagggctgctccctagttactcatgatggacagacgtgcctcaagccccctgccacatgctgcttcccttagtcaccagcccaacctgagcctccgtttcctcatctgtaaaatggggatagcctgccttcctggctgtgtcactaatcgtccctgagacaaagcatgcaagctcctgataaacacctgttccctccactcatcactgaggtgccctttggcagtgagctctgaccaaccggtagggtgtgccaaggagtgactgggacttgaggctgccttggagccagagggctggggaatgttacttccactggccaggagccaaggagaggtcttcccatgctcctacttctggggtgcaggcctgtggcaggggtctgaggctctctccccaatgcaggctcctggagctgctctcctgggtgtgttggggcctgattagtttactggactgtgggccctcccagcctgggactcgggagctgagaccctcttgcattcctgcatggtgtttgcgggctccagggctatggccagtccccctagggtggacagtgggtatcgtgggcagcaggacctctgggtctcaagactacggccccacacatgccattgctatctcctttgggcaggggtgaattggggcttaaacaatttagaggggccctctttatgaaaaagaatacaataatatgattcttgcacatttttcattt

SEQ ID NO: 704490 - DNA, 2226 bp, Homo sapiens
taaaaatacaaaaattagtcgggcgtggtggtgggtgcctgtaatcccagccactcaggaggctgaggcatgagaatcacttgaaccgaggaggcagaggttacagtgagccgagatcgcaccactacactccagcctgggtgccagagcaagactccatttcaaataaaaataaaaataaaaataaaaatgctttaggggactcggatgaaattgaaaatgccctttttgactttgaacagacttggtgacttgttaagaaatctttgaagctttaaagttatggtaaaaataaaaatccatcttccttttcctgcataagttattcagaataggctgttttgacaagaaaggctccccagatttccagagggaagggtccaagctgccagtgttcacccagcaccaggactcatgccctgcccccaggagacctccccaggtctgcacccctcaactccgtgctgacttggtagagcaggagaccagggttcctgaggggccaaggcctccccgcaggtcctcgcctgcctagtaacatccacctccaatggacccagtctgccccagatccccccagcccaggtagaaaggagccccaggtcctcactggctccctcggtggccttctcggtgcggtgggccaggccctcggcagccagctttcccaggcctcccaacatcgtgtggcagcagacagtggtgaactaggaggctgaggactggcccaacatgcttttatagctgcctctggtgcctatctaggctctggggcaacaagccctcgccccagcccagtaggaggctggacaggtgagtcagcgagggcggcagcaggaaggggctgggcggagccaccctggcactggggtggcagcatcccctgacagcatgaagcttctataaccctgtcctagggaccccgtgaaggataggggcagggagcagggctggacaggagagatctggacatgcctcttccttgaggcagagggcctgagtgccagcccccctgagaccaaagcttcccaagcctgggtactgatatgtacctggagacaaggcctaggattccaagcctgctgctcaaggtccccagtgtggcctagtaagaggtttgggggttctatgggcctggagacctaggcagtcctttgggtcatgaacacaagtggagtgagggtgactgccctccccattcctggagaccctggctctgcagagcagtttgcggcctccatgggacagcgtggggtgttcagggtggtgccttgcccgagtcagaggggggcacagcactgggcagaagcgtagtcaccaggcgtcgctcagctgatgctcactcacccaagagtgtctgtgaggtcagcggtgccctcctatcccctggcagtcctggaggagtagacagaggcctccaccaccactcagggagatgcttctggccttagctagaatcccctagaaagcagcttccccggctcctggtgcatcgcatgaggagtggcagggctgctccctagttactcatgatggacagacgtgcctcaagccmcctgccacatgctgcttcccttagtcaccagcccaacctgagcctccgtttcctcatctgtaaaatggggatagcctgccttcctggctgtgtcactaatcgtccctgagacaaagcatgcaagctcctgataaacacctgttccctccactcatcactgaggtgccctttggcagtgagctctgaccaaccggtagggtgtgccaaggagtgactgggacttgaggctgccttggagccagagggctggggaatgttacttccactggccaggagccaaggagaggtcttcccatgctcctacttctggggtgcaggcctgtggcaggggtctgaggctctctccccaatgcaggctcctggagctgctctcctgggtgtgttggggcctgattagtttactggactgtgggccctcccagcctgggactcgggagctgagaccctcttgcattcctgcatggtgtttgcgggctccagggctatggccagtccccctagggtggacagtgggtatcgtgggcagcaggacctctgggtctcaagactacggccccacacatgccattgctatctcctttgggcaggggtgaattggggcttaaacaatttagaggggccctctttatgaaaaagaatacaataatatgattcttgcacatttttcattt

SEQ ID NO: 704491 - DNA, 616 bp, Homo sapiens
gatttattttatgtatttatttattttttgacccagagtctgtctctcttgctcagactggactgcagtggtgccatcttgactcctcacaacctccaccacccaggttcaagcgattctcacgcctcagcctcccaagaagctgggactacaagtttgcgccactatgcccagataattttttttkgggggggtgggtgggtggagtttcgctcttgttgcccaggctggagtgcaatggtgtgatctcggctcaccacaacctctgcctcccgggttcaagagattctcctgcctcagcctcccaagtggctgggattacaggcatgtaccaccacgcccagctaattttgtagagtgaggctcaaaacaactgagggaaggtaaatctcaattctactaataggtctacacaatattagcactttttaaaaagcctgtaacattagcatgtgagatggatatgtctatagtgcttcaagtagttttcatctctgaaataattttaaaatcacagaatttaaagttacatgctggaaaggaccaatgaccttatgtgacatttaattcaacactcgttttacagatcagggaaacaaaccttaaaactgacttg

SEQ ID NO: 704492 - DNA, 616 bp, Homo sapiens
gatttattttatgtatttatttattttttgacccagagtctgtctctcttgctcagactggactgcagtggtgccatcttgactcctcacaacctccaccacccaggttcaagcgattctcacgcctcagcctcccaagaagctgggactacaagtttgcgccactatgcccagataattttttttggggggggtgggtgggtggagtttcgctcttgttgcccaggctggagtgcaatggtgtgatctcggctcaccacaayctctgcctcccgggttcaagagattctcctgcctcagcctcccaagtggctgggattacaggcatgtaccaccacgcccagctaattttgtagagtgaggctcaaaacaactgagggaaggtaaatctcaattctactaataggtctacacaatattagcactttttaaaaagcctgtaacattagcatgtgagatggatatgtctatagtgcttcaagtagttttcatctctgaaataattttaaaatcacagaatttaaagttacatgctggaaaggaccaatgaccttatgtgacatttaattcaacactcgttttacagatcagggaaacaaaccttaaaactgacttg

SEQ ID NO: 704493 - DNA, 616 bp, Homo sapiens
gatttattttatgtatttatttattttttgacccagagtctgtctctcttgctcagactggactgcagtggtgccatcttgactcctcacaacctccaccacccaggttcaagcgattctcacgcctcagcctcccaagaagctgggactacaagtttgcgccactatgcccagataattttttttggggggggtgggtgggtggagtttcgctcttgttgcccaggctggagtgcaatggtgtgatctcggctcaccacaacctctgcctcccgggttcaagagattctcctgcctcagcctcccaagtggctgggattacaggcatgtaccaccacrcccagctaattttgtagagtgaggctcaaaacaactgagggaaggtaaatctcaattctactaataggtctacacaatattagcactttttaaaaagcctgtaacattagcatgtgagatggatatgtctatagtgcttcaagtagttttcatctctgaaataattttaaaatcacagaatttaaagttacatgctggaaaggaccaatgaccttatgtgacatttaattcaacactcgttttacagatcagggaaacaaaccttaaaactgacttg

SEQ ID NO: 704494 - DNA, 616 bp, Homo sapiens
gatttattttatgtatttatttattttttgacccagagtctgtctctcttgctcagactggactgcagtggtgccatcttgactcctcacaacctccaccacccaggttcaagcgattctcacgcctcagcctcccaagaagctgggactacaagtttgcgccactatgcccagataattttttttggggggggtgggtgggtggagtttcgctcttgttgcccaggctggagtgcaatggtgtgatctcggctcaccacaacctctgcctcccgggttcaagagattctcctgcctcagcctcccaagtggctgggattacaggcatgtaccaccacgcccagctaattttgtagagtgaggctcaaaacaactgagggaaggtaaatctcaattctactaataggtctacacaatattagcactttttaaaaagcctgtaacattagcatgtgagatggatatgtctatagtgcttcaagtagttttcatctctgaaataattttaaaatcacagaatttaaagttacatgctggaaaggaccaatgaccttatgtgacatttaattcaacactygttttacagatcagggaaacaaaccttaaaactgacttg

SEQ ID NO: 704495 - DNA, 640 bp, Homo sapiens
  misc_feature 130, 196, 203, 226: n = A,T,C or G
actcgcccaagatcactgagaagttagcaggggaggcagccaaaggactgagttctcctgctatgggctcttgcctaataacgctggctggagccaggcctcggagcaagcaccacgtgccctggccgangacaaagtggcaccaagctcctcgcccacagccacacccctgtggcccacttgctgattggcccanggcttanggtggagccaaagagcaccatangtgggcttggctctgtccaatagaatgctcgttactggagccaaacaatctgagccgtcagagcctctcatggtggggcagggctataaatacccagggaagtctgcgctagagcttccagggcgtctcctctggaacagtggctgtctcgggtccccaccatgtaggtgcagctccctgccttccacagcagcttctggtgcctggctagagttctgggactgaattcacagatcgtgccactggcccaaggtgagaactcggaaggtccctgaccagggccaagatcaggcctctggaggtgactagaggcagttgggtgatagctggccgggtacagtctctcagtrccacccctggtgaatttctcgcatctacagactgttgaatttatatattgcaaggcctagtgat

SEQ ID NO: 704496 - DNA, 616 bp, Homo sapiens
gatgcctggccaagcttgtcattggagtctggcccctaagttccatctgggaaagggctacagggtcccaacccgaagtcccacattctttatgcttggtatccagatgatttatctaacactttacttcggtttgcagcctgccttcactcttcgttgagttattcttcatgcagatgacatgtagtatactgtttgtggctctggacgcaactggagagaaaattactgaaggatcttgaattaaattgtcttagaaaacagagactgctgaaggttgaagcagctaccacacctctgatcagaaaacctaaattgagaggaaaaggggcaattcctccattaggtattgactggctgattttgctggtgagatttggagaatctctcagttgcaatttgtccttgccctctgtggactctggttggatgcgcgcaagacatcttaacatgtccacgttgctgatagatgagtgtttgtgtgtgtatgtgcatatgcrtatgtatatgtatatagaacctctcttatagataatagatgtgcatgcacacatttttctaaccagtgcgacacatggcttcaccttctgttgtcctcaggcctgcccattccagg

SEQ ID NO: 704497 - DNA, 1392 bp, Homo sapiens
gccaggcgtggtggctcacgcctgtaatcccagcactttgggaggctgaggtgggaggatcacaaggtcaggagttggggaacagcctggccaatatggtgaaactctgtctgtactaaaaatacaaaaattagccagacggtggcaggtgcctgtagtcccagctacttgggaggctgaggcaggagaattgcttgaacccggaaggcagaggttgcagtgagccgagatcacaccactgcactccagcctgggcgacagcagagtgagactctgtctcaaaaaagaaaaaaaagaaaaagaaaagagaaaaaaaggaaaagtatttctccaggcagaagaagcccatgaggtttagtgagtgaagcaagggctggatttcagctcccacaggatcccccagctgagaggccttgacattcacaactatgatggttccaaattaaggacaggtgagagacaacacaaaatcaatagctcaatgttctctcttatataatgatatctacagattatgttaaagatctggatgacttaaaatgacattatgtgtatgtaatctgtatcttgcttgccccatcaacctatgcagtcaaaaagaggtcagagttaattttggtgcccaaatggccatgactcacgatgtacccttcagttcctacctgctgctcaaacctaactcatctgccccgatacaagtttctggaaggcccctaaggggagcatcgcgtgtgcctacagccaagatagtagttctaggctccggctttcccacatcatgggcttctcctaaccacagaagctctgccaaggttttttagaagccaccaaagctaccagtcctcagagtaccaagggaaccctgggagcagtacagagggaaggaaactgaccccctccccaattttgtgccacatcttctcacctgagccccaaaaacagatctgtctacatctagaatctctcaaaatctcgaaaaaaaagtttttacctcatatgcagaattctaccacaccttcctgtcagtttcttatctttacctcttcaactagagggagtcaaattcaatccaaggggctgaacaggaagacagacacgatcaccattgtctccattcattcattaatttacgtatgcactcatccattcaatcagcattgattgaggccaacttctgtgcttgacactgtkcttggcactgaggataaaacattaaataaggggagatgaagagctttaggaaaaatagctaatgcatgctgggcttaatagctaggtgacgggttgataggtgcagcaaaccaccacaggacacatttacctatgtaacaaacctgcacatcctgcacatttaccctggaacttaaaataaaaatagaatttaaaaaaaaa

SEQ ID NO: 704498 - DNA, 1392 bp, Homo sapiens
gccaggcgtggtggctcacgcctgtaatcccagcactttgggaggctgaggtgggaggatcacaaggtcaggagttggggaacagcctggccaatatggtgaaactctgtctgtactaaaaatacaaaaattagccagacggtggcaggtgcctgtagtcccagctacttgggaggctgaggcaggagaattgcttgaacccggaaggcagaggttgcagtgagccgagatcacaccactgcactccagcctgggcgacagcagagtgagactctgtctcaaaaaagaaaaaaaagaaaaagaaaagagaaaaaaaggaaaagtatttctccaggcagaagaagcccatgaggtttagtgagtgaagcaagggctggatttcagctcccacaggatcccccagctgagaggccttgacattcacaactatgatggttccaaattaaggacaggtgagagacaacacaaaatcaatagctcaatgttctctcttatataatgatatctacagattatgttaaagatctggatgacttaaaatgacattatgtgtatgtaatctgtatcttgcttgccccatcaacctatgcagtcaaaaagaggtcagagttaattttggtgcccaaatggccatgactcacgatgtacccttcagttcctacctgctgctcaaacctaactcatctgccccgatacaagtttctggaaggcccctaaggggagcatcgcgtgtgcctacagccaagatagtagttctaggctccggctttcccacatcatgggcttctcctaaccacagaagctctgccaaggttttttagaagccaccaaagctaccagtcctcagagtaccaagggaaccctgggagcagtacagagggaaggaaactgaccccctccccaattttgtgccacatcttctcacctgagccccaaaaacagatctgtctacatctagaatctctcaaaatctcgaaaaaaaagtttttacctcatatgcagaattctaccacaccttcctgtcagtttcttatctttacctcttcaactagagggagtcaaattcaatccaaggggctgaacaggaagacagacacgatcaccattgtctccattcattcattaatttacgtatgcactcatccattcaatcagcattgattgaggccaacttctgtgcttgacactgttcttgrcactgaggataaaacattaaataaggggagatgaagagctttaggaaaaatagctaatgcatgctgggcttaatagctaggtgacgggttgataggtgcagcaaaccaccacaggacacatttacctatgtaacaaacctgcacatcctgcacatttaccctggaacttaaaataaaaatagaatttaaaaaaaaa

SEQ ID NO: 704499 - DNA, 1087 bp, Homo sapiens
ttttggtagagacggggtctcaccatgttgcccaggctgatctcaaactcctgggctcaagtgatccacccacctcaaccttccaaatgctgggattacaagcataagccacctttctccttaaacccagagtcaaaaactgtttcaaaaacagagctacagaaagattaaacatctgtgattttagaaaatcacaatgaaaagagaagaggctgtcattttggctcttagaacccaggggtctctgatagcattgggctagttttgagatgcttctatataaggtcatgatttctcaactggttatagagatgcctcttgactgggtgactttcggcagggtacttgacctttcttgcctctgtttttcatctatctacatcatgaaattgttatgaggacagatgaaacagtatctataaagggcctagaatgatgcctggtacatagtaagtgtgctgtaattattatttattattacatcttttgttgttaaagagtaaatcagcaaaataaaattctggttaattgttgaacattgtttcacacatacatcaaacaagtgaaaacatttataaacaaacagcaactttatagacaaaaaaagaggaaaaaaaaaaaaaaaaagaaagaaacccagccagacacagcagctcacacctgtaatcccagcactttgggaggccaagacaggagaatcacttgagcttaggtgttcaagatcagcctgaacaaaacagtgagaccccctgtctctacaaaaattttaaaaattagttgtgcataatgrtgtacacctgtggtcccaggtactcgggaggctaaggagggaaaactgcttgagccaggaaggtcaaggttacaatgaacactgattgcaccactgcaccagtccagcgagaccgtgtctctaaaaaaagagagagagagagagagagagaaatcttttgtatttggcctatttaaccatttcgtacaaaccaactactcatagtacagcttaatacatacacaaaaaaacttaatagatgctcagaataagagttgtccttttgcttttcttttcttttttttttttttttttttt

SEQ ID NO: 704500 - DNA, 1087 bp, Homo sapiens
ttttggtagagacggggtctcaccatgttgcccaggctgatctcaaactcctgggctcaagtgatccacccacctcaaccttccaaatgctgggattacaagcataagccacctttctccttaaacccagagtcaaaaactgtttcaaaaacagagctacagaaagattaaacatctgtgattttagaaaatcacaatgaaaagagaagaggctgtcattttggctcttagaacccaggggtctctgatagcattgggctagttttgagatgcttctatataaggtcatgatttctcaactggttatagagatgcctcttgactgggtgactttcggcagggtacttgacctttcttgcctctgtttttcatctatctacatcatgaaattgttatgaggacagatgaaacagtatctataaagggcctagaatgatgcctggtacatagtaagtgtgctgtaattattatttattattacatcttttgttgttaaagagtaaatcagcaaaataaaattctggttaattgttgaacattgtttcacacatacatcaaacaagtgaaaacatttataaacaaacagcaactttatagacaaaaaaagaggaaaaaaaaaaaaaaaaagaaagaaacccagccagacacagcagctcacacctgtaatcccagcactttgggaggccaagacaggagaatcacttgagcttaggtgttcaagatcagcctgaacaaaacagtgagaccccctgtctctacaaaaattttaaaaattagttgtgcataatgatgtacacctgtggtcccaggtactcrggaggctaaggagggaaaactgcttgagccaggaaggtcaaggttacaatgaacactgattgcaccactgcaccagtccagcgagaccgtgtctctaaaaaaagagagagagagagagagagagaaatcttttgtatttggcctatttaaccatttcgtacaaaccaactactcatagtacagcttaatacatacacaaaaaaacttaatagatgctcagaataagagttgtccttttgcttttcttttcttttttttttttttttttttt

SEQ ID NO: 704501 - DNA, 1046 bp, Homo sapiens
gatgaaaagtggactttacttggccttgttttactaaagcaattcagaagtgggactttctatcaatcccaaatcttttcaccagactcaatatttaaatgttactttgggactactatgagaacattcctttcttctttgtgacataagtcctatcttacatggaatttccagataaaataaagcagaagggttatttttaaggctccctaaaattttccctcatgtatacacttactaactggtctatgcattggaaaactttcactatataaaattcaagaaataactacagaattatctatggtccacagatgaggtcagaatatttgcaataaaggccataagaatccattgactcgttcaaggttatcataaaagttcagttatataggtgtgtgaaaagataaagctcttctccctaggggccataacagcatgaaaattgtcaaagagccattgcatgttctccttgtttcaaagatatggtagtctcagctaattttgttaaaaccttttcagatcatctttcccaatctgtgaactgccttttaattatcttactgttgtctttcaaaaagttttaattttaataaattccaagttatamattttttttgtttcatggttcatgcattctatatcctaagaaaatctttgctaatctcaagacagcaaatgtctatttttttttttctagaatttctaggtttagcttttgtttaggtctatcatccattttaaaatctaaatttttcactaaaattatgtatgtgatgtaaaagtcgaggttcatttctcatatgaatatatacttattccatttgttgaaaagatgcttttcctctttgctttggtgcctttttgttttgttttcttttctttttagacagggtctcacccttttgcccagactggagtgcaatcacagctcagtgcagcctcaacctctccaggctcaggtgatcctcccatctcagtctcccaagcacgtgggactacaggcacacaccaccacacacagctcattgtgcctttgtcaaaaa

SEQ ID NO: 704502 - DNA, 660 bp, Homo sapiens
atttgtaatcagaggtgggtgctgctcttttaggagcactggtaatgggaatttttccaaagacaaaagaatgaaacaggtgcagcagagacaaggaaccaggggccagagggacaggaagaagaggaaagtgagagtaaaagaattttactgataaccttctggttctataaaattttttagttcttgctaaaactggacaccttgagatgctgtatccttacaataaacttctctgtaattagccgagcttaagtggatttcttctggcaactatgcatatgaaactgctcaaccactatgttaattttcaagtcttctaaagatggyaacaacttaaatttccctgccagaattttggagagaggcaagcaaatctgacatcagaaatgtagttgtctcacttttggtttaaatcctgaatcagtttagggaagcagtgggtgaagattatttttaaacagcccacagtcaacttatcctactcaaaagtatgaccaaaacactgaggaggcagaagagataaagaatttttattttctgataagtagtggttattttgacataaaataattattatatgaaagtcctttgaaccactgtgacttggattgacaattagagaaagagagagagtgagagtgagaatagagtgagtgt

SEQ ID NO: 704503 - DNA, 654 bp, Homo sapiens
ataatgatatggtacaaccaggagaattacatagacataagccatgacatcactgagccactgaatcaaagtgaataactgctctgcataacatgttataaataagtgataaagagccgtttgtttgagccgccagacttttctgatacttgtaggtgaatgcatcttaagtgatatgcacataaatgaatagttgtctccaggaagtaaccacagcataaaaacaactgggtttagatagaaataagaaccagccagaattatggagctcacgatcagaattatctttaggtcatgatgctaagttggttaagtgaagcttactctttgctatctctttctttataatacattccctctcagggaacctcttggctcctccaaccactcctttgtcagacatcccctgaggtttccaggtggttttctcaacactttttytttttctcaatagagtcccagagtcccactgttgcttctccaggagctttcttccacctctaaagactatttgttacaaacagataatcaagaagagtgtcccagctcaatttaaggccaacagcatccagaactcatatatgaactgatgcactggagaaaagtgattggagcccaaataactaactgacggcatgttggatttccccatca

SEQ ID NO: 704504 - DNA, 654 bp, Homo sapiens
ataatgatatggtacaaccaggagaattacatagacataagccatgacatcactgagccactgaatcaaagtgaataactgctctgcataacatgttataaataagtgataaagagccgtttgtttgagccgccagacttttctgatacttgtaggtgaatgcatcttaagtgatatgcacataaatgaatagttgtctccaggaagtaaccacagcataaaaacaactgggtttagatagaaataagaaccagccagaattatggagctcacgatcagaattatctttaggtcatgatgctaagttggttaagtgaagcttactctttgctatctctttctttataatacattccctctcagggaacctcttggctcctccaaccactcctttgtcagacatcccctgaggtttccaggtggttttctcaacactttttctttttctcaatagagtcccagagtcccactgttgcttctccaggagctttcttccacctctaaagactayttgttacaaacagataatcaagaagagtgtcccagctcaatttaaggccaacagcatccagaactcatatatgaactgatgcactggagaaaagtgattggagcccaaataactaactgacggcatgttggatttccccatca

SEQ ID NO: 704505 - DNA, 931 bp, Homo sapiens
tcctggaagaagaggaaattctaccaacagaatatcttaggactcaaataacaactcttccctgggtctccagtctgcctgccttgaactttcacaatcatgtgagctaattccttaaaataaatcaataaaaatagatgatagatggatgattctgtttctctggagaaccttgactaatacagatagcatactaattcacccttgccatttatagaggaaagagtggagtaataaatatcagaatatcttctccagacctggtcaccacagaaacaaattatagctrtacaaaatatcttggaagtttagctgaagagatgaggagatactctactgctcaatgtgcgccatgtcatctgttgtacctccccttagttaagtcaggagggcaacactccctttattttttattttattttgtatgtatgtgtgtgtgagatggagtctcactctgtggcccaggctggagtacagtggcgtgatcttggctcactgcaaccctgcttcccaggttcaagtgattcttgtgcttcagcctcccgagtagctaagattacaggcacaggccaccacctgtggtaatttttgtgtttttagtagagatggggcttcgctattttggccaggctggtctcgaactcctgacctcaggtgatccgcccacctcggccttccaaagtgctgggattacaggtgtgagccacagctctcggcccctctatttatcagacagatgtatagaaagtttattgtgctagcaagagtatgaagaaaaggattctctgagttgaaaaaacaaattggaatataaattggtaccacttctatggaaggcaaatttacagggcttattaattaaaataaaaaatgtgtactgtaaccactatgatacagcagttgcgcttccagaactctaccctatagaaat

SEQ ID NO: 704506 - DNA, 931 bp, Homo sapiens
tcctggaagaagaggaaattctaccaacagaatatcttaggactcaaataacaactcttccctgggtctccagtctgcctgccttgaactttcacaatcatgtgagctaattccttaaaataaatcaataaaaatagatgatagatggatgattctgtttctctggagaaccttgactaatacagatagcatactaattcacccttgccatttatagaggaaagagtggagtaataaatatcagaatatcttctccagacctggtcaccacagaaacaaattatagctatacaaaatatcttggaagtttagctgaagagatgaggagatactctactgctcmatgtgcgccatgtcatctgttgtacctccccttagttaagtcaggagggcaacactccctttattttttattttattttgtatgtatgtgtgtgtgagatggagtctcactctgtggcccaggctggagtacagtggcgtgatcttggctcactgcaaccctgcttcccaggttcaagtgattcttgtgcttcagcctcccgagtagctaagattacaggcacaggccaccacctgtggtaatttttgtgtttttagtagagatggggcttcgctattttggccaggctggtctcgaactcctgacctcaggtgatccgcccacctcggccttccaaagtgctgggattacaggtgtgagccacagctctcggcccctctatttatcagacagatgtatagaaagtttattgtgctagcaagagtatgaagaaaaggattctctgagttgaaaaaacaaattggaatataaattggtaccacttctatggaaggcaaatttacagggcttattaattaaaataaaaaatgtgtactgtaaccactatgatacagcagttgcgcttccagaactctaccctatagaaat

SEQ ID NO: 704507 - DNA, 931 bp, Homo sapiens
tcctggaagaagaggaaattctaccaacagaatatcttaggactcaaataacaactcttccctgggtctccagtctgcctgccttgaactttcacaatcatgtgagctaattccttaaaataaatcaataaaaatagatgatagatggatgattctgtttctctggagaaccttgactaatacagatagcatactaattcacccttgccatttatagaggaaagagtggagtaataaatatcagaatatcttctccagacctggtcaccacagaaacaaattatagctatacaaaatatcttggaagtttagctgaagagatgaggagatactctactgctcaatgtgcgccatgtcatctgttgtacctccccttagttaagtcaggagggcaacactccctttattttttattttatttygtatgtatgtgtgtgtgagatggagtctcactctgtggcccaggctggagtacagtggcgtgatcttggctcactgcaaccctgcttcccaggttcaagtgattcttgtgcttcagcctcccgagtagctaagattacaggcacaggccaccacctgtggtaatttttgtgtttttagtagagatggggcttcgctattttggccaggctggtctcgaactcctgacctcaggtgatccgcccacctcggccttccaaagtgctgggattacaggtgtgagccacagctctcggcccctctatttatcagacagatgtatagaaagtttattgtgctagcaagagtatgaagaaaaggattctctgagttgaaaaaacaaattggaatataaattggtaccacttctatggaaggcaaatttacagggcttattaattaaaataaaaaatgtgtactgtaaccactatgatacagcagttgcgcttccagaactctaccctatagaaat

SEQ ID NO: 704508 - DNA, 931 bp, Homo sapiens
tcctggaagaagaggaaattctaccaacagaatatcttaggactcaaataacaactcttccctgggtctccagtctgcctgccttgaactttcacaatcatgtgagctaattccttaaaataaatcaataaaaatagatgatagatggatgattctgtttctctggagaaccttgactaatacagatagcatactaattcacccttgccatttatagaggaaagagtggagtaataaatatcagaatatcttctccagacctggtcaccacagaaacaaattatagctatacaaaatatcttggaagtttagctgaagagatgaggagatactctactgctcaatgtgcgccatgtcatctgttgtacctccccttagttaagtcaggagggcaacactccctttattttttattttattttrtatgtatgtgtgtgtgagatggagtctcactctgtggcccaggctggagtacagtggcgtgatcttggctcactgcaaccctgcttcccaggttcaagtgattcttgtgcttcagcctcccgagtagctaagattacaggcacaggccaccacctgtggtaatttttgtgtttttagtagagatggggcttcgctattttggccaggctggtctcgaactcctgacctcaggtgatccgcccacctcggccttccaaagtgctgggattacaggtgtgagccacagctctcggcccctctatttatcagacagatgtatagaaagtttattgtgctagcaagagtatgaagaaaaggattctctgagttgaaaaaacaaattggaatataaattggtaccacttctatggaaggcaaatttacagggcttattaattaaaataaaaaatgtgtactgtaaccactatgatacagcagttgcgcttccagaactctaccctatagaaat

SEQ ID NO: 704509 - DNA, 380 bp, Homo sapiens
cacctcttcccccccttcctcactctataacatccttcccagtgaacatcatccccaggtggagcccaaaaccagcaactaaggctctctcatgttagtgaaaggattccagctggtragccccaccactgtggggacaaactcaattgagttgagctatggcctctgggatgaaggatcacagccacctaatcccaccctcaatgtactcagccaccaccacccaggatttatatccagggtgcactctgaagagaataaagccagtggtatttcttttcaattctaaagcatagatatttccccctaaaacacaggaagggtccaggttttcagaatgaccctgtttctcaagtcccttaactgctaacctaggagct

SEQ ID NO: 704510 - DNA, 650 bp, Homo sapiens
ttttttttcaaacggagtctccctttgtcgcccaggctggagtgcagtggcgcaatgtcaactcactgcaagctccgtctcctcggtacatggcattctgcctcagcctcccgagtagctgggactacaggcgcccaccagcatgcccagctaatttctttttttttttttgtattttaagaaaagatggggtttcaccatgttagccaggatggtctcgatcccctgacmttgtgatccacccgcctcgacctcccttcatgtttttttttaatatcctttatatcttctcatggcaagtggtcatatctgatgatcaaactatatttgttaaataatgtttcatgtagttaatatagagcaagttgaaaataatatattaaaacagtaatttctacaaggtacaacctaaacacaataactgatacaatactttttaagtgattttcgggtttttttggtacctcgtctagaaggattattcaaaaatgcaaatgtctccactaacttcccacttatttcttcctgggaaaatttttacattttaaaagaatcttgcaagtaagaggacatgaaatgtgctcgtacactacctataaagcatcaacacgtagaaaaatctgtaaatcctctatactttggtaaagggg

SEQ ID NO: 704511 - DNA, 615 bp, Homo sapiens
gggcatggattaaaaatggtgagccacactgcttgatgggattgtgtgagtgcctctatagctgctgattgaatgaatgaatataaaagagtacatgaaaattactttttccacccgtcgcggtggctcacgcctgtaatcccaccacgttgggagaccgaggccagcggatcacaaactcaggagttggagaccagcctggctaacatggtgaaacccygtctctactaaaaatacaaaaattagccaggcatggcggtgtgcacctgtaatcccagctacttggaaggctgaggcaggagaatcgcttgaacctgggaggcagaggtttgcagtgagccgagatcacaccactgcattccagcctggggtgacagagtgagactctgtctcaaaaacaaacaaagaaataaacaacaacaaaaaccccacttttccagagttaacatgaggcctcactcttggtgttgtacattctatgggttttcacaaacacataatgacatgcatgcatccaccattgtagcatcatacagaatggtttcattggcctaaaaatcctgtgtgcgtagattattcatccctccctctccccaagtccctggcaatcactga

SEQ ID NO: 704512 - DNA, 1040 bp, Homo sapiens
agtgtcctatccagggctgcactgcacggctgttgcgggggggtggtggtttcaggttgagggtgctatggggtgctgcaatgcccgtggttcggggaggcggggcggtttgggtgtgttgggtgcgctattgcgggggggctacactgctggtkgcaagggggcagggtgggttgggggccatatcaggggctgcactgattgctttagctagggtttccagtactatgttaaataacagtggtgacagtgggcatccttatcatgttccagatcttagaggaaaagctttccatttttccccattccatatgattctagctgtgggggtctctcatgtggtttttattgtgttgcagtatgtttcttctgtacccgttttttgaggatttgtagcatgttccccaaattgaatataccattttttaaaaagagactgagtcttgctgttatgttgcccaggctggtctcaaacttctggacttacgcgatcctcttctgcctcagccttcagatagctgcagctataagcatgcaccaccgcacccagcttgaaggtactgtatttttaattccatattgtcaagcgtttaagatacttttctttaaaaaattaatattaattcaaaggaagaaattggcagagtgaaaagacaacctacagaatgggagaaaatatttgcaaagtatgtatccagcagaggattaatatccagaatatacaaggaactcttgacatctcaatagcaaaaaaaaaaaaaaaaaaagaatccaactgaaaaatgggcaaatgacctgaatagatatttcttaaaagatgacagacacatgaccaacaaatatgttttcctaaaaagctcaacatcactagtcatcagggaaatgcaaatcaaaaccacaatgaggtgtcatctcaccccacttagaatggctactatcaaaaagacaaaaaatagcaaatgctggcaaagatgtggagaaaagtgaacacttaaatggggctagtggaaatgtaaactagtacagccaccatggagaac

SEQ ID NO: 704513 - DNA, 1040 bp, Homo sapiens
agtgtcctatccagggctgcactgcacggctgttgcgggggggtggtggtttcaggttgagggtgctatggggtgctgcaatgcccgtggttcggggaggcggggcggtttgggtgtgttgggtgcgctattgcgggggggctacactgctggttgcaagggggcagggtgggttgggggccatatcaggggctgcactgattgctttagctagggtttccagtactatgttaaataacagtggtgacagtgggcatccttatcatgttccagatcttagaggaaaagctttccatttttccccattccatatgattctagctgtgggggtctctcatgtggtttttattgtgttgcagtatgtttcttctgtacccgttttttgaggatttgtagcatgttccccaaattgaatataccattttttaaaaagagactgagtcttgctgttaygttgcccaggctggtctcaaacttctggacttacgcgatcctcttctgcctcagccttcagatagctgcagctataagcatgcaccaccgcacccagcttgaaggtactgtatttttaattccatattgtcaagcgtttaagatacttttctttaaaaaattaatattaattcaaaggaagaaattggcagagtgaaaagacaacctacagaatgggagaaaatatttgcaaagtatgtatccagcagaggattaatatccagaatatacaaggaactcttgacatctcaatagcaaaaaaaaaaaaaaaaaaagaatccaactgaaaaatgggcaaatgacctgaatagatatttcttaaaagatgacagacacatgaccaacaaatatgttttcctaaaaagctcaacatcactagtcatcagggaaatgcaaatcaaaaccacaatgaggtgtcatctcaccccacttagaatggctactatcaaaaagacaaaaaatagcaaatgctggcaaagatgtggagaaaagtgaacacttaaatggggctagtggaaatgtaaactagtacagccaccatggagaac

SEQ ID NO: 704514 - DNA, 1040 bp, Homo sapiens
agtgtcctatccagggctgcactgcacggctgttgcgggggggtggtggtttcaggttgagggtgctatggggtgctgcaatgcccgtggttcggggaggcggggcggtttgggtgtgttgggtgcgctattgcgggggggctacactgctggttgcaagggggcagggtgggttgggggccatatcaggggctgcactgattgctttagctagggtttccagtactatgttaaataacagtggtgacagtgggcatccttatcatgttccagatcttagaggaaaagctttccatttttccccattccatatgattctagctgtgggggtctctcatgtggtttttattgtgttgcagtatgtttcttctgtacccgttttttgaggatttgtagcatgttccccaaattgaatataccattttttaaaaagagactgagtcttgctgttatgttgcccaggctggtctcaaacttctggacttacgcgatcctcttctgcctcagccttcagatagctgcagctataagcatgcaccaccgcacccagcttgaagrtactgtatttttaattccatattgtcaagcgtttaagatacttttctttaaaaaattaatattaattcaaaggaagaaattggcagagtgaaaagacaacctacagaatgggagaaaatatttgcaaagtatgtatccagcagaggattaatatccagaatatacaaggaactcttgacatctcaatagcaaaaaaaaaaaaaaaaaaagaatccaactgaaaaatgggcaaatgacctgaatagatatttcttaaaagatgacagacacatgaccaacaaatatgttttcctaaaaagctcaacatcactagtcatcagggaaatgcaaatcaaaaccacaatgaggtgtcatctcaccccacttagaatggctactatcaaaaagacaaaaaatagcaaatgctggcaaagatgtggagaaaagtgaacacttaaatggggctagtggaaatgtaaactagtacagccaccatggagaac

SEQ ID NO: 704515 - DNA, 1040 bp, Homo sapiens
agtgtcctatccagggctgcactgcacggctgttgcgggggggtggtggtttcaggttgagggtgctatggggtgctgcaatgcccgtggttcggggaggcggggcggtttgggtgtgttgggtgcgctattgcgggggggctacactgctggttgcaagggggcagggtgggttgggggccatatcaggggctgcactgattgctttagctagggtttccagtactatgttaaataacagtggtgacagtgggcatccttatcatgttccagatcttagaggaaaagctttccatttttccccattccatatgattctagctgtgggggtctctcatgtggtttttattgtgttgcagtatgtttcttctgtacccgttttttgaggatttgtagcatgttccccaaattgaatataccattttttaaaaagagactgagtcttgctgttatgttgcccaggctggtctcaaacttctggacttacgcgatcctcttctgcctcagccttcagatagctgcagctataagcatgcaccaccgcacccagcttgaaggtactgtatttttaattccatattgtcaagcrtttaagatacttttctttaaaaaattaatattaattcaaaggaagaaattggcagagtgaaaagacaacctacagaatgggagaaaatatttgcaaagtatgtatccagcagaggattaatatccagaatatacaaggaactcttgacatctcaatagcaaaaaaaaaaaaaaaaaaagaatccaactgaaaaatgggcaaatgacctgaatagatatttcttaaaagatgacagacacatgaccaacaaatatgttttcctaaaaagctcaacatcactagtcatcagggaaatgcaaatcaaaaccacaatgaggtgtcatctcaccccacttagaatggctactatcaaaaagacaaaaaatagcaaatgctggcaaagatgtggagaaaagtgaacacttaaatggggctagtggaaatgtaaactagtacagccaccatggagaac

SEQ ID NO: 704516 - DNA, 1040 bp, Homo sapiens
agtgtcctatccagggctgcactgcacggctgttgcgggggggtggtggtttcaggttgagggtgctatggggtgctgcaatgcccgtggttcggggaggcggggcggtttgggtgtgttgggtgcgctattgcgggggggctacactgctggttgcaagggggcagggtgggttgggggccatatcaggggctgcactgattgctttagctagggtttccagtactatgttaaataacagtggtgacagtgggcatccttatcatgttccagatcttagaggaaaagctttccatttttccccattccatatgattctagctgtgggggtctctcatgtggtttttattgtgttgcagtatgtttcttctgtacccgttttttgaggatttgtagcatgttccccaaattgaatataccattttttaaaaagagactgagtcttgctgttatgttgcccaggctggtctcaaacttctggacttacgcgatcctcttctgcctcagccttcagatagctgcagctataagcatgcaccaccgcacccagcttgaaggtactgtatttttaattccatattgtcaagcgtttaagwtacttttctttaaaaaattaatattaattcaaaggaagaaattggcagagtgaaaagacaacctacagaatgggagaaaatatttgcaaagtatgtatccagcagaggattaatatccagaatatacaaggaactcttgacatctcaatagcaaaaaaaaaaaaaaaaaaagaatccaactgaaaaatgggcaaatgacctgaatagatatttcttaaaagatgacagacacatgaccaacaaatatgttttcctaaaaagctcaacatcactagtcatcagggaaatgcaaatcaaaaccacaatgaggtgtcatctcaccccacttagaatggctactatcaaaaagacaaaaaatagcaaatgctggcaaagatgtggagaaaagtgaacacttaaatggggctagtggaaatgtaaactagtacagccaccatggagaac

SEQ ID NO: 704517 - DNA, 1040 bp, Homo sapiens
agtgtcctatccagggctgcactgcacggctgttgcgggggggtggtggtttcaggttgagggtgctatggggtgctgcaatgcccgtggttcggggaggcggggcggtttgggtgtgttgggtgcgctattgcgggggggctacactgctggttgcaagggggcagggtgggttgggggccatatcaggggctgcactgattgctttagctagggtttccagtactatgttaaataacagtggtgacagtgggcatccttatcatgttccagatcttagaggaaaagctttccatttttccccattccatatgattctagctgtgggggtctctcatgtggtttttattgtgttgcagtatgtttcttctgtacccgttttttgaggatttgtagcatgttccccaaattgaatataccattttttaaaaagagactgagtcttgctgttatgttgcccaggctggtctcaaacttctggacttacgcgatcctcttctgcctcagccttcagatagctgcagctataagcatgcaccaccgcacccagcttgaaggtactgtatttttaattccatattgtcaagcgtttaagatacttttctttaaaaaattaatattaattcaaaggaagaaattggcagagtgaaaagacaacctacagaatgrgagaaaatatttgcaaagtatgtatccagcagaggattaatatccagaatatacaaggaactcttgacatctcaatagcaaaaaaaaaaaaaaaaaaagaatccaactgaaaaatgggcaaatgacctgaatagatatttcttaaaagatgacagacacatgaccaacaaatatgttttcctaaaaagctcaacatcactagtcatcagggaaatgcaaatcaaaaccacaatgaggtgtcatctcaccccacttagaatggctactatcaaaaagacaaaaaatagcaaatgctggcaaagatgtggagaaaagtgaacacttaaatggggctagtggaaatgtaaactagtacagccaccatggagaac

SEQ ID NO: 704518 - DNA, 1728 bp, Homo sapiens
gaaaccatgacaacggttcgttgtggaaacttcatagtggaggggagggaggaatgtgactgtggctccttcaagcagtgttatgccagttattgctgccaaagtgactgtcacttaacaccggggagcacctgtcatataggagagtgctgtacaaacttcagcttctccccaccagggactctctgcagacctatccaaaatatatgtgaccttccagagtactgtcacgggaccaccgtgacatgcccagcaaacttttatatgcaagatggaaccctgtgcatggaagaaggctactgttatcatgggaactgcactgaccgcaatgtgctctgcaaggcgatgtttggtgtcagtgctgaggatgctcctaaggtctgctatgacataaatcttgaaagctaccgatttggacattgtattagacaacaaacatatctcagctaccaggcttgtacaggaatagataagttttgtggaggactgcagtgtaccaatgtgacccatcttccccagctgcaggaacatgtttcattccatcactcagtgagaggagggtttcagtgttttagactggatgaacaccatgcaacagacatgactgatgttgggcgtgtgatagatggcactccttgtgttcatggaaacttctgtaataacacccggtgcaatgcaactatcacttcactgggctacgactgtcgccttgagaagtgcagtcatagaggggtctgcaacaacagaaggaactgccattgccatataggctgggatcctccactgtgcctaagaagaggtgctggtgggagtgtcgacagcgggccacctccaaaaagaacaygttctctcagacaaagccaacaatcagagatgtatctgagagtggtctttggtcgtatttacgccttcataattgcactgctctttgggacagccacaaatgtgcaaacttatcaggaccaccaccggttaggaagagacagttactaaccctgaataagactaattcagcctcccgatccctgtaaagatacagagaatataacagcaaaatctatgaaataggatcaggcgaagggatggcaaagctcaagtccacatttcttgaagtccacaggaggcacatggtcctgtctcacgtcacagggaaaggggaggcattggcttctatcccaggttcttgtaggtcgctgatgttcactctgaaataaatcttcaaaaacacacattggtgccttccacattttcttagactcctctgggagcccaaacttggccagaacctctggcctggagagacatgaatgagcatctggctcttgacctgaggtcgctggtcccggaattaacggaagttgccaccagctccttacagggcacgttcatgacatttctccagaagagagctccagagcaataagcttcctcattccccaggtaatcagtccttctctaaacccgaagtcagtttagggtgatccagggctactccctgttccctgtctgttccttacaggggtgctgtgggctttgcagtgagagggacttgggttcaaatcccccaccaagcaaatccccctacctggggccgagcttcccgtatgtgggaaaatgaatccctcaggttgattgctgcaagcaatgaaattcaactagaaaaataggtagacgtgagggcaagctgtctgtcatttagtgtgagctctgtgagtggcagctgccccc

SEQ ID NO: 704519 - DNA, 1038 bp, Homo sapiens
ggctccaggctgcttcacccatactgcaggtgctttggtgtgggaggaaaaatgcattctggcygggcactgtggctcacgcgtgtaatcccagcactttgggaggctgaggcgggtggatcataaggtcaggagataaagaccatcctggctaacacggtgaaacctcatctctactaaaaatacaaaatactagcgggcatggtggtgggcgcctgtagtcccagctactcgggaggcaggagaatggcgtgaacctgggaggcggagcttgcagtgagcccgagatcgcaccactgcactccagcctgggcgacagagcgagactccgtctcaaaaaaaaaaaaaaaaaaaaaaaaaaagaaaagaaagagagagagagagagacagagacaaagacagagacggagacagagagacagacggagagagagaaaaatggattctaagcctgggacaccgacctgctcctgccaacaaaagcagaggggaagccaattgcaagtgcaaaaaaaaagtttttatttcagtgggatgaatgtctaggtgtgcagtcactggagtaaacgtcactgggacatgctgtgtaattctttgtgtacattgctgagttctactgctaatgttagcccatttcattcatgaaattggtaatttatgacatcccttttttctttatcattattagttaaggtttgtcaattttatagatattttcaaagaaccagctttatttctttgcttttctttgttgttttcttttggctgtttcatttatttctgctcttatccttattatattctttcttatatttgttttgattttattttgctactattttctactttcttgatgtgatagcttgaatttttatttgagagatttctacttttctattatatatatttagtgaaatacattttcctctcagcactgacgtcaactgtgttaaatcaagtttgatatgttgtatttttatttttattcagtttaatatatttaattgtttcccttgagaagttctccttagaagtgtg

SEQ ID NO: 704520 - DNA, 1038 bp, Homo sapiens
ggctccaggctgcttcacccatactgcaggtgctttggtgtgggaggaaaaatgcattctggccgggcactgtggctcacgcgtgtaatcccagcactttgggaggctgaggcgggtggatcataaggtcaggagataaagaccatcctggctaacacggtgaaacctcatctctactaaaaatacaaaatactagcgggcatggtggtgggcgcctgtagtcccagctactcgggaggcaggagaatggcgtgaacctgggaggcggagcttgcagtgagcccgagatcgcaccactgcactccagcctgggcgacagagcgagactccgtctcaaaaaaaaaaaaaaaaaaaaaaaaaaagaaaagaaagagagagagagagagacagagacaaagacagagacggagacagagagacagacggagagagagaaaaatggattctaagcctgggacaccgacctgctcctgccaacaaaagcagaggggaagccaattgcaagtgcaaaaaaaaagwttttatttcagtgggatgaatgtctaggtgtgcagtcactggagtaaacgtcactgggacatgctgtgtaattctttgtgtacattgctgagttctactgctaatgttagcccatttcattcatgaaattggtaatttatgacatcccttttttctttatcattattagttaaggtttgtcaattttatagatattttcaaagaaccagctttatttctttgcttttctttgttgttttcttttggctgtttcatttatttctgctcttatccttattatattctttcttatatttgttttgattttattttgctactattttctactttcttgatgtgatagcttgaatttttatttgagagatttctacttttctattatatatatttagtgaaatacattttcctctcagcactgacgtcaactgtgttaaatcaagtttgatatgttgtatttttatttttattcagtttaatatatttaattgtttcccttgagaagttctccttagaagtgtg

SEQ ID NO: 704521 - DNA, 1038 bp, Homo sapiens
ggctccaggctgcttcacccatactgcaggtgctttggtgtgggaggaaaaatgcattctggccgggcactgtggctcacgcgtgtaatcccagcactttgggaggctgaggcgggtggatcataaggtcaggagataaagaccatcctggctaacacggtgaaacctcatctctactaaaaatacaaaatactagcgggcatggtggtgggcgcctgtagtcccagctactcgggaggcaggagaatggcgtgaacctgggaggcggagcttgcagtgagcccgagatcgcaccactgcactccagcctgggcgacagagcgagactccgtctcaaaaaaaaaaaaaaaaaaaaaaaaaaagaaaagaaagagagagagagagagacagagacaaagacagagacggagacagagagacagacggagagagagaaaaatggattctaagcctgggacaccgacctgctcctgccaacaaaagcagaggggaagccaattgcaagtgcaaaaaaaaagtttttatttcagtgggatgaatgtctaggtgtgcagtcactggagtaaacgtcactgggacatgctgtgtaattctttgtgtacattgctgagttctactgctaatgttagcccatttcattcatgaaattggtaatttatgacatcccttttttctttatcattattagttaaggtttgtcaattttatagatattttcaaagaaccagctttatttctttgcttttctttgttgttttcttttggctgtttcatttatttctgctcttatccttattatattctttcttatatttgttttgattttattttgctactattttctactttcttgatgtgatagcttgaatttttatttgagagatttctacttttctattatatatatttagtgaaatacattttcctctcagcactgacgtcaactgtgttaaatcaagtttgatatgttgtatttttatttttattcagtttaatatatttaattgtttcccttgagamgttctccttagaagtgtg

SEQ ID NO: 704522 - DNA, 463 bp, Homo sapiens
cttatgttccgatatataaacggaatatagttttgccrctgtctgacacttcagcagccatcttcaggtaataaggtgaacttaaggaaagaaacacatactacaaaagatttgtcaaaaaggcagggaagcctaggtccctgatgatatcttggcactgcccacctctggactgcagtggactgattatctttagaagcacgcatgagagaagaaaactaaacctttatgttgcataaattactgtagcttgagtttctattatatgcagctgaatctaagtctactatgtgcagcaaatttgagtccctggatagatcttgagtttccaacacttaagtaaaatgtggagtaattgaactacttaataaaaagtaataattatttattccaaccatagatactttgcttctttggccatagttgaattattatcttttaaaaatggttctgtttttattaa

SEQ ID NO: 704523 - DNA, 463 bp, Homo sapiens
cttatgttccgatatataaacggaatatagttttgccgctgtctgacacttcagcagccatcttcaggtaataaggtgaacttaaggaaagaaacacatactacaaaagatttgtcaaaaaggcagggaagcctaggtccctgatgatatcttggcactgcccacctctggactgcagtggactgattatctttagaagcacgcatgagagaagaaaactaaacctttatgttgcataaattactgtagcttgagtttctattatatgcagctgaatctaagtctactatgtgcagcaaatttgagtccctggatagatcttgagtttccaacacttaagtaaaatgtggagtaattgaaytacttaataaaaagtaataattatttattccaaccatagatactttgcttctttggccatagttgaattattatcttttaaaaatggttctgtttttattaa

SEQ ID NO: 704524 - DNA, 581 bp, Homo sapiens
cccacatatgggaaatctagtaagaaatcgtagaagctcccttatctgatgccagtgtgaggtttaaatcacacaagctccttctcctgagtagaaacgtgcccctacccccaaccccaccaccaaatcattataaagccctgagccagcctcctttcctgttccattgaagaaattccagtttggaatttcttgagaggcctgtgctgctctcagcagacaataatagagttggtaaatcttttcataaccacctgaggtgtgagtgtggcactatcagacctgacatccacactaacaattggygggctctctcttcttttgcatggggtcacctacaattggaactatgggtttggagtcctgacagtgaccaccacggggcctttcttcttttgcactggatgctaactccctctgccccagtgcccagcatgcactttatcctgcctgctgctcactgacccttggagttctgttgagctgggctgcagtgttgagttaaacaccacaccttttatagatttagctgattgaattcagaagcattgataatttattcacattgagaaacaggagtg

SEQ ID NO: 704525 - DNA, 581 bp, Homo sapiens
cccacatatgggaaatctagtaagaaatcgtagaagctcccttatctgatgccagtgtgaggtttaaatcacacaagctccttctcctgagtagaaacgtgcccctacccccaaccccaccaccaaatcattataaagccctgagccagcctcctttcctgttccattgaagaaattccagtttggaatttcttgagaggcctgtgctgctctcagcagacaataatagagttggtaaatcttttcataaccacctgaggtgtgagtgtggcactatcagacctgacatccacactaacaattggtgggctctctcttcttttgcatggggtcacctacaattggaactatgggtttggagtcctgacagtgaccaccacggggcctttcttsttttgcactggatgctaactccctctgccccagtgcccagcatgcactttatcctgcctgctgctcactgacccttggagttctgttgagctgggctgcagtgttgagttaaacaccacaccttttatagatttagctgattgaattcagaagcattgataatttattcacattgagaaacaggagtg

SEQ ID NO: 704526 - DNA, 2109 bp, Homo sapiens
ccccttccctctgtcctctccctaagccaacatccctgccttcagcctccaagtggggccaagattatgcccacccaggatgagggagcaggatgccttcctgccctcgaccgacagcagccacaagtcattacctgggacctatctggagcacctcatccccggctaggatgccacaaatgcccagatgatgaacactgattgcggtcgagagcagccccagcaaaccggatacccctcacatatgagtagattccttttcctaaggggtcaccccagcgggggaggtgacatgttcagggacagcagatacacgtcatgatcattcttcctctggggctcagaaacagctcagtagttcatcaggttcacagcaatcaggcccatggtggctgaattttttatttatttttttttttgagatggagtctcgctctgtcacccagactggaatgcactggtacgatcttggctcactgcaacctccacctcctgcgttcaagcaattcttgtgcctcagcctcacaagtagctgggactacaggcgcccgccaccacacccagctaatttttgtatttttagtagagatggggttgcactatattggccagactggtttcaaactcctggcatcaagtgatccacccacttcagcctcccaaagtgctgggattacaggcgtgagccaccatgcctggccaaggctgatcatttatttgagggcaaaggagagaggctatggtgggttggggctaagctaggcactggggatacaatggggacacaggccctgccctcctgaagcttctaatccggaaggggagatgggtattaattggatatcatgccaaagggtgagatgttgcaaagggagatgagcattgtgcagagamaacatgaatggaaaacctacctagattagagggtagggagggctttcatgaagaggtgatgtttagatggagattgaaaggacaagctggagttgactcagtagggataggagagctgcagcagagggggtaggccagggagtaggacagatgctacccacataccaagagccaccattcatgggcatcggctccatgagaaggaatgcagacagcttctaggagcaaagaccagcccccagctggaaacaggcacctcagtcctacaatcacaaggaactgaaatcagccaacaacctgaacaagtctggaagtgaattcattcctggagccaacaaatggaacgtggccctgctgaccccctgattttggcctcatgaggctgtaagcagaggacacagctgagccaggctgtacctggtcttctgaccttcagaactctgacataacaaatgcacattttttaagttgctccattcgtgaaaactggttacagcagcaaaggaacatgcatacgcttcccatactgtgagaagcccaagtcacacggagaggcctgaaggatgaggccccatgctgacagagaagccggggagccctgtggccctgaacctagggatgaagacgacccctgggatgtacagctctgccgagtattcggatgagtccacccccgctgcaactgacccacagctgcaagagggactccaagccagaaccacccccctgaacccactcaacccacagaagcgtgggagagaatgacccactggggttttaagccactaagtttcacagccacagataaccagaagtggctgttgtgaggattaaattagagttaataccctaaagcgcacagaacagcaaatactccataaatgtcagcaaatacacttttactatgatcattcccacttggcaagtgaagaaatcgggactcagagagggatgtgcagagctggagggcagcacagctgggatcccagcctcacatctgcctgactctagatccctgttcctcccatggcactgagctggcttctaacccttcgcgcctgctagaagggaaggttgtacttctcccgtggcagtgggcttccatgctgccaggacaattaaagaatctatctgcccttatctgacacaggattcctgcaaccagtgaccaagctgcaggaggctgacaaaccccccaacagaactcttatgtca

SEQ ID NO: 704527 - DNA, 2109 bp, Homo sapiens
ccccttccctctgtcctctccctaagccaacatccctgccttcagcctccaagtggggccaagattatgcccacccaggatgagggagcaggatgccttcctgccctcgaccgacagcagccacaagtcattacctgggacctatctggagcacctcatccccggctaggatgccacaaatgcccagatgatgaacactgattgcggtcgagagcagccccagcaaaccggatacccctcacatatgagtagattccttttcctaaggggtcaccccagcgggggaggtgacatgttcagggacagcagatacacgtcatgatcattcttcctctggggctcagaaacagctcagtagttcatcaggttcacagcaatcaggcccatggtggctgaattttttatttatttttttttttgagatggagtctcgctctgtcacccagactggaatgcactggtacgatcttggctcactgcaacctccacctcctgcgttcaagcaattcttgtgcctcagcctcacaagtagctgggactacaggcgcccgccaccacacccagctaatttttgtatttttagtagagatggggttgcactatattggccagactggtttcaaactcctggcatcaagtgatccacccacttcagcctcccaaagtgctgggattacaggcgtgagccaccatgcctggccaaggctgatcatttatttgagggcaaaggagagaggctatggtgggttggggctaagctaggcactggggatacaatggggacacaggccctgccctcctgaagcttctaatccggaaggggagatgggtattaattggatatcatgccaaagggtgagatgttgcaaagggagatgagcattgtgcagagacaacatgaatggaaaacctacctagattagagggtagggagggctttcatgaagaggtgatgtttagatggagattgaaaggacaagctggagttgactcagtagggataggagagctgcagcagagggggtaggccagggagtaggacagatgctacccacataccaagagccaccattcatsggcatcggctccatgagaaggaatgcagacagcttctaggagcaaagaccagcccccagctggaaacaggcacctcagtcctacaatcacaaggaactgaaatcagccaacaacctgaacaagtctggaagtgaattcattcctggagccaacaaatggaacgtggccctgctgaccccctgattttggcctcatgaggctgtaagcagaggacacagctgagccaggctgtacctggtcttctgaccttcagaactctgacataacaaatgcacattttttaagttgctccattcgtgaaaactggttacagcagcaaaggaacatgcatacgcttcccatactgtgagaagcccaagtcacacggagaggcctgaaggatgaggccccatgctgacagagaagccggggagccctgtggccctgaacctagggatgaagacgacccctgggatgtacagctctgccgagtattcggatgagtccacccccgctgcaactgacccacagctgcaagagggactccaagccagaaccacccccctgaacccactcaacccacagaagcgtgggagagaatgacccactggggttttaagccactaagtttcacagccacagataaccagaagtggctgttgtgaggattaaattagagttaataccctaaagcgcacagaacagcaaatactccataaatgtcagcaaatacacttttactatgatcattcccacttggcaagtgaagaaatcgggactcagagagggatgtgcagagctggagggcagcacagctgggatcccagcctcacatctgcctgactctagatccctgttcctcccatggcactgagctggcttctaacccttcgcgcctgctagaagggaaggttgtacttctcccgtggcagtgggcttccatgctgccaggacaattaaagaatctatctgcccttatctgacacaggattcctgcaaccagtgaccaagctgcaggaggctgacaaaccccccaacagaactcttatgtca

SEQ ID NO: 704528 - DNA, 2109 bp, Homo sapiens
ccccttccctctgtcctctccctaagccaacatccctgccttcagcctccaagtggggccaagattatgcccacccaggatgagggagcaggatgccttcctgccctcgaccgacagcagccacaagtcattacctgggacctatctggagcacctcatccccggctaggatgccacaaatgcccagatgatgaacactgattgcggtcgagagcagccccagcaaaccggatacccctcacatatgagtagattccttttcctaaggggtcaccccagcgggggaggtgacatgttcagggacagcagatacacgtcatgatcattcttcctctggggctcagaaacagctcagtagttcatcaggttcacagcaatcaggcccatggtggctgaattttttatttatttttttttttgagatggagtctcgctctgtcacccagactggaatgcactggtacgatcttggctcactgcaacctccacctcctgcgttcaagcaattcttgtgcctcagcctcacaagtagctgggactacaggcgcccgccaccacacccagctaatttttgtatttttagtagagatggggttgcactatattggccagactggtttcaaactcctggcatcaagtgatccacccacttcagcctcccaaagtgctgggattacaggcgtgagccaccatgcctggccaaggctgatcatttatttgagggcaaaggagagaggctatggtgggttggggctaagctaggcactggggatacaatggggacacaggccctgccctcctgaagcttctaatccggaaggggagatgggtattaattggatatcatgccaaagggtgagatgttgcaaagggagatgagcattgtgcagagacaacatgaatggaaaacctacctagattagagggtagggagggctttcatgaagaggtgatgtttagatggagattgaaaggacaagctggagttgactcagtagggataggagagctgcagcagagggggtaggccagggagtaggacagatgctacccacataccaagagccaccattcatggscatcggctccatgagaaggaatgcagacagcttctaggagcaaagaccagcccccagctggaaacaggcacctcagtcctacaatcacaaggaactgaaatcagccaacaacctgaacaagtctggaagtgaattcattcctggagccaacaaatggaacgtggccctgctgaccccctgattttggcctcatgaggctgtaagcagaggacacagctgagccaggctgtacctggtcttctgaccttcagaactctgacataacaaatgcacattttttaagttgctccattcgtgaaaactggttacagcagcaaaggaacatgcatacgcttcccatactgtgagaagcccaagtcacacggagaggcctgaaggatgaggccccatgctgacagagaagccggggagccctgtggccctgaacctagggatgaagacgacccctgggatgtacagctctgccgagtattcggatgagtccacccccgctgcaactgacccacagctgcaagagggactccaagccagaaccacccccctgaacccactcaacccacagaagcgtgggagagaatgacccactggggttttaagccactaagtttcacagccacagataaccagaagtggctgttgtgaggattaaattagagttaataccctaaagcgcacagaacagcaaatactccataaatgtcagcaaatacacttttactatgatcattcccacttggcaagtgaagaaatcgggactcagagagggatgtgcagagctggagggcagcacagctgggatcccagcctcacatctgcctgactctagatccctgttcctcccatggcactgagctggcttctaacccttcgcgcctgctagaagggaaggttgtacttctcccgtggcagtgggcttccatgctgccaggacaattaaagaatctatctgcccttatctgacacaggattcctgcaaccagtgaccaagctgcaggaggctgacaaaccccccaacagaactcttatgtca

SEQ ID NO: 704529 - DNA, 1173 bp, Homo sapiens
taatccactaatccatgaatagattaatccattcttgagggcagaggcctcatgccccaatcccctcttgaaggccccacgtctcaatgctaccacatcagggattaaatttcaacctgagtttttaagaggataaatattcaaaccataacacacaggagtccaaggctgcctgagagattcactgcagcccaagagcttcctagactggaggatacgttggtgaatgaaaaaagactggcgtcaagtggccaaccagaagccagccgtgccagggacctgggactgtccttccaatgcactgtacgatcctgcgtgtcacagcccctctctgagccacactttcatcacctttaaagaccctctgcctcccacacacagtttgtgagcacctgagtccactgcacccacaaacgttttgtaaaccctacccagatgttacagtgtaatgacggacagcagtcaatgtcctttgaacagcaggcagcagggctggggtgtggtgtgtcagagcacgggctttggagacggctaggctggagttcaggtctcagctttgcagatctagctgtgaaacctcgaacaagttctggagggcacctgagcctcagcttcctcatctatgaaatgaggccttttcctatgcacactaaggattaaataagatgctcaaaacattgagtattgagcccagcacgtggtaaactctctagagagatactcgctgttactctygtttctactgtcactccccaccctctgcaggggtgcctgggaagggccttacccgtcagtgaatagatgaggcagcaggccagcaaggacagcacagacaccagggcccagtgggagaggctccgtttgcgcatgctgcagtagatggagacggcagcttcgtgacactgtaagacagagggcggctcagcaggatgctggcttcccctggaacaggcgatgcgaaaaaaaactcatatccaaaaggcgggaaatgtgggatatgatgaggtttctcttgaaatagcctgatcaatcctttattctttaattcacagtacacccccaacccctctttccttttctccttcctttctgcctttgttacatgcccaaacacgccacagtaccaggcattatcaatacaagctcgcattcctttccttattttttaaaaaa

SEQ ID NO: 704530 - DNA, 1173 bp, Homo sapiens
taatccactaatccatgaatagattaatccattcttgagggcagaggcctcatgccccaatcccctcttgaaggccccacgtctcaatgctaccacatcagggattaaatttcaacctgagtttttaagaggataaatattcaaaccataacacacaggagtccaaggctgcctgagagattcactgcagcccaagagcttcctagactggaggatacgttggtgaatgaaaaaagactggcgtcaagtggccaaccagaagccagccgtgccagggacctgggactgtccttccaatgcactgtacgatcctgcgtgtcacagcccctctctgagccacactttcatcacctttaaagaccctctgcctcccacacacagtttgtgagcacctgagtccactgcacccacaaacgttttgtaaaccctacccagatgttacagtgtaatgacggacagcagtcaatgtcctttgaacagcaggcagcagggctggggtgtggtgtgtcagagcacgggctttggagacggctaggctggagttcaggtctcagctttgcagatctagctgtgaaacctcgaacaagttctggagggcacctgagcctcagcttcctcatctatgaaatgaggccttttcctatgcacactaaggattaaataagatgctcaaaacattgagtattgagcccagcacgtggtaaactctctagagagatactcgctgttactcttgtttctactgtcactccccaccctctgcaggggtgcctgggaagggccttacccgtcagtgaatagatgaggcagcaggccagcaaggacagcacagacaccagggcccagtgggagaggctccgtttgcgcatgctgcagtagatggagacggcagcttcgtgacactgtaagacagagggcggctcagcaggatgctggcttcccctggaacaggcgatgcgaaaaaaaactcatatccaaaaggcgggaaatgtgggatatgatgaggtttctcttgaaatagcctgatcaatcctttattctttaattcacagtacacccccaacccctctttccttttctccttcctttctgcctttgttacatgcccaaacacgccacagtaccaggcattatcaatacaagctcrcattcctttccttattttttaaaaaa

SEQ ID NO: 704531 - DNA, 1512 bp, Homo sapiens
caccaggaacataatctccacaacctcttgtctaatrtactcatttttactttgctaagaaatgcaaagaaacctttttcaagtataaaacccatggctaactagacttccctaacttatctttaagaatcaggtattttcagtaatttagaggatttagttgaagttgttaccacacaattgagttatggcatttccagtgaaagcttctaataaaactatccaccaagatttctggattggcctcctggggctgtttgtacagaaaagatattcccatctaaaagggtgagtagattttttttgtaacaatcatatctctgttgaaactccaggctagaatatttccattatgaaaatctaagcaacgtattaagaaatgggagtgagttgcttttcctcttccacttagaatagaacataggttaaaacagtctcttgaacttataagttttgaggtgatgcatgatttttaaagtgggaaagcatacttcactagatggatgagtgagggaggctgtgagattttaaaaaaataaataaaatccccagagacgtagctaacagaagagctctatctgtagggtgcattaagcatccccacataggctcgtaagtgagatggctgtttaggtatccatcagggacactcaagggtgaaagagggcactactgataatttcggtggaccaacaggtataaatcaggactgcaccaagcaaactaaaatgttgcctattaatgaggcaaaagtctttgcttgtctgactgtcttagcctgtttgtgttgttataaaggaatacctgaggctggacaatttataaagaaaagaggtttatttggcttgcagttctgcagactgtacaagaagcatggcaccaacatctatttctgatgagggcctcaggaagcttccattcacagtggaaggcaaagggaagctgacatgtgcagatcatatggtgagagaggaagcaagagagagaggaggtgccaggctgttttcaacaaccaattctcccatgaaataagaatgagaactccctcattcccatgagaacagcaccaagccattcatgaggaatccgctctcatgacccaaacacctcccaccaggctccacctccaacattgtggatcaaatttcaacaggagacttagcagggacaaataaaccgtaactaaaccatggcaagaacagacctgtgttttcccaacattgttgaggcatgaggatcactttggatgtttacagattcctgagccctctcccggagttaccagatcagaatctcaggaatagagatccctaaacttatattttaacaataccaccaagtaattcttaaacacactaaagtttaagcaccagtgattgacacagtcaagctcaatgtttgtgtgtgtgtgtgtgtgtgtgtgtgtgtgtgtgtgtgtgtaaaattcacatagaaattttaaaaccaaaatatctcagcgatatgactaaaaacatcaaaactgggaataaa

SEQ ID NO: 704532 - DNA, 1512 bp, Homo sapiens
caccaggaacataatctccacaacctcttgtctaatgtactcatttttactttgctaagaaatgcaaagaaacctttttcaagtataaaacccatggctaactagacttccctaacttatctttaagaatcaggtattttcagtaatttagaggatttagttgaagttgttaccacacaattgagttatggcatttccagtgaaagcttctaataaaactatccaccaagatttctggattggcctcctggggctgtttgtacagaaaagatattcccatctaaaagggtgagtagattttttttgtaacaatcatatctctgttgaaactccaggctagaatatttccattatgaaaatctaagcaacgtattaagaaatgggagtgagttgcttttcctcttccacttagaatagaacataggttaaaacagtctcttgaacttataagttttgaggtgatgcatgatttttaaagtgggaaagcatacttcactagatggatgagtgagggaggctgtgagattttaaaaaaataaataaaatccccagagacgtagctaacagaagagctctatctgtagggtgcattaagcatccccacataggctcgtaagtgagatggctgtttaggtatccatcagggacactcaagggtgaaagagggcactactgataatttcggtggaccaacaggtataaatcaggactgcaccaagcaaactaaaatgttgcctattaatgaggcaaaagtctttgcttgtctgactgtcttagcctgtttgtgttgttataaaggaatacctgaggctggacaatttataaagaaaagaggtttatttggcttgcagttctgcagactgtacaagaagcatggcaccaacatctatttctgatgagggcctcaggaagcttccattcacagtggaaggcaaagggaagctgacatgtgcagatcatatggtgagagaggaagcaagagagagaggaggtgccaggctgttttcaacaaccaattctcccatgaaataagaatgagaactccctcattcccatgagaacagcaccaagccattcatgaggaatccgctctcatgacccaaacacctcccaccaggctccacctccaacattgtggatcaaatttcaacaggagacttagcagggacaaataaaccgtaactaaaccatggcaagaacagacctgtgttttcccaacattgttgaggcatgaggatcactttggatgtttacagattcctgagccctctcccggagttaccagatcagaatctcaggaatagagatccctaaacttatattttaacaataccaccaagtaattcttaaacacactaaagtttaagcaccagtgattgacacagtcaagctcaatgtttgtgtgtgtgtgtgtgtgtgtgtgtgtgtgtgtgtgtgtgtaaaattcacatagaaattttaaaaccaaaatatctcagcgataygactaaaaacatcaaaactgggaataaa

SEQ ID NO: 704533 - DNA, 601 bp, Homo sapiens
agggattctcgtgcctcagcctcccgagtagctgggattacaggggcacatgccaccatgcccagctaattttgtatttctagtacagacagggtttcaccgtgttggccaggctggtctsaaactcctgacctcaagtgatccaaccgcctcagcctcccaaagtgctgggatgacaggtgtgagccaccacacccagccactctctttcaactagaacagttcctctcttctttgttgcatatttttgtatttcatgcaaggtgctgtttatgaacaagggagtttcctgcagctttaataaagaagagaaaagaaaagaaagaaaggaaaattcgcatgttgaaaacattgtactaatcaaaaaagccagtcacaaaggaccctatgttatatgatttcatttacatgaaataccccaaagaggcaaatctgcagaaacagaaagtagagtggttgccaggggctggggatggggcgtggatggaggcatttgggattaacagctaaagatagcaggattccttctaaagcaataaaaatgttgtaaagttgattgtggaaattctttcacaactctttgattgtactaaaactttga

SEQ ID NO: 704534 - DNA, 601 bp, Homo sapiens
agggattctcgtgcctcagcctcccgagtagctgggattacaggggcacatgccaccatgcccagctaattttgtatttctagtacagacagggtttcaccgtgttggccaggctggtctcaaactcctgacctcaagtgatccaaccgcctcagcctcccaaagtgctgggatgacaggtgtgagccaccacacccagccactctctttcaactagaacagttcctctcttctttgttgcatatttttgtatttcatgcaaggtgctgtttatgaacaagggagtttcctgcagctttaataaagaagagaaaagaaaagaaagaaaggaaaattcgcatgttgaaaacattgtactaatcaaaaaagccagtcacaaaggaccctatgttatatgatttcatttacatgaaataccccaaagaggcaaatctgcagaaacagaaagtagagtggttgccaggggctggggatggggcgtggatggaggcatttgggattaacagctaaagatagcaggattccttctaaagcaataaaaatgttgtaaagttgattgtggaaattctttcacaactctttgattgtastaaaactttga

SEQ ID NO: 704535 - DNA, 1448 bp, Homo sapiens
tggcttaatgggagttgttgtttcaataggttcctgctaagaatggcctcttttaggaattgattttcaacctccacttatataggacttgagtggtcaaattaagtgagaaagttcattcttggcatttgtgggaaggttagttatgactgttggtaggaattctttctatagggagtgtgactatgagaagaataacgggaggccaatgagattccctgtagagaatgacacatggaggaatctgccttgatatttcttagcaggaaaaaaggaatgagattaagtggtattgctgcatctttactatgccctgcatactgtgcttgacacattacaagcacatatcattttatttttcaaaccacccatggtgtaattaaacaatattatacacattattaataaacagtttgtaggcactgttgtccaggcactattatcagaaataatgcattcaatactgacaatatctctatgtgatcatctaatttagagacaaagaaaagacgacacagcgttaagaagctttaccaaagagatagaggttataagtgtggaaccagagtttgagcccaagaaagttgcttacagaatatgtgctcatcactacaagctataatgcctcttctttaggcactatcatcacccttttagtagtggaactaaagtttataaaagttatgtagtatgcccaatgtcacacaactcataaggagggagagttggaatttgaactcaaaactgtcagccattaagcctatttccttttcccaccataactttgccttgtgaatattgaaagagagtttcagtagcaagcattataggatgtgctgaaggagaaagtcatttggaagtaatcttctgaatttatttatttatttattcattcatttatttatttataagtaaggctgttattattttatcttaccatatcctgcttttcaaagcttatgactctttgcaacctcagataccatctcttgactgctaacttatcatccatatcccatcaagccaagtctcctcatctctgacacttcccaccatagaaagatcttctgcctttcattttaagacccagctttttgtgtatgtctttgtaaacccatcagctgttatttaaacccctcccctcttacctaagacttactatttacctaaaactattatttaacatgttaactaaacatttatgtattgagttttcctatttttgtgccataggttcatgtcttttcttcctaatttattcagctataagtacaattctcacactctttatctaccttaaagtgaaagatattggaagtatgctagctggtagaataagggttgacttcrtttttaacatggttctagtgcttgattgtcactcccctttcttggagataatcaatgttgatggtactcagagacagtctccccatgttcagtcatca

SEQ ID NO: 704536 - DNA, 1353 bp, Homo sapiens
cagaaggagcgctagaaagatgaaaactgaacgttttagcatttacctataaaaaggtgaactacttgaaaagcacattttacaatcaaaagtaactacaatacttttaattaagaagttaaaaatcacttcttttccatacccaataataaagcaggatgcttgctcaataaagcaaaataggtcagttatacaaagtcaagaagawgcatttactcttctcttctgagtactaatatgtaaatttctaaccctttgcagttctttctggctgtaagtctctgatgttggcaagtgacagacccctatggccaatgaatcacaacttaaatgagtaccaagttcccagctgatatgtgaaaaggagctcagtgagaggtacttatgtcctttgtgtacttaaaatattgcccttaatgaataagtccgtgtgttcatttttattacaaaagtagcagacctatcttactttcaatattacaaggacaatgcttgcaaagatgaacaaaggacgtttaaagatacagggtctgaaagcttccgaaagccacatagtgagagatattaaaacaagttgagagaatttgatgtcaaaggcaagatcatatctgaagcatttctcaacactgtataaaatgcaaaaacaaagagaaacaaaactccttggagaagtttctgctcaatacgcaagccaccgacccttagcgaatgttcccaatagcaatcaatgagcccctaacaagagctggaaggactggggcagtaggaacaacacagaccatttgctctgattcaacgatttttatgagcaccattaagtgaaaatgggcaagtaactctgtggctcagggcaaagcccccacagcgatgtgatgaaaaatcttggcaagaacccatgaaagagaacccttcaaatcaaatcaaacaaatgcggatctactaggaggaagggccttgtttttcatttaaaataatcttttaaagagtagacaataatccaaacacctctgggttactatatcttctaggagaatactgattttgataaaaatatttaaatcaaaaattttaggtaattttaccttcaaatagcttaggcaccttagaccaaagtttgcacattctacaaatattgacacaataacaccattttaaatctttacccaccatttgttgggttatgtcaaatgtaactcaggataaaaagttgttcagataagtgattggtacaattggaatttatagattaaaatttgttacaaggaattaaaagtttttcttacctaacctctcaataattttccaaagaaaatgtgtgatgtgtcccttgctctgcccttcactctagtgttt

SEQ ID NO: 704537 - DNA, 1353 bp, Homo sapiens
cagaaggagcgctagaaagatgaaaactgaacgttttagcatttacctataaaaaggtgaactacttgaaaagcacattttacaatcaaaagtaactacaatacttttaattaagaagttaaaaatcacttcttttccatacccaataataaagcaggatgcttgctcaataaagcaaaataggtcagttatacaaagtcaagaagatgcatttactcttctcttctgagtactaatatgtaaatttctaaccctttgcagttctttctggctgtaagtctctgatgttggcaagtgasagacccctatggccaatgaatcacaacttaaatgagtaccaagttcccagctgatatgtgaaaaggagctcagtgagaggtacttatgtcctttgtgtacttaaaatattgcccttaatgaataagtccgtgtgttcatttttattacaaaagtagcagacctatcttactttcaatattacaaggacaatgcttgcaaagatgaacaaaggacgtttaaagatacagggtctgaaagcttccgaaagccacatagtgagagatattaaaacaagttgagagaatttgatgtcaaaggcaagatcatatctgaagcatttctcaacactgtataaaatgcaaaaacaaagagaaacaaaactccttggagaagtttctgctcaatacgcaagccaccgacccttagcgaatgttcccaatagcaatcaatgagcccctaacaagagctggaaggactggggcagtaggaacaacacagaccatttgctctgattcaacgatttttatgagcaccattaagtgaaaatgggcaagtaactctgtggctcagggcaaagcccccacagcgatgtgatgaaaaatcttggcaagaacccatgaaagagaacccttcaaatcaaatcaaacaaatgcggatctactaggaggaagggccttgtttttcatttaaaataatcttttaaagagtagacaataatccaaacacctctgggttactatatcttctaggagaatactgattttgataaaaatatttaaatcaaaaattttaggtaattttaccttcaaatagcttaggcaccttagaccaaagtttgcacattctacaaatattgacacaataacaccattttaaatctttacccaccatttgttgggttatgtcaaatgtaactcaggataaaaagttgttcagataagtgattggtacaattggaatttatagattaaaatttgttacaaggaattaaaagtttttcttacctaacctctcaataattttccaaagaaaatgtgtgatgtgtcccttgctctgcccttcactctagtgttt

SEQ ID NO: 704538 - DNA, 574 bp, Homo sapiens
aatagagtcattgaaacattgtttatgctcttcattattttaaaactctggtttctattagactcactgatggatcttgttatttactgtattaataaagaagtatgcatattactgtctcacaaatttacatctaaaaatattttgaaaatcagatttcaatataattgattttattagttgccttatatttttgctttatgcattyaaaaacattatcctcagaagttgtctgtggaccttataacactgttaagggctccaaggcacaaaacagtttaagaagccctgagaactcctcctcattttgtccttttactaggagatgaccccagggatgcaaatgtctctcacacaccctactgctctctggcagaactgctcacaccctccaccaactgcagcagaattcctgagctcacttctcagctctgccacttaataatactgaatgtgtggtgtgggtaaattatttaaccttggtgctttatttctctcctttgtacctatcttataggattattgcaggattaaccaacttaataaagtgtttagatccatatctggcaagtcg

SEQ ID NO: 704539 - DNA, 1534 bp, Homo sapiens
ggatcctattgtccaggagggtatcacctacctttttctttggctcaggttatgaactcatgagagctttgattcctagaagcagagggaaaaaacaagcaacccttaaaaagaattaaaagagttattgaagatgacttctttatagctctttgagatgagagaatgcatattcacaagttgcttgtaaatgcatttttaaacaggttagaaaatctgacataaatagcagatccctagtaatgcatctattcagcgtttttgaacaatggcattttcttcaatattagtttggaatatcaaatacaaatgatataggtatggggcattaattctgaaccctgaacattgtatagttctagtgatgagaaaaattattaactatattcagaagggggaaatctacgtaaacaaatttcaaataacgcacagaaaaacacaaaagtgttatcaacaaaagtttaaagaaaatagtaaaataaaaagcgcctccaaataatctgtctctgttttattttttctctttgcctttctccatttccttagaacaaggtccagtgtgatttaaaccctgagtacatttcctcttgtttttgtaggttataaacatagattaatacggtatgtttagcaaatatagctgattttggttaattattttatagttctactttttaaggagattgtattttgtggtaatttctggtctttaagaatattgattgaagatgagtctttatgaggaaatcaatatttcattcatatgaaatgaatgggattcaaacataggatatacctgcggatggtctatagtaattatctcattcgtgtatattgaattaattaagtcataataaaaacaaaaaaacaaagctcaatccaaataaagaattgtctacttgataaaggaaatataagcttttatgtaagtggctgttcctcaattacgtagatgagtccaaatctgttctgtaacgcaggaactagacaatggaaaagcatgtttcttttcttttgtatttgacattttgagttaattagccccacctggctgaattatagctaaatgaaagggaattctgaaaattttctgttagtttcatgtttgaagtaaacaccctgaaccttttaaaaatgttatgattttctcttaaaagctcactaatataactacaactaataaaagcataatgtatattactaggtctgaactcttggccatgggtatctgtgcattttagagatggtgtctgcacaagtgtcataaatgaccattttatagatagataatgttcttaatccataattctttattgctgatggttattgcattagatgatgacccttagctattaagagtcagtttttaatatcacaaccatttagaaaggttaatggacttggttttgcgayttaacctttggatgctgcaggttgagaggttatatttgtgcactacactgccagaaaatatctacttattttcatttatctatgcactttgagtagtgtggttttgtacagtaactgttat

SEQ ID NO: 704540 - DNA, 679 bp, Homo sapiens
ctttggtctctaggtgttaaataattgtttgaggctggtgaccattaattacctatgatctcaatctgctctgttaggaaattttcgtccagcagatctcagtttcaccaacgctggcccagagacaacgcttttgttggatgcatcattggaatttgcaaggtgaatgtaatggaagaagaaagggcccagggaattgagggcatatacaaaagattcattataaataggggctgtggaacatgatctattgaaaggagaagtgaattcctgaggggcttggtagatagaaatgaagtgataaggataacagattgcactcctctgtgaggtcaaaggattgttacagtgagagtgctccagaaggatgcaaaggtgataagaaagtaggatctttgaaagaatgaatttgcttgtggtgtagtttttggtggtgaactctgytggtatttcagttctctaaatttctacaaattcaattctatggtgtgatagggctatgaagggataacatgcattttgtgcctctacctttttcctgtttgtcaatggtatcccttttaaatgggcttgagttgccacattacttgattttggaaggcattgagaatccaatgtagtgttctacgattctggcagccctacctgcccccttctgcattaccatggggcttcaagg

SEQ ID NO: 704541 - DNA, 679 bp, Homo sapiens
ctttggtctctaggtgttaaataattgtttgaggctggtgaccattaattacctatgatctcaatctgctctgttaggaaattttcgtccagcagatctcagtttcaccaacgctggcccagagacaacgcttttgttggatgcatcattggaatttgcaaggtgaatgtaatggaagaagaaagggcccagggaattgagggcatatacaaaagattcattataaataggggctgtggaacatgatctattgaaaggagaagtgaattcctgaggggcttggtagatagaaatgaagtgataaggataacagattgcactcctctgtgaggtcaaaggattgttacagtgagagtgctccagaaggatgcaaaggtgataagaaagtaggatctttgaaagaatgaatttgcttgtggtgtagtttttggtggtgaactctgctggtatttcagttctctaaatttctacaaattcarttctatggtgtgatagggctatgaagggataacatgcattttgtgcctctacctttttcctgtttgtcaatggtatcccttttaaatgggcttgagttgccacattacttgattttggaaggcattgagaatccaatgtagtgttctacgattctggcagccctacctgcccccttctgcattaccatggggcttcaagg

SEQ ID NO: 704542 - DNA, 1958 bp, Homo sapiens
caaacactaaaggcctttcttggacacctttgaactctgtcttgcaatattcccaagtctgtaattgctggctggactctcaacttcatagaaggtcatgtcctagttccagcgccccactgtccttttcttcacccttttctgaatgacaactgtttccttccgttttggctgtggaaatagtggtttgggattttaaaaaaagataagcaatctctaaaatcccctacataattctaccatcaggatttattcctattcctggtctggccttgttggcgttatcctcctaatccagctgtggtgatgtattgtactggctgcctgccacacgcaaaagcctacctcgggacatcctgctagaggcaaaaggccaatctggcctgtttctcagtagttggattgacaagctgataccccgaggacaatgataatagtctatgtgtttatatttagaaacacacatactctacacatgtgcttatgttgtgtgcatgtatatacatatacacacgtctgtgccatatatgctgtcagctccatctgtgtgtgtgtatacatacatatacatgtgctcagattccagatgtgctataaacttccttttttagtctaatgtgaaattcatctgcctgcagcctgctttctgtccctctcagtctaaaaagatgttgttcaatcttcagtgtactctcagcactactctgcccttctttattgcattgacatgttttcactttgagaatccttaaagtactaacacaccttctaatatgcaagtggcaagcatagtaatgttaaacattatgctttgtgtttcttggttacctattcacacatcattttacttttataagcaagtagaggaaataccattccaaatagatatcaacataaaccttaaacttccagaccttgaggtttagcatggatttgcctctactctataaatcactgtcctagattctactaaatctagctaagcaagctatatcaatattttgtctgacaacacagacacagtttggaaacaagtgaaggaaaaaaaaggttacaagtcctggagattcttggacgtttctctaaatctcctatgcaattagagaaagcaaatttggatggattttaacagattaaaaagagaattgtaatgaagccaggatttcctcttgaagaatttttattcaaaaagtgtctgggataactgtgcactaagacagcaatgcgtgctttaaataaaaaaaaaaaaatagttaaagcaaaggttagggccggaaaatggactaacatctaaaatagatcttttttgataaagaggagattatttaaaggcataaataagtactgtaaatattttaaatatcaaaataagtcaattaaataactttaaacatattatctgttccaagaaatctgtgcagtccaacatgtaggctttcctctttattgtcttattttagtgctttaaatttcccaactgtttctatttgagactgtaatctgataatgagtccttttgttctggatcttttcatgtagaaaacatgtacaacagaattttggctccactaagccaccatgtttgaatctcatccatgtgccatttttcatttcagtgacaaaatgatacatacaggttattatgaatggaatttcattcaaatagcatttaaggtcattgtgcacaaaataggccttagtttgagatggagtcagaataagaaattctattttagcaagaaaaactgaaagcaatttgaggacaattaaaaatgracgtacaaataagcccctatatttgagtacaatagaagcataaaatacaagaatgatcaaaagagtgagttgggggaacttggagaatgtgagattttttatttaggcattatatcctagtgatctccattctctgctatggtaattgtctgtaaaataggaaggcctctcatttaatttta

SEQ ID NO: 704543 - DNA, 1958 bp, Homo sapiens
caaacactaaaggcctttcttggacacctttgaactctgtcttgcaatattcccaagtctgtaattgctggctggactctcaacttcatagaaggtcatgtcctagttccagcgccccactgtccttttcttcacccttttctgaatgacaactgtttccttccgttttggctgtggaaatagtggtttgggattttaaaaaaagataagcaatctctaaaatcccctacataattctaccatcaggatttattcctattcctggtctggccttgttggcgttatcctcctaatccagctgtggtgatgtattgtactggctgcctgccacacgcaaaagcctacctcgggacatcctgctagaggcaaaaggccaatctggcctgtttctcagtagttggattgacaagctgataccccgaggacaatgataatagtctatgtgtttatatttagaaacacacatactctacacatgtgcttatgttgtgtgcatgtatatacatatacacacgtctgtgccatatatgctgtcagctccatctgtgtgtgtgtatacatacatatacatgtgctcagattccagatgtgctataaacttccttttttagtctaatgtgaaattcatctgcctgcagcctgctttctgtccctctcagtctaaaaagatgttgttcaatcttcagtgtactctcagcactactctgcccttctttattgcattgacatgttttcactttgagaatccttaaagtactaacacaccttctaatatgcaagtggcaagcatagtaatgttaaacattatgctttgtgtttcttggttacctattcacacatcattttacttttataagcaagtagaggaaataccattccaaatagatatcaacataaaccttaaacttccagaccttgaggtttagcatggatttgcctctactctataaatcactgtcctagattctactaaatctagctaagcaagctatatcaatattttgtctgacaacacagacacagtttggaaacaagtgaaggaaaaaaaaggttacaagtcctggagattcttggacgtttctctaaatctcctatgcaattagagaaagcaaatttggatggattttaacagattaaaaagagaattgtaatgaagccaggatttcctcttgaagaatttttattcaaaaagtgtctgggataactgtgcactaagacagcaatgcgtgctttaaataaaaaaaaaaaaatagttaaagcaaaggttagggccggaaaatggactaacatctaaaatagatcttttttgataaagaggagattatttaaaggcataaataagtactgtaaatattttaaatatcaaaataagtcaattaaataactttaaacatattatctgttccaagaaatctgtgcagtccaacatgtaggctttcctctttattgtcttattttagtgctttaaatttcccaactgtttctatttgagactgtaatctgataatgagtccttttgttctggatcttttcatgtagaaaacatgtacaacagaattttggctccactaagccaccatgtttgaatctcatccatgtgccatttttcatttcagtgacaaaatgatacatacaggttattatgaatggaatttcattcaaatagcatttaaggtcattgtgcacaaaataggccttagtttgagatggagtcagaataagaaattctattttagcaagaaaaactgaaagcaatttgaggacaattaaaaatggacgtacaaataagcccctatatttgagtacaatagaagcataaaatacaagaatgatcaaaagagtgagttgggggaacttggagaatgtgagatttttkatttaggcattatatcctagtgatctccattctctgctatggtaattgtctgtaaaataggaaggcctctcatttaatttta

SEQ ID NO: 704544 - DNA, 2505 bp, Homo sapiens
tttaaaaatacgtcacataaggcattattaaataactgaaaagatttcatcctcttgaaagtaaatctctgctgtgaaatagggacccacctgggaatgttaatggccaggtgagaactctccaggatctgctgaatagagaactttgataagttgaataggtgctgtgaaatctaaactatatcagtaatgtttagaatatatcaagtctgaaatatatcaagttttccctagcccgaattaatagtttattcatgacatctgccatagccaaaaacttccagctgatctctaattaaaactggtcccccaccaaaaaaaatcactaatttggggtctgatttttgaagtggtatatagagctttaacagggttaaataacctgattttgactttttttttcctaagagactaaaggttttgagagtatttacaatatccatgtatatatatttaaaatacagtttataaaatattcttatccaatatatttgctgcaatttggaaaaatattgtgagcattttacttgtggtattctggaatttcactactattgcaattgcccctgatcaaaacaaatatttcactcccatttatcaaagaactgcatttcacccaatgttgtacaggagttagctgaaaaattaactagacgctaagtcttccttccaacaaaacactccattataggacatttgatcttctgctatggttggtcatcttacagctacaagaaattaatctgtgatggaatattttgaaattgtttccaaatagaaaaagaaattaaaaaaaaattgggraatcaactttattaggttctcaacactgcctgccagctcaatcttcttttttctttataactatctcaagtttccactactttcttcaagcctatactccacaacctctctttgcaaaaaatatgtgaaaacattccgccaaatttacagacatcctgttcctttcacctcttttaacttgatgtaagaagactgcatcctcttactcaaggcacagatggctaactaccctgcacattccaagcctagccctaccctcctcctcagttccctcaaagacttctatcagagtccagattggatttatcttcagcttcaacctcttccccatattgatgtctttatgtctttcaaactttaaaaatatacttgctgcacaaccactccactatcttcacagttaacgtatttgaaagaatggtgtctatcactgctcctaacttaccacctaatttttcttgaaacacattacactatgatttctcataccagtaatcaaaaaaaaaatcactgccttgccacccgataaatacaatggagacttttcaagtatctcgtcggattgtaattgaattagataaaattaatcactcagttcttcctgaagactgtacttccattggctttcgtggccatgttgccactttttcccagctcttctcccacatttccagctacttctccatgtgtcttgtgaactacttctctgcttgccttttataggctgctccatccatgtttatttcttcttctcttctcactctacaagtcattcttcaatgaacagatccagttcagtggcttagtgaaccagttgattccacaaatatatttgctgaacattctgtatgtgttaatgaactccatatatgcaactttattcctgacctcttttctgatctctaatccatattcatatcatagtcagcctatttcataacaccataagaaggacccacagacacctcaagttggtgagctcttgataaacgtaggcacagaataaagaaccaatgactgactagtgaaaaatcagtgaatttctcctgaatctgcccagaaatttcagaaacaagtgctttttctgaaaactcagaatcaaaagagaatccatacatctgaaaaagagaaaggcaaagtatatatgtaaatgtttagttgtgattaagcaagcactcaaatgaacacttaatatgcatattccatagcctgtcagttccctatgccatctcttgccagttaggtgatcatggataaaggtcttcatgtatttatccaacagtatttgttgaatgtttattatatgcctggcattgttttaatgctgggggacatattattgaacaaaattcccattatcatattcaacttcagttgcttatttgtaaaaaataaataatatctacttcatagagttttgtgacgataaaatgagaaatagtatgtgaggttcacctaacacaatgatggtaattaagcaggttctcagtaaatggtatcttgattactactagatttcacctatgcaattttaataactttgaccttagacaacaaaaagaatcctaacatcaccagggttttaagagcttcagaattgaataacaagtatcaggcttttggggacagctggttggatggacacactgaagtgtagtggagagagaaatatcactggattttggtgtttatttaagaaac

SEQ ID NO: 704545 - DNA, 624 bp, Homo sapiens
gcaggaggatcccttgagcccaggggttccggaccagcctgggcatcatagcaagactacatctctacaaaaaataatttttaaaaattagcctggcatggtggcatgtgcctgtagtcccaactatttgggaggctgaggtggaaggagtgtttaagcccaggaggtcgaggctggatcaagccatgrtcgcaccactgctctccagcctgggtgacattgcaaggcttgtctcaaaaaagaaaataaaagaagacaatgagcagtttcactaccattagacggggtgaaaaataataaataacaacaacaacagtaatatgtggtctctctgaggctgggtatggttgttcatgcctgtaatctcaatgctttgggaggccaaggtgggaggatcccttgaggacaggagtttgagactagcctgagcaacatagcatgaccccatctcttctccccaaatacaaaaatgtggtgtctctctctgtctttggatcgctctttctctctttttgtctctccccaccccatctgctgcttggtctctgagtttctgtctatctctaagtgtgtgtctctatgtctccatgtctgtctcgctgcgtctctgtatctccttttctg

SEQ ID NO: 704546 - DNA, 654 bp, Homo sapiens
caaagatagaagagaggaacggggtagtggccaactgaatagagcagggctttgagggccatcgtgagggtctgacttttacttgtgtgttaacagaaccactctggctgctctgcccacaataacgaagcaggacaccagttaagagcaattgcaatggtccaagcaagatatgacggtgtcttgcaaagggtgggaagtcagacttttcaaggtagagccaatataattttctgagagatttaatgaggagcgagagaaaarggggtcaaaaatggcttagaagtttttggccaaaacaactgaaaaaattacgttgtcattcctgagtgaggaagaccttcctatctaattgataactaatttatactcattcattgacaccaggcactgtgacaaggactagaacacaaattctcaagatattaaataactctcctccttctaggagtaagaaaattcaatagaaaagatgaataggcatttttaatgttaaaatacagtgccattaattccactaaagacctgtctttgaaattcaggggagagagaacagtgacagagctcttaactggatttggaaagaacaaaagacattctattaataataagaaaacatagactatggaaaggcatagaccattgtcttttcag

SEQ ID NO: 704547 - DNA, 1105 bp, Homo sapiens
atgagaaactctttctgagcgagagttccagagcatccaaattctactcctcttcccccctgccccaacacgtcttcgggtcatgtgttggtaggaagatgagcttctctccaaaaagggagaaaggaggccgggcgcagtggctcacgcctgyaatcccaacaccttgggaggctgagcgggcggatcacaaggtcaagaaatcaagaccatcctggccaacacggtgaaaccccgtctctaccaaaaatacaaaaagtagctggtcatggtggcgtgcgcctgtaggacacaccctatagtagcacggcgggcaccccagctactcaggaggctgaggcaggagaatctcttgaacccgggaggcggaggttgcagtgagctgagatcgcgccactgcactccagcctggcgacagggcaagactccgtctcaaaaagaaagggtcatttacggagcccctcccatgggctagattctgatgggctgataccatctggcttaatccccacaatattgtactatgatcctatgaactattcttgatatagaggtgttatttgtcttggttttcacgcaattgaaatcactgaaggctcagagagacagtaagtaaacttgggcaagatcaaagaactacatggcacagagaagagccaaaccccagagcttctgacaaaaaaagcctccacaccgtgccattttcctctgccatctcatttcacccaatgacaacgtgcctgcaaccctggctccctgccctgactctgaggttaatttccctgcagctcggagccccgccaaggctggaggaatatcccacaggctccagtgagctgcaaagcacagtcacactcccagggctattaacagcatccgcttcctctccaaggttcagggaactttatccaccaagtgccatgcaggaaaaaagaggtcagccagagaggagagggtcacacggggcaatcactaaataaggagaaaggccgcacaggaacttggcccaatttggtgtcctcaaaagacggtgctccctggccaagattttccctaacaaatatggaaaaacagtttgaggcccatgcacgaaaattgaaacttg

SEQ ID NO: 704548 - DNA, 1105 bp, Homo sapiens
atgagaaactctttctgagcgagagttccagagcatccaaattctactcctcttcccccctgccccaacacgtcttcgggtcatgtgttggtaggaagatgagcttctctccaaaaagggagaaaggaggccgggcgcagtggctcacgcctgcaatcccaacaccttgggaggctgagcgggcggatcacaaggtcaagaaatcaagaccatcctggccaacacggtgaaaccccgtctctaccaaaaatacaaaaaktagctggtcatggtggcgtgcgcctgtaggacacaccctatagtagcacggcgggcaccccagctactcaggaggctgaggcaggagaatctcttgaacccgggaggcggaggttgcagtgagctgagatcgcgccactgcactccagcctggcgacagggcaagactccgtctcaaaaagaaagggtcatttacggagcccctcccatgggctagattctgatgggctgataccatctggcttaatccccacaatattgtactatgatcctatgaactattcttgatatagaggtgttatttgtcttggttttcacgcaattgaaatcactgaaggctcagagagacagtaagtaaacttgggcaagatcaaagaactacatggcacagagaagagccaaaccccagagcttctgacaaaaaaagcctccacaccgtgccattttcctctgccatctcatttcacccaatgacaacgtgcctgcaaccctggctccctgccctgactctgaggttaatttccctgcagctcggagccccgccaaggctggaggaatatcccacaggctccagtgagctgcaaagcacagtcacactcccagggctattaacagcatccgcttcctctccaaggttcagggaactttatccaccaagtgccatgcaggaaaaaagaggtcagccagagaggagagggtcacacggggcaatcactaaataaggagaaaggccgcacaggaacttggcccaatttggtgtcctcaaaagacggtgctccctggccaagattttccctaacaaatatggaaaaacagtttgaggcccatgcacgaaaattgaaacttg

SEQ ID NO: 704549 - DNA, 1105 bp, Homo sapiens
atgagaaactctttctgagcgagagttccagagcatccaaattctactcctcttcccccctgccccaacacgtcttcgggtcatgtgttggtaggaagatgagcttctctccaaaaagggagaaaggaggccgggcgcagtggctcacgcctgcaatcccaacaccttgggaggctgagcgggcggatcacaaggtcaagaaatcaagaccatcctggccaacacggtgaaaccccgtctctaccaaaaatacaaaaagtagctggtcatggtggcgtgcgcctgtaggacacaccctatagtagcacggcgggcaccccagctactcaggaggctgaggcaggagaatctcttgaacccgggaggcggaggttgcagtgagctgagatcgcgccactgcactccagcctggcgacagggcaagactccgtctcaaaaagaaagggtcatttacggagcccctcccatgggctagattctgatgggctgataccatctggcttaatccccacaatattgtactatgatcctatgaactattsttgatatagaggtgttatttgtcttggttttcacgcaattgaaatcactgaaggctcagagagacagtaagtaaacttgggcaagatcaaagaactacatggcacagagaagagccaaaccccagagcttctgacaaaaaaagcctccacaccgtgccattttcctctgccatctcatttcacccaatgacaacgtgcctgcaaccctggctccctgccctgactctgaggttaatttccctgcagctcggagccccgccaaggctggaggaatatcccacaggctccagtgagctgcaaagcacagtcacactcccagggctattaacagcatccgcttcctctccaaggttcagggaactttatccaccaagtgccatgcaggaaaaaagaggtcagccagagaggagagggtcacacggggcaatcactaaataaggagaaaggccgcacaggaacttggcccaatttggtgtcctcaaaagacggtgctccctggccaagattttccctaacaaatatggaaaaacagtttgaggcccatgcacgaaaattgaaacttg

SEQ ID NO: 704550 - DNA, 1602 bp, Homo sapiens
atcgttatgaccttccatttattcagcctctcttctgcttatctggcttttctcttttgcgttatgaatttgcttttttgagtagccccattgtctcattttgtcttgcctattgtatgctgcctttaacatcagtaacatgtggcgttcataagtgtctgtttgccaaaagggggatgtatcctggaatacacctttaaagtccagaaggcaagcaggcaaaagatggtttgccaaaagggggatgtatcctggaatatacttttaaagtccagaaggcaagaagaggcgaaatatgttttcccaagtgatgacagtgaaaaataattaggaaatctatgttgataaagttaaaaaaaaacatagatattagttaaagtaagcttagcacastcttacattaaatatggggaaacagagagctacaggatttaggagaactatccaatattctatagccagcaacagagattaaaatccagaaaaacacccccatcccatctccctggtataacaaaacattatattctaaaaataaaataataatggtggtctcattacactcagtttttagtgtggccaggtcactatagaatttggagaaagtggcctagagtcacaatgcttgaattcaaattctggctttactacatgccagaaatgactcttggcaaatctctctgagcctgtttctgtatttgcacaaatgtgaaactaatcatacctatctcattagattgttgaggggattaaatgaaacaattcacatcagaacagtcccaggtacatggaaatacatctaatatactgcttatctttaaaatatattatttcacttacaatacatttgcataccaatccccttgctaatcattaacacacacaaaaggtgcaatccatgtagttaaaaagtgtataaacttgttctgctgattatcggttcttttgtgaattcaataattagctcatgtctttcctttcactttgtctcaggcatagtgtttattaaattccataaacatgccaataaacctatctagaacatgcttgagaatttcctcaccttctcattgccaattatcttcctcttctcaaaaaacaatcactgaaaatccaaaactctggataacagaatatcttaaataactttatcctcaaaccctcaattccaaaaatcatattttatattgaacacaacagtccagcaatactattcccttaattctcaacatttgttcttttcatcagtaatattgaaattcttggttgctttctgtttccctctattgtcagccctccctctctatatgttagaatcccacagctagacatttcaaacatatgtttcaaccacttcggtatttgttgaacgtttagtctgcttccaggaattattttcatttcaaaaggccaacatttcacattttgccatttaacttttaaaataaatagctatgaggtataaaaggatcccttcgtatttaataactactcactatttaaataatcgcctttctagcagtcaaacaaaatatagatgtgttccttttcctataagaatgaaatattatactgtttggttatttttagcatctaataacc

SEQ ID NO: 704551 - DNA, 1037 bp, Homo sapiens
ttatcctatctcctgccctcccattaattcaccctgtattttggagcaataaccgtattaacataattgacatctacaaaaattaagcccatcttttagaccatcaaccaagaaataagtgactgattttactgtgtttgcatttacagtagatcctcacaaaggaagtatttaaagcctcttacacatatttttccattctatcctttctctcttctaaatagatgacacttttgtttgttttacgttttataacagataagcattaaatttttccaagtagttttaagcattttagcttctccataatataacatttatggtaataaaataagtatttacattcaaaacattaacaagctgttattttacagaactgctaaatgtataatctgaaaaatcataactgaaatgctttttatattattgtcaaaattggttggcaataaaccatactagcacaattaatgcaaaaatataaaatgtagatatttttctaaattgcttttccaaaagtatgtctgaaaggacaattaaatgtggtatttgaacaccatgaatcattaaataaattcaaagtattgcaagaaatatagatagacaattatgtcggtaaagcttaaatgatttaagaagtagaacagtatcaatatcaacttctcttttaataactcaatttaatcacaaaactttttcagaactgttccaactcccatataaacttaaggtggcaaaatttaaactattttaatattcccgtctgtttagtcctccatattgacaataaagcataattatttaaggcataattatttattgatttgtaattacaatagtaagaaaatgataactggagtatagtactgatttagagggraaaaaaacctagatttcaccctataaatattcatatattctagacaagaaacatgagcctaaagtttatataccatgctaacaatccaaacttgcaattcaaataaaccatctgccgtcagtctaatgatccatctgtgcaggcatttaaacactgacaa

SEQ ID NO: 704552 - DNA, 669 bp, Homo sapiens
cagtctcctgcatagctggttctgcatgaactctttccctattgcagttcccctgtcttgataaattagttttgtctaggcagcaggcaaggtgaatccattgggcggttacatattggggaggggggactgtaagggaatgaaatcctgagcattatcctcaaaggagggaggggccttatagacttaggcctatctagaagcgcctctctcctcagagagtaaaacctcactgtttctcagagggctgagaggcttgaaggaagagtttgggcagaaactctgctttgaatagaagcagcagatccagttgagagaaagaggttcacaaattccatttcatggcttttttttttttaaagacagattttcactcttgttgcccaggctggtgttsaatggcatgatctcagctcactgcaacctctgcttcccaggttcaagctattctcctgtctcagcctcccgagtagctgagattaaggcgcatgccaccatgcccggctaatttttgtatttttagtagagacggggttttcaccatattggtcaggctggtctcgaactcctgacctcaggtgatccacctgcctcggcttcccaaagtgctgggattacaggcaagagccactgcgcccggcctcatgtcttttttatacttaagcacca

SEQ ID NO: 704553 - DNA, 616 bp, Homo sapiens
tgagaagtgaatgaatagatgaatacatgagtcagaaaytgacaacggtgacacatatggagcctctgtgctgggcaccggggctaggcccttcctatgcactctcatttaatcctcgctagtatccttccaattcacagatgaggctattagattcagagaggttcagcagcttttgcccagagtctgggttcaaacgcaaacagtccaactccagagccctccctctttaactgctgcttttaacacattcaggatggacgcgtggaagatcgcttgcacgcactgcagtgggctcctctctttctctgccctggaccaggtttctctctctcagtcccgccggtttggacagttctcggaagcagtagagatcgatgtgcggaggctgccctctggtggcacaaacgagtacagcagtatatgtgccctctggcgcccccaggtgggagctgggaagttgagaagagagcaagctgcagcccacagcaggggggtagcctcagtccccggcacctggagaccccctgctctggccactgcctggtgccccccgaggtgccagctgaggctgcccccgaagaatgccagctgccggagccccccgcctcccact

SEQ ID NO: 704554 - DNA, 658 bp, Homo sapiens
gcaggctgaagggctcctcaggcgttgccagagcagactaccaggccgaagaggcgctgagagagagcgagggccaccagcaccttgtcacctctcactgggatccacgttctagagtctgaatctcagttggatgtgagacttctgagctcatggtacaaacgaggcttactggcaggtcacttctgattaggaagagtgacttcaacgtctgtcagtatttccgtttcctccagaagagcaaatacagcataaagtttcctattgctgttcttagaaatgtatcagaaattgagcagctcaaaacaacacaaatgtattatcttacactctgggttgtcacaagtctgaaacgggtctcccaggactgaagtaaaagtgttggcagggctgggtttctttctgggggctctaggggagaatccttttccttgacccctccagctgcccacgtgccttggcttgtgatcctctccctttcccaccagacagcaccagacagcagcagctgtgcaagctcttccagttcttttcatgacacattrctctgacctcctcttctccttccctcttccacattcagggcccttgtgattcccctggatggaccccaataatccaggataatcctctggcaactttaattccatctgctact

SEQ ID NO: 704555 - DNA, 647 bp, Homo sapiens
tgttcacttgatttcagcctccaatgattgttttctttattgacagcttattaatgcatataacaattatcttaaagaaaccactcagcattttagttgttttagccagmaggtcagtcttggtatttaattcattacattcctggaaatgacatccccattagacttttaaaaagttttatttactatactggatttttctataacccaatttaaaattaaacttcagttgctagtagtacacattgagttggaatatatattctctgtgatgtatgtatctagctcttttataacttaagatctgagagtgttgcacaaattttacataatgacagcatttggtgtttaaaaacagtcactatttccaatacaataaactgtctctgtaataaatttgtatttgcaaattgcttcaatccgtgtatatcttcagaggataggctcccaataactagatgttatggtccagcctcttgcaatcaggggacagcttgggtcaaatcaagaccaaactcttttggctgaataaacatgggcctagagagtgtatttgtaggtgatgtgggccacttccggctccacttgaatcaattcaagcagatgtataattgacaaccttaaagtttctcaaggaaggaaactgg

SEQ ID NO: 704556 - DNA, 647 bp, Homo sapiens
tgttcacttgatttcagcctccaatgattgttttctttattgacagcttattaatgcatataacaattatcttaaagaaaccactcagcattttagttgttttagccagaaggtcagtcttggtatttaattcattacattcctggaaatgacatcsccattagacttttaaaaagttttatttactatactggatttttctataacccaatttaaaattaaacttcagttgctagtagtacacattgagttggaatatatattctctgtgatgtatgtatctagctcttttataacttaagatctgagagtgttgcacaaattttacataatgacagcatttggtgtttaaaaacagtcactatttccaatacaataaactgtctctgtaataaatttgtatttgcaaattgcttcaatccgtgtatatcttcagaggataggctcccaataactagatgttatggtccagcctcttgcaatcaggggacagcttgggtcaaatcaagaccaaactcttttggctgaataaacatgggcctagagagtgtatttgtaggtgatgtgggccacttccggctccacttgaatcaattcaagcagatgtataattgacaaccttaaagtttctcaaggaaggaaactgg

SEQ ID NO: 704557 - DNA, 847 bp, Homo sapiens
ggattcgtgctgtagaccctgattcatgatttagatgtttcgcaggagcttttcaggatagagatggttcattgaaatttcacgtggatttaaggctcattaaggtgttggggaagccggatgccactctgtcagtataaatyccagtgaggctaatttagtggagctgtagccagctttcatgttttccatcagccacacttaccttcatctcttcccttctcctttctaaaatactgtatcagaaagtgacattttttttctcctaggagaagaatcgctcaaagatgatggtcttccttctttctaccatggtatttgtctttaaagattaggcgatgtggtgggtgggcatggtggctcatgcctgtaatcccaacactttgggaggctgaggtgagagggtcagtgaggccaggagtttgagaccagcctgggcaacatagtgggaccttgcctttacaaaaaatgtaaaaaattagccaggtgttgtggtccatgccggtactcccaggtacttgagaggcaagaggatcgcttgagcccaggaggttgaggctgcagtgagctatgattgtggcaacagagggagatcctgtgtccaaaaaaaaaaaaaaaagagagagagagaaagattaagtgacatggatacaaaggatgggaaaatcctgcaaagaaagattgaagtcattgttgatttattttttctttccctcattctttcttcttttcagtccctgtgggttctccctgagatctctcttgggaattcctctcattcatttcttcccttgtgttactgttctaattcaggcccatagtatcccttgctaggactggtgcagta

SEQ ID NO: 704558 - DNA, 1928 bp, Homo sapiens
aaaacacagcacaatacccatgccctgctgcaaacgacatgttagggaagacctgatcaaaagttttttgcaggaattttccgggcgcggtggcttatgcctgcaatcccagcactttgggaggctgaggtgggcagatcacttgaggctgggagtttgagaccagcttgactgaagattatggtgagctctgacattgaggtggtgcatgaggtccagttcctggcagaggggagaatatgggaggggagaggaaggaactacttgaagaactgaggaaggcaggtgtgacctgagaaaggagaacaaggaggggtggcaagagagggacagaggtgagcacagaaggaagaaagatgaatgggcctcaggtgatgccagagaaaactccagaagcccacgaagcacattccagcaagctctgtagggacattgtgcccaagatttccakacccagcccaggtgtcggccacaagaaaaggccgtggaaagacagtctcagatggaggggccaggaggatacaacatccccgcaacgccattccatcattccatctgcaaactccagccagcagaggcaagttagagaaagtagcacaagagggggcaaacatggcagcaaagggtggtgataagtaagaaaccccataaacaaaggcattcggtccaataaactgtaaatgggagtaatacaatcaatgcaggctaggtgcggtgtctcacgcctgtaattccagcactttgggaggccaaggtaggtggattgcttgagcccaggagttcaagacgagcctgggaaacatggtgaaaccccatctctacaaaatatacaaaaattagccaggagtggtggcgcatacctgtgctcacagctactaggcaggctgaggcaagaggatcacttgagccagggaggtggaggttgcagtgagctgagatcgtgccactgcactccagcctgggcgacagagcaagaccctgtctcgaaaaaaataaatcaatcaatcagtgtaaatgccaaagcaattgttcttaaaaggtaccaaaaaaaaatctcaatatactaaattgtgatttaaaaacaatctttctaaaatcccaaagtcacagaaataggactggtaaaggggaaaagtgaatgcatgctaaatgtttaatcacacatgggttctcctcaataggaaaaaatgagagtgagaacctcctgagtgctagcaagcagtgagggtgtgcttaaaacaaacaaacaacaaaaaagcataaaagccaaaataaagaggggcaaaaaaagacagtatgcatataaggtagaatagtacactgcattaaaaatcatgttctaggccaggcgtggtgtctcatgcttgtaatcccagcactttgggaggctgaggtgggtggatcacctgaggtcaggagttcaagaccagcctggccaacatggcaaaaccccatctctactaaaaatacaaaattaaccgggcatggtggcaggtgcctctaatcccagctacgcaggaggccgaaacatgagaatagcttgaattctgggaggcagaggttgcagtgagcagagatcacgccattgcactctagcctgggtgacagagcaagactctatctcaaaaacataaaataaaatcatgttctagatgaaaacctaatgacgtgaaattatttctataatttcaacttttattttagattcagggggtacatgttcaggtttgttacatggatacattgtgtggcaatgaggtttggtgtacaaatgatcccatccacccaggtagtgaacactatacccaacagtttctcaacacttgcttccttcccatcctcccctagatagagtctccatctttatttccatgtgtacccaatgtctagctcacacttatcagtgagaacatgtggtatttggtttt

SEQ ID NO: 704559 - DNA, 586 bp, Homo sapiens
tgcattattaatttttaggtataacattctatatgtcattagatataaattcttaatttgtattttaaaaatccatacacttactttgttacactgtaagggtagacttataaacctctccttgtaattccrtcaaattttgttttatgtattttgaggccatatttttaggggtatctaagtttataaatttttcctagtgaattctagttcttttaccattttaaaataatccttttagacctgactaatgctttttttactttaaggccttttttgtgttttaatatagttaataacctttcttttcatcaatctttgtctggcacatctatttctccacttttactttacacctttctgttttccatattgtttaagaattggtcttgctaaaagcataaagtcatttttttctttatttaatctatcagtctctggttttattcagaaaactcaatttgtttacattttttgtagttaactaacctatttggaattgtttctgccatcttaatttgtgctttctatctttctagctttttacttcttttcctatcttctatagcagggattggcaaattac

SEQ ID NO: 704560 - DNA, 632 bp, Homo sapiens
tccagtatttcaggtcctacgtgtttttatacatgtgaaatgtcattgctattattgttgtcatccattgtcaatcctgttccaatttatccatatgtttactaatttatttgctcaccattctgctttcggttcacttcttcattctggattcagttttctccagataaagtgcattcctggaagttctttagctgggactctgttagttataaattccctaatgctttgtttttcatcctttctccctaattctygtatgacagtttagttaggtagaaaattctattttctctcaacactttgaagatataattccactatcctttggtcatcattgagaagtggcagccaaattaattgtcattccttcataggacatcttacatttctggctactgttaaggtattatctttgtacttggcattcttacatagcttactctaatctatccagggatgcatttccttatgtctaccctaatatttaggactacattttccttgaatctgagagctcagaactgttctccattttgaaaattctcagtcaccatctctttcaatattgactcactctcattctctcctttctctccatctataactcctattgtgcttctattagacct

SEQ ID NO: 704561 - DNA, 1330 bp, Homo sapiens
attatataaattttatgcaaatgtaaacacattaacaagacttgaaacttcatctactaactgtattttaaactatttcccaataattaatgtgatgagattaacatttgatatataccttaaagcaagaactcttactatgtccaaataaccattgctttctttcccagcatttttacaggatgaattaatacttgagtctattacatgatatgaaaattagcttcagaggtttaaacttaacacactatacagtggttatacattttattcattaagaatttcctagacaatatagttgtactattttacaacattattaattctaaagggaaatgaaatagtataatcattcttatggggtatgttcttgatattgaaaaagacagggttacataataagtctatgaagttaaatatgggttaagggggaaaatgctttaaacagcaaaagcaaaaggtgaaaaaccacactgttcatataccaccctatttatgtaatataggtggaagcaactactaggaaaaaatgcaggtatcttataatcagacataagcatctagctttcaaaaagccacagacaattacattttctaaacttatccagatttctgccactatctatcaagtgataaatgatgattcaggggctaagggagtaatacaacagaaagttttaaacttcccccaagaggaaggaaacaggatcttcttggtatacagtattcctaaatgcttttaaaagtgcacaagtgcacgtgtgtgcactcatacactaaaacatttaacacataatctggaatatcccatctggctagagaagaagggctgaaatgatcacaatgaccatgccttgactattccctgacttctaagggtggctttaacctcaattaccaataaaaattttcgcattcttctttctgtttccacttaattacgtaagcactaccttcttatggtagaagtgccactacagagatccattcctcagtgaattctctacccttaactaccatagcagactatttgtttttctttggtagtcttataaaaataggtaactatttatatatttttttatatatatacttttttctgtccagaactgtctatagtactttatatatgacattcattmattcactaacaatgttaaacaccttttaaatgctattgcattccttttacagataaacaaactaaggctcagagattaaggaatccttccaaagtaatacagctagtaaacaggttggcttgacacccaatcttccacgattaaccagtctactgtactgtctcataaatttattgttaaacattaat

SEQ ID NO: 704562 - DNA, 634 bp, Homo sapiens
actggctatccatcccctgagaatatcaatttccttttctaattgagcctgtaactccttctttttaatccttctctggagatttataactygtaatgaatgttaagcatgtagacgctatcactgaggtacataaatataatttattttagaattttgcatacatatatattaattgacacacacacaaacacacacatacgcatacatagagagagagagagattgttcttgggatcgtgacataaatttcccctaccgctggatctgcaggtttattcactaatgggtttccagtaggcaaaacaatgagcttggaacatactgggaaagtagtaaacatttgttgaattaatatcttaactaataacttatgttccctcctactcttcacttacttctagaccactttacttcctctctcctcccacaaaattacaacttcttataagtacatgctttgtgactataccattagcttcccttccattttattcatatactggcctcttcatcactctcatcatattttgaataacatagcacttgacttgctgtcatccttgtttgcaatgtggatattgaatccaagcagaaagtccagccaacaccctagcctcacagctccttcctc

SEQ ID NO: 704563 - DNA, 1214 bp, Homo sapiens
taatgtagtaattgctatatattctatataactatagctttggtttttctgtgccaaagctcactgtctcaagagctgattgatggttaacacttattgaatatgtaatttgtgccatcattttacctataaaatctacatagcttactggaatctgattgggtgggtaccattattatctttatttcacaactgagaaagtggagcctgaggaagtaagttgcgcaagaacagcccagtggtcagtgacagggtgagaacgcaggctgcctctccaacctcggtcttccttcttccatgcccttggccatttccatgcctctattaatctacttagtcccttcgagtttctaccacagtagtctccaaactattttttataaaaatgttttaagcaattactactgtgctggtattttatgtatgtaatactttatatatacacctgaaataaaaataatgacagaaaggtacaattagcaatatttaaaattccatgtttcttttatagcctctaattttgtttgtttctgaccaaaaaataacaatgacacaaaaatgacagttcagtaagaaaagatgactcaatatgcttatattttcaaggaattctgatttaataattttaattaatgactgtaattcagtgattcacaagtatgatctatgattggatttagcagctatcagaactgcaaatgatcccttgacaaaaaatacaaaactcctaaaggaaaaaatgtatgatgatctgtacttaccaatgtgcaggctgaactttcaaattcatccactaatwatgcaaaggaatttttgttaaaattttgttagggtttcctcttgttctgaggtcaatcagttggttttgcaaactaatcagaagttttcaaacattttaatactatgtggaaaattctttttctacatgtcttaaaggttcagatacaaggacttttaaaggttactgcccttatgtagatttggtagaggaaacactaaaaatatgtgttatcaaatgttctatatcataagtttctttcgaaaatggtgccttttttgtttattgttaaaatgtcacctttattttgataggatgattaatcatattattttcaaaattatctgcttacagttcactgttggcaaatgcctattatcacaaaaaaggtcaacaaattaggaatatttgtgttttggggagaaaaagcataaca

SEQ ID NO: 704564 - DNA, 1214 bp, Homo sapiens
taatgtagtaattgctatatattctatataactatagctttggtttttctgtgccaaagctcactgtctcaagagctgattgatggttaacacttattgaatatgtaatttgtgccatcattttacctataaaatctacatagcttactggaatctgattgggtgggtaccattattatctttatttcacaactgagaaagtggagcctgaggaagtaagttgcgcaagaacagcccagtggtcagtgacagggtgagaacgcaggctgcctctccaacctcggtcttccttcttccatgcccttggccatttccatgcctctattaatctacttagtcccttcgagtttctaccacagtagtctccaaactattttttataaaaatgttttaagcaattactactgtgctggtattttatgtatgtaatactttatatatacacctgaaataaaaataatgacagaaaggtacaattagcaatatttaaaattccatgtttcttttatagcctctaattttgtttgtttctgaccaaaaaataacaatgacacaaaaatgacagttcagtaagaaaagatgactcaatatgcttatattttcaaggaattctgatttaataattttaattaatgactgtaattcagtgattcacaagtatgatctatgattggatttagcagctatcagaactgcaaatgatcccttgacaaaaaatacaaaactcctaaaggaaaaaatgtatgatgatctgtacttaccaatgtgcaggctgaactttcaaattcatccactaattatgcaaaggaatttttgttaaaattttgttagggtttcctcttgttctgaggtcaatcagttggttttgcaaactaatcagaagttttcaaacattttaatactatgtggaaaattctttttctacatgtcttaaaggttcagatacaaggacttttaaaggttactgcccttatgtagatttggtagaggaaacactaaaaatatgtgtyatcaaatgttctatatcataagtttctttcgaaaatggtgccttttttgtttattgttaaaatgtcacctttattttgataggatgattaatcatattattttcaaaattatctgcttacagttcactgttggcaaatgcctattatcacaaaaaaggtcaacaaattaggaatatttgtgttttggggagaaaaagcataaca

SEQ ID NO: 704565 - DNA, 1438 bp, Homo sapiens
tgttgccaattttctttgacctcctatagcatctacacactgtttctagttttatcccttgggtgatcacaataaacctaatgcattctatttcctctgcctagaatgcttttttcacctttacaagatacattcatgctaatttatttatttttttatttatttttgagacagagtctcactctatagcccagtctggggtgcagtggtgctatctcaacccactgcaacctccaaactccatctcctgggttcaagcaattctcctgcctcagcctcctgagtagctgggtttacaggcccgcgctaccatgcctggctaatttttgagtttttagtagagatggggtttcgtcatggtggccaggctggtctctaactcctggcctcaagtgatccacctgcctcggcctcccaaagtgatcggattacaggcgtaagccaccatgcctggcccatattaatcttttaaaataaaataaaattcgatctcttccaaaagaaaaaaagcagacttcagccaaaactgtscctcaggaggagtcaggttgagatgcctcttgttgcccctgcagaccctgaacactggtactgctgccaccaccggactggattctaactcaccctacttctgtgcattacctactcctgactcagagtcccagggaagggtctctggttagccaagtttgggtcagaaccagcactacggcacccagggttaggaaaagtaagtgcctggctttccagtgggagcacattttctaccaagattcatacaaactctctaccccagaatagggtgctgatgctaagtaggcaagaatagaaaccacaaatgtctactctccatctattctatttttccttaaaaatttcaccgggagtcaatgttgattaccttttcagtatttgaaatgataatattattttttgcatcagattgattactaaagtaactacattgatagatttcctaatgttcagccatcctcccattcttgcaataaaattcatttggtggtgttactgtattcttttaatatacagctgcattctatttgccaatatttaggatttttcatggataattcataagtgagattggcgtgtataatccttttcaggaattagtatctaaattttgattccattgtaaatagtttggatgattttcttccctctctattctctggagcagtttaaatacttggaggctgggcgtggtggttcatgcccgtaatcccagccctttgagaggctgaggctggcagattgcttggacccaggagtttaagactagtctgtgcaacacggcaaaacctcatctctttaaaaaatacaaaaaaattagctgggcgtggtggttcgtgcctgtagtcccagttactcaggaggctgaggtgggaggatggcttgagcagtggaggtggaggtt

SEQ ID NO: 704566 - DNA, 1438 bp, Homo sapiens
tgttgccaattttctttgacctcctatagcatctacacactgtttctagttttatcccttgggtgatcacaataaacctaatgcattctatttcctctgcctagaatgcttttttcacctttacaagatacattcatgctaatttatttatttttttatttatttttgagacagagtctcactctatagcccagtctggggtgcagtggtgctatctcaacccactgcaacctccaaactccatctcctgggttcaagcaattctcctgcctcagcctcctgagtagctgggtttacaggcccgcgctaccatgcctggctaatttttgagtttttagtagagatggggtttcgtcatggtggccaggctggtctctaactcctggcctcaagtgatccacctgcctcggcctcccaaagtgatcggattacaggcgtaagccaccatgcctggcccatattaatcttttaaaataaaataaaattcgatctcttccaaaagaaaaaaagcagacttcagccaaaactgtccctcaggaggagtcaggttgagatgcctcttgytgcccctgcagaccctgaacactggtactgctgccaccaccggactggattctaactcaccctacttctgtgcattacctactcctgactcagagtcccagggaagggtctctggttagccaagtttgggtcagaaccagcactacggcacccagggttaggaaaagtaagtgcctggctttccagtgggagcacattttctaccaagattcatacaaactctctaccccagaatagggtgctgatgctaagtaggcaagaatagaaaccacaaatgtctactctccatctattctatttttccttaaaaatttcaccgggagtcaatgttgattaccttttcagtatttgaaatgataatattattttttgcatcagattgattactaaagtaactacattgatagatttcctaatgttcagccatcctcccattcttgcaataaaattcatttggtggtgttactgtattcttttaatatacagctgcattctatttgccaatatttaggatttttcatggataattcataagtgagattggcgtgtataatccttttcaggaattagtatctaaattttgattccattgtaaatagtttggatgattttcttccctctctattctctggagcagtttaaatacttggaggctgggcgtggtggttcatgcccgtaatcccagccctttgagaggctgaggctggcagattgcttggacccaggagtttaagactagtctgtgcaacacggcaaaacctcatctctttaaaaaatacaaaaaaattagctgggcgtggtggttcgtgcctgtagtcccagttactcaggaggctgaggtgggaggatggcttgagcagtggaggtggaggtt

SEQ ID NO: 704567 - DNA, 1438 bp, Homo sapiens
tgttgccaattttctttgacctcctatagcatctacacactgtttctagttttatcccttgggtgatcacaataaacctaatgcattctatttcctctgcctagaatgcttttttcacctttacaagatacattcatgctaatttatttatttttttatttatttttgagacagagtctcactctatagcccagtctggggtgcagtggtgctatctcaacccactgcaacctccaaactccatctcctgggttcaagcaattctcctgcctcagcctcctgagtagctgggtttacaggcccgcgctaccatgcctggctaatttttgagtttttagtagagatggggtttcgtcatggtggccaggctggtctctaactcctggcctcaagtgatccacctgcctcggcctcccaaagtgatcggattacaggcgtaagccaccatgcctggcccatattaatcttttaaaataaaataaaattcgatctcttccaaaagaaaaaaagcagacttcagccaaaactgtccctcaggaggagtcaggttgagatgcctcttgttgcccctgcagaccctgaacactggtactgctgccaccaccggactggattctaactcaccctacttctgtgcattacctactcctgactcagagtcccagggaagggtctctggttagccaagtttgggtcagarccagcactacggcacccagggttaggaaaagtaagtgcctggctttccagtgggagcacattttctaccaagattcatacaaactctctaccccagaatagggtgctgatgctaagtaggcaagaatagaaaccacaaatgtctactctccatctattctatttttccttaaaaatttcaccgggagtcaatgttgattaccttttcagtatttgaaatgataatattattttttgcatcagattgattactaaagtaactacattgatagatttcctaatgttcagccatcctcccattcttgcaataaaattcatttggtggtgttactgtattcttttaatatacagctgcattctatttgccaatatttaggatttttcatggataattcataagtgagattggcgtgtataatccttttcaggaattagtatctaaattttgattccattgtaaatagtttggatgattttcttccctctctattctctggagcagtttaaatacttggaggctgggcgtggtggttcatgcccgtaatcccagccctttgagaggctgaggctggcagattgcttggacccaggagtttaagactagtctgtgcaacacggcaaaacctcatctctttaaaaaatacaaaaaaattagctgggcgtggtggttcgtgcctgtagtcccagttactcaggaggctgaggtgggaggatggcttgagcagtggaggtggaggtt

SEQ ID NO: 704568 - DNA, 1438 bp, Homo sapiens
tgttgccaattttctttgacctcctatagcatctacacactgtttctagttttatcccttgggtgatcacaataaacctaatgcattctatttcctctgcctagaatgcttttttcacctttacaagatacattcatgctaatttatttatttttttatttatttttgagacagagtctcactctatagcccagtctggggtgcagtggtgctatctcaacccactgcaacctccaaactccatctcctgggttcaagcaattctcctgcctcagcctcctgagtagctgggtttacaggcccgcgctaccatgcctggctaatttttgagtttttagtagagatggggtttcgtcatggtggccaggctggtctctaactcctggcctcaagtgatccacctgcctcggcctcccaaagtgatcggattacaggcgtaagccaccatgcctggcccatattaatcttttaaaataaaataaaattcgatctcttccaaaagaaaaaaagcagacttcagccaaaactgtccctcaggaggagtcaggttgagatgcctcttgttgcccctgcagaccctgaacactggtactgctgccaccaccggactggattctaactcaccctacttctgtgcattacctactcctgactcagagtcccagggaagggtctctggttagccaagtttgggtcagaaccagcactacggcacccagggttaggaaaagtaagtgcctggctttccagtgggagcacattttctaccaagattcatacaaactctctaccccagaatagggtgctgatgctaagtaggcaagaatagaaaccacaaatgtctactytccatctattctatttttccttaaaaatttcaccgggagtcaatgttgattaccttttcagtatttgaaatgataatattattttttgcatcagattgattactaaagtaactacattgatagatttcctaatgttcagccatcctcccattcttgcaataaaattcatttggtggtgttactgtattcttttaatatacagctgcattctatttgccaatatttaggatttttcatggataattcataagtgagattggcgtgtataatccttttcaggaattagtatctaaattttgattccattgtaaatagtttggatgattttcttccctctctattctctggagcagtttaaatacttggaggctgggcgtggtggttcatgcccgtaatcccagccctttgagaggctgaggctggcagattgcttggacccaggagtttaagactagtctgtgcaacacggcaaaacctcatctctttaaaaaatacaaaaaaattagctgggcgtggtggttcgtgcctgtagtcccagttactcaggaggctgaggtgggaggatggcttgagcagtggaggtggaggtt

SEQ ID NO: 704569 - DNA, 427 bp, Homo sapiens
gcttgggcgacagagcgagactctgtctcaaaaacaaaaacaaacaaacaaaaaaaccacaaaaaacaaacyttcatcatcctgtgtattactatatctttttttaatgtactgattttgccctatttgaagcagattgacagtatacatcttggccttaatataagagttatcaaacttttatatttttataacttaaaatataagagttataaaactagttttctttataagagttataaaactagttaaactgcttttcatagttcttttataacagagttatgttaaatgttactttaattttcaagggaagacttggaaggaccaaacccctaaaaatgatttaaaagtctaggaagcaggtcccaagtaattaaactgtcatgacatttccttcccatgctttcaaaagatgtttgataaa

SEQ ID NO: 704570 - DNA, 774 bp, Homo sapiens
tagccgtttcaagacgccctagaaacagatgccacggactgaaccccggaggtggaggttgcagcgagccgaaattcccccactgcactccagctctgtacgacagagtaggattttgtcttaaaaaaaaaaaatcaaagtgctggatagtgcatggctcatgagaagggcctggcactatatacatatttgtggaataaaaaacaaggacctaatggtcacagaaatagtgtcatgaccaaaaatgtaagattaacttaattctttgyacatgatgttcacagataagctaaaacctctgctaaagactcatatattcatttccttgatgggaaaactatggccctgattgatagatgaaaagtgtattccaaaaaagagagtgtctcataacgaagcagggctccctgagccaactctccttctgttgtctttgtgcacagaatttagagcctcaagaaagcattggatgtatgagctcagtgactcacgaatgtctcatttctgggaacacagacaactgatgggctatattcgttttcctctgtagcactagacccagaactagcaaatttttatctgtaatgaattctcaattaaccctaggtcttggtatcaggaaatacagggaaaataaaaatctacccataattcaaagatctcaatcaaatcagtaatttcaacctccagaaagttatcttaatagttctttttattcccaagcacagtgcacaataaatatctgttgattatttaaaattaatccctcttcca

SEQ ID NO: 704571 - DNA, 1151 bp, Homo sapiens
aatgaacatgggagtgcagatatctctttgacacatggatttcatttccattggacatatgcggtatgctcagagatgagattggtggatcatatggtacttcttttcaaatttttttgaagaatctccatatgggtttccataatggatgtaccagtttatattcccatgtgcattgttttctgacattgataaagctgtagatctattcatttcacaaacctttattgtgtgcttactacacaaaagcataatgggaggtgcagttgatacaaataaaaggcacggtcttcctcagaagcagatatgataactatttattaaacaaagatggcagaggtgggcaactgaccacatgtgagaagagtaacaaggagagtggaatctaggatgatgtatattttggcttgggctattgagctgatggggaatatatattttttgaagtggaatatactgtcaccttatttctaagtagggtcaagttggaagccaaataaaactttccaatattggttcttctagcacgttaataaaatgtactttgtgattatgagcagctggtttgaagactgattcatttctactcctgttaccttgataaataagaaataaatttcatggacaagaactcatcatttgaaatagatggtaacagttgattacatgaggtgatttacaaggaggtccagcacatgcatgtagtgtgctaatccttgccacgtcagttttctgttaattaatacaaatgttgttgtgtagtttttggtattctgactcaaattgagaaaatgtatacacttttatatacatgtattaatgtaaaacttggacctggaaaagcagaggtttctaataaattagccaacattttctttgaagaattcttggtaccctgaagtactttctctaatgattgaattgttattgttggagaccaattctccacagactttttgtatttctgtatctcttgtgagtgagcgactaactgtccttcattctgaactatcttttcagggacatttgtgttgtgaacagtcttggaacatagagccagtgtctctctctggagcaaaggccwggcatgctcactgcccattataaaggattcagattccctaaattcaatattcctcttctatagcaca

SEQ ID NO: 704572 - DNA, 714 bp, Homo sapiens
gcagtgagccaagatcacaccactgcactctagcctgggcgacaaagcaagagtccatctcaaaaaataaaaatttytttaaaaaaagataatggcataaagaacagagggacaggaggcaggctgctaccctcagcgtttgagtttaaaaagcctaggtgggccccagcctaaaaacactgggaagtaattttcatatcaggcagaggttcttttttctctcctgaagatgagatgaagtttgcttcaattagaagaaagaggggaaagaaagattcagaggagacgaggacaattcagagctgatgggtgactaagaagaagccctaagccccagccgctctccttccaatcccaaaagagcactgataggcttgaaacctacaccctcttcctggaaggacccatacacatcctgggaaagccataagatcccaaagccggccggcgcaggggctcacacctgtaatcccagcactttggaaggctgaggcaggcagatcacctgaggtcaggagttcaagaccagcttggcaaacatggtaaactctctctctacaaaaatacaaaaaattagctgggcatgatgatgggtgcctgtaatcccagctactggagagtctgaggcaggagaatcgcttgaacccaggaggtggaggttgcagagagccaagatcacaccactgcactccagcctggatgacagagcaagac

SEQ ID NO: 704573 - DNA, 1311 bp, Homo sapiens
attttctgtgtagtcggggagaaaaataatgttgaaaaagccaacgcaccccatggattgcaagtttctgcctcctgccctcacgttacctggctgccagacaccaagatttgtttttaatctttgaagaaaaagcttcccaaagtgatgagattacaggcgtgagccaccgtgcccagctatttttttctatttttagttgagatgaggtctcactatgttgcccaggcttgtcttaaatgcctgaactcaagcaatcttttccccttggcctcccaaaatgttgtgattacaggcatgagccagcacacttgacccaataagtaattttaaaaatatgacagagagcacattgggagkctgaagcaggaggattgcttgagctgagattgagaacagcctagacaatatagcaagaccttatctctacaaaaacaacaaaacaacagtaaaaacagagaaggcttcttccatgtgaccttctacaccctcaaccagtgacttttctgcaggtaaacactgtataagttcattttatctttacacatatttgcatgtgtataatgtgattttatgtacctttagaaatagtattgcatatgtgtttcctggatgacaccatgtgttcagtggttagaagagcaggctcagagtacctgtgtaaccttgggcaagtttctcgacttctccgactcatttgttactcagggataataacatctgagtaaaattagtgctgttctttgaatgtaataataaagtagataaactatttcaagaggagaaaaattttacaaaagacaaaagaggatatttagagatacattcaagattcaaacataatattttttaaaatgtcatgacattaaacttgaaaatttagatgaaattatctattttccagaaaagtatgtgacaaaaattgattgtggaagaaacatgagataaatagaaaaatcaaaaattatgtttttaattttacacccataaaaagcacatatattataaaataacagctttataaatttttacaaaatgcatatatcatgaacccagcacccagtgacagatgagtgtgaacaatacaatttgaaccgtggactgcatccacatgccatatgcaggacctcgtcagtggtctctgttgatgtgtgagagtgacaatcctcactgttggctgggtatgcctatgagaatcacaattttaactttgtgctgggatctgttatgacactctctgtaccacacaagggggtcataaaatttgcatgagttttgtaatcttttgtgaccttcatacaagtagaaagc

SEQ ID NO: 704574 - DNA, 1896 bp, Homo sapiens
attgaattagttcaccactgtagcttgtattgacaactttggaaaagttaaattcttcggtccttgagcaagaatatgttgaagagtgtgttttattttgatatatttttggatttgccagttttgcttttaattcctagttttatgcaattttggtcgaaaaacacagtgtataattttggtcttcttaaatttatttgtcgtcgtcgttgttgttgttgttttgagacaggatcttactcttgcccaggctggagtgcagtgacatgattttggctcactgcagcctcaacctcctgggctcaagtcaaccttagccccttaagtagctgggtgtacagacatgcactaccatccctggctaattttttattattatttgtagagacagagtctcactatgttgccctggctggtctcaaacttgtggccccaagtgatcctcctacttttgtttccaaaattttaggattataagcataagcgactgcacccagctggtattcttaaatttaataagacttggtatttatcctagcagaatacacaagatgcaaagaagaatattgtatattgtcttgctttttactggaaaggtttgtatgagtctgttaagtctcctttgtctgtgatatggtttggatgtccatgtttccaaacctcatgctgcaatgtaatcttcagtgttggatgtgggatctggaaaaaggtatttttgtcatggaggtgaattcctcatgaatgacttggcaccatagtcttggtaataagaaagtttacactctgttaattcaaaagagagctggttcattaaaagaacctggctccttcacctcacactttccctattaccatgtgacatttccagttactctttgccttctaccataacagtaagcttcctgagaccctcaccagaaacagatgctgacacacacttcttgtacagtctgccaaattgtgagcaaaataagccttttttctttataaattatccactctcaggtattccgctatatgcaaaataattggagttggcaatttacttctaaaggcactatgttatgttggagagcagaaaaagctgtgttgggtaaatgtaaccaatttatattttccttctatgtgcctctttgcattggrctcacctggggcactgcacacacttatttgtaaatttttcactgatttgatcagtatgtttttgttacatttatatgtctataaataaattagggcctgtggtatttttctatgacatcttgcttatgtagcttgtgtgattttatatgttacataaagtatatttatctctgagtctagcaagtggaataatttgttatttttatttttttcagttatgtgttctcattttacccaagacttttggccagagcagcatataaaagatcctttccaaaaagcgacactgagaagatataaaaactgtgaacataaaaatgtacatttaaaaaaagaccataaaagtgtggatgagtgtaaggtgcacagaggaggttataatggatttaaccaatgtttgccagctacccagagcaaaatatttctatttgataaatgtgtgaaagcctttcataaattttcaaattcaaacagacataagataagccatactgaaaaaaaacttttcaaatgcaaagaatgtggcaaatcattttgcatgcttccacatctagctcaacataaaataattcataccagagtgaatttctgcaaatgtgaaaaatgtggaaaagcttttaactgcccttcaatcatcactaaacataagagaattaatactggagagaaaccctacacatgtgaagaatgtggcaaagtctttaattggtcctcacgccttactacacataaaaaaaattatactagatacaa

SEQ ID NO: 704575 - DNA, 2628 bp, Homo sapiens
  misc_feature 1433, 1434, 1435, 1436, 1437, 1438, 1439, 1440, 1441, 1442,1443, 1444, 1445, 1446, 1447, 1448, 1449, 1450, 1451, 1452,1453, 1454, 1455, 1456, 1457, 1458, 1459, 1460, 1461, 1462,1463, 1464, 1465, 1466, 1467, 1468, 1469, 1470, 1471: n = A,T,C or G
  misc_feature 1472, 1473, 1474, 1475, 1476, 1477, 1478, 1479, 1480, 1481,1482, 1483, 1484, 1485, 1486, 1487, 1488, 1489, 1490, 1491,1492, 1493, 1494, 1495, 1496, 1497, 1498, 1499, 1500, 1501,1502, 1503, 1504, 1505, 1506, 1507, 1508, 1509, 1510: n = A,T,C or G
  misc_feature 1511, 1512, 1513, 1514, 1515, 1516, 1517, 1518, 1519, 1520,1521, 1522, 1523, 1524, 1525, 1526, 1527, 1528, 1529, 1530,1531, 1532: n = A,T,C or G
atccctaaattatctagtttaatctggtgtacttaaagatatcctggctgcagaaaatctggttgaatttgcatgagtgtaagaatgtgaggatgtgtgtgtgcctgtttgtatatacatgtttgcatagtgggaaagtttagaatgaaaatcaagttctgatgcaaaagaattaatgtcacagatattcattaaaaagtaatctctctgtcattctgctattagtgagtatgcattctgtccacacaagcctgttttttgctttctgaggttgccgcaggccatttcagcttttctgattcagttgcttctagtgattgcagatatcttccactgcagaaaattgcaatttattagttcctattctgtttcctagactcatctacatagagagagtactaaaagattcagttttaaaaagtttttatgcacatcaaaaatattattcctcttttgtaactcgttcatgtctatgtctattatttgcatcaggtaatgactcaaacatttctcaaaatctaggaagtttactatatttctcttaaagttggcttatttagggactataaggtaataaaattcagtaagaatagagctagaactactaaaattagtcaggactattagataatctattaaattctacgttaatctcgagataattatgtatttcaaattttactctaaaaaagtactgtagatggggcgcggtggctcacacttgtaatcccagcactttgggaggccgaggcaggcagatcacgaggtcaagaaatcgagaccatcctggccaacatggtgaaaccccatctctactaaaaatacaaaaattagcctggcacagtggtgcatgcctgtaatcccagctactgaggaggctgaggcagaagaatcgcttgaacccggcagacggaggttgcaatgagctgagaccgcaccattgcacttcagcctgggcgacagagcggactcgtctcaaaaataaataaataaataaaagctcagcaattataggaaatgtatttcgtatagacttagaaaattcccatttttgtatggtcttgggtgccttatttttttaattttttccttttttttttttttttttttttttgagatggagtctcgctttgtcgcccaggctggagtgcagtggtgcgatctcggctcactacgagctccacctcccaggttcacagcattctcctgcctcagcctccgtcagtagctcgggactacacggtgcccaccaccacgcccggctaattttttgtatttttagtagagacggggtttcactgtgttagtcaggatggtctcgatctcctgacctcgtgatccgcccgcctcggcctcccaaagttctgcgattacaggcgtgcagcatgcgcccgccctctagttttttttttttttttttttagggtacgacnnnnnnnnnnnnnnnnnnnnnnnnnnnnnnnnnnnnnnnnnnnnnnnnnnnnnnnnnnnnnnnnnnnnnnnnnnnnnnnnnnnnnnnnnnnnnnnnnnnnatgtagattttggcatactgcctgggctaaacaccaaaatatgaagttacgtttttcctcagcactttcctcatcaggcattgtgacatattgtttggcccagaactaaggtaacgtgagcctcctgcctgaaccctgcccatagtgggcatagtgacatatttgtgaacccatcatccatataatgtgactttcttacttggcttttccctataggagagattgtgacatatatttgagcccagaaaccaaataatttgacccttctttcctgctatggccatgctcccataaaagagagtgacttattgctgcgattagcacacaggctatgtgattcttctgcctggttcctctccacaggagttactttgacatatctctgggcccattacttagatgatgtgactcctcttattcctgggatgtgttcacagtttggactgtaacatatcgcttagtcaagcacttatgtgatgtgactcttctctcatgttttggccttgtccactggggtgcttgtgatatgtagctgggcccagctcttaggttatgtgatctcttttttttttttttttttttttttttttgcctgatctctgcatacattttgtattgkgatatatatggctgggtccaacacctaggtattatgagtctcctgaatgggctctgttcagaaaggtattatgacatattcttttttcttcatcacttaaatgttgtgactctccttttttgactagaacctgctacaaaggataattgtgaaatatcactggacccagcacctaggtgatgtgactctcctttttgcctgggtctcacataatttgggtattgtgatatattgctgagaccaacatctagggggtgggaagctcctttcttgaccctaaccacaggagctttgtgacatatctctgcatccatgatctaaatatgtgattctgtgtttctgcctgcaccctgctaacagagaagattacgacaaatttctaagtgcagtgtatcttgtttatcttgtgctgacctcctatctcatcctgtgactaagaatgcctaacctggggaggcagccaagtaggtttcagca

SEQ ID NO: 704576 - DNA, 1077 bp, Homo sapiens
gggctccccttcctttgaaagaatgcaaaaagcggggagtgaaagaataagaaacmtgtattattgagctggacactctgcatggtactgtacgtggatttcatcaactggtcattacaagcaccgtgagttggatggtagtcctcattttatagaagtctttaaacaaatctattttatgcctaaataacttattaatatgccattctgctaataagtggcagacccagtctttttgaccccgaacccatgatttttccccattttgctacactgtctccagacaaaaaggctgaggagttggtggagagagactgtggggatagaaaaagaaatggagggcgagattggcagaggcttactttcatcctggcattcagatgacatgaagctggacgtttaaggagactgtagaaattctcatctgtgatttatacaaatgagtctctcatgcagttttactttaatctagctcttacggaatagctgtggctgaatgaactttggaaatcaaactctgctgattaaatatgctttgtccttacgtccgcataactttcaattagtaatgttcttaacactgtttctctgcccctccatcgctctgtcagtagttaagaaatgcaccaggaagcttctatatgaaggaacacctgaattttttccatatataattcaattttaaagctatcaactcatgcaattcatgtgtcttagtccaattctttttcattgagttttcttagagacagcctgacttataataagacactacaatttggcaaatcaaatcagtggcaacagatctttatcgagcactgacatccctgttgcagcttggccagattcatctggttatgtaaagatggtggagtgtatcaggacatttaatggcaaatgaaaaaaatcactaagaaaacaatggcctgaaaggactttttgtcatcaggacataactagttccaggaaaggttcagctaggagggctggcaccagggaccagccaggccggggtgggggtctgtctggggagtactgccgcagggaagaggcagcctgaggtctgggcagtgggtc

SEQ ID NO: 704577 - DNA, 1184 bp, Homo sapiens
tggaactaacccaatgtccatcagtggtagactggattaagaaaatgtggcacatatacaccatggaatactacgtagccataaaaaaaggatgagttcatgtcctttgtagggacgtggatgaatctgaaaaccattattctcagcaaactatcacaaggacagaaaaccaaacactgcatgttcttactcacaggtaggaactgaacaatgagatcacttggacacagggcggggaacatcacacattggggcctgtcagggggtggggggctgggggagggatagcattaggagaaatacctaatgtaaatgatgagttgatgggtgcagcaaaccaacatggcatatgtatacctatgtatcaaacctgcacgatgtgcacatgtaccctagaacttaaagtataaaaaaaaaagaataaacaagaacaagttattattttgctaggtacaaccaactagtactatattaacagcatgatgaaggccaatgcagtggctcatgcctgtaatcccagcactttgggaggccgaggtgggtggattacctgaagtcgggtgttgggagaccagcctcgccaacatggcaaaactgcttctctactaaaactacaaaaaaattagctgggcgtggtggcatgtgcctgtagtcccagctactaaggaggctgaggcaggagaaacgcttgaatctgggaggcggaggttgcagtgagccgagattgggccattgcactccaccctgggcaacgagggagaaactgtctcagaaaaaaaaaaaaaaaaaaaagaaagctgctgttctttcttgtgctagttgctgcttgcaatttaaatgtcagcactgtttttagcaactgaactggcttccttctatcacattaacactattaaaacttgataaagagttctttagagttaaaagtatttgaaacattagcagaataaaacttgtagaaagcaatttaatcaaaacactttcatttaataatgtctaaaaaggctttaacacacatacaayggattttacctgctaagagttggtttgcgtttttcctcagcacaatttagggtttagggcttgttttacagataagaaaatgaaagattcaagagcacaaacagttaagaattggaaaaaaattcagtactctagtatttctgcctttatatatacttaca

SEQ ID NO: 704578 - DNA, 732 bp, Homo sapiens
tttagggcaatattttaaaaagtaaatgtaaactacagtgaagcaccctactatggtatataacttatgataaatcatagcaatgaaataatgtatagacagatgaataagccagtcgtcacagaacaggagaaaaagccctgatgcagacttatctattcatggaaacttagcaaataagggaggtggcattgcaaattataggagatttgcactggggattgttaaaagaaaaacttcaggcaaattaaatttaaaggagtataattgagcaatgaatgattcatgaatcgggtagtccccagaatcacagcagattcagagagactccagcacagccacattgtggaagaagatttattgacaaaaaaagagaaatgacctacagaaataggaagtgaggtacagaaacaactggactggttacagctcagcgtttgccttatttgaacatagtttgaacattcracagtgtatgagtggttgaagtatggctgctgggattggccaagacccagtactgttataggggcacactcctaagttaggttctcaatcttgtctatgtgctaggttaggttgcagtttgtccactaggactcaaatataaagtatggagtccttctcagaccatatttaatttgctttaacaattccccactttggtcactttctcaattttgacagatcaacgaaaactttagttattgatgcccctattaccatcataaa

SEQ ID NO: 704579 - DNA, 797 bp, Homo sapiens
catcatgccctgtctagcttacttatgctccctttatgaactaccctgacagagcccaactttcagaagcattgtctgctgcccctacctgctgcctgtcatcacactccttgaataactttatccacctggctggattccttgttatcaactattgagtccatctttctattccccaagcacatgcttcagcccaatggagatatctttttatgtgtgtgccacagacattgtactgggcactagtttcttctttatatccattcgttatcttaagcaaataacgttgcaacgtaagagtgaggtggtataacttgaacagtacattattataactaccacaagttattggaatgtaactgtaattgtaatagggacaagtgtaataggagaaaataactacaccctgcctggaacatacatatctttcactttaggaaartcttctagtaaaaaaaaagatggaggagaatcacctctgctttttgttcattggctttcctataaagcatgccattttaatggcctcttcttccatgttggtcagggaaattgagctatacgatatattgagattgggtctctcaaaacttgctccacagaaccagccatatttatgtgcaaacatttctaagaaacaactatcctttgaattgcataatggtaatgaacatagtaaagagtagagaacatccattctagagccatcaatctgacctgtctggggctctcagagtgtttgctgccttcaggcctttggaatcacagtactacctcttatgagctgtgttaagaca

SEQ ID NO: 704580 - DNA, 797 bp, Homo sapiens
catcatgccctgtctagcttacttatgctccctttatgaactaccctgacagagcccaactttcagaagcattgtctgctgcccctacctgctgcctgtcatcacactccttgaataactttatccacctggctggattccttgttatcaactattgagtccatctttctattccccaagcacatgcttcagcccaatggagatatctttttatgtgtgtgccacagacattgtactgggcactagtttcttctttatatccattcgttatcttaagcaaataacgttgcaacgtaagagtgaggtggtataacttgaacagtacattattataactaccacaagttattggaatgtaactgtaattgtaatagggacaagtgtaataggagaaaataactacaccctgcctggaacatacatatctttcactttaggaaaatcttctagtaaaaaaaaagatggaggagaatcacctctgctttttgttcattggctttcctataaagcatgccattttaatggcctcttcttccatgttggtcagggaaattragctatacgatatattgagattgggtctctcaaaacttgctccacagaaccagccatatttatgtgcaaacatttctaagaaacaactatcctttgaattgcataatggtaatgaacatagtaaagagtagagaacatccattctagagccatcaatctgacctgtctggggctctcagagtgtttgctgccttcaggcctttggaatcacagtactacctcttatgagctgtgttaagaca

SEQ ID NO: 704581 - DNA, 623 bp, Homo sapiens
ttgccttgaaactccctctattaaacaaccaaaacacattcatagctattgttgacctaaaaggaagaatctgaggccacattagtgtaagtagaaaggtatttgggccaaacttgaaattgcaactcgggagcacagaatcaagttgtcctgaatatacactttgattagcagcagttacaagtggatttttaaaggcaaaacaggggacaaggagtggattgatacaaagttgttcgtcaggaattctcactggtttacagaaataacattgattagtgattggctagacattgttaagcaataggttgtggctgatagtgtctggtgtggcattatgaggttaatttatagcctgtagtaatagcaagcagtttcaagagaagaatacgtagctcaagggggaagtaggatgtgattgctgtctcattttaatatctctctgggcctgctaattaaaaggactcccattcctcagataaaagttcttttcttttctcaccatccagtaaacaaccagtcccaataytgatgctcaatgagacactggccagctggctggtaaagtttagcagcatctcaactgacttgatccgctctgcatttagagcagggactggcca

SEQ ID NO: 704582 - DNA, 623 bp, Homo sapiens
ttgccttgaaactccctctattaaacaaccaaaacacattcatagctattgttgacctaaaaggaagaatctgaggccacattagtgtaagtagaaaggtatttgggccaaacttgaaattgcaactcgggagcacagaatcaagttgtcctgaatatacactttgattagcagcagttacaagtggatttttaaaggcaaaacaggggacaaggagtggattgatacaaagttgttcgtcaggaattctcactggtttacagaaataacattgattagtgattggctagacattgttaagcaataggttgtggctgatagtgtctggtgtggcattatgaggttaatttatagcctgtagtaatagcaagcagtttcaagagaagaatacgtagctcaagggggaagtaggatgtgattgctgtctcattttaatatctctctgggcctgctaattaaaaggactcccattcctcagataaaagttcttttcttttctcaccatccagtaaacaaccagtcccaatattgatgctcaatgagacactggccagctggctggtaaagtttagcagcatctcaactgacttgatcygctctgcatttagagcagggactggcca

SEQ ID NO: 704583 - DNA, 1337 bp, Homo sapiens
aatggagaaggaataattaatgaaataatggtcaagaactcctaaaatcaatagcagacacagaacacagatccagaaagctcagagaacaccaaacatggagggaaaacaacaacaataaaaaaatactgcatctaagaatatctagtaatagagtggtgtaaaatatttaaggtgttgaaagaaaaaaaaaacaccactaatctggaattctatattcactgaaattatcctttagcagtaaagcagaaataaatactttctcagataaacagaaactgaatacatcgccaggtgactttctctccaaaaaatattagaagaaattcttcagggagaagaaaagtataagtcagaaaacaaaacgtatttgaaagagatattaaaataaattttttttctctctattttctaaagatctagaagtctaagtacaaaataacagaggtcagtttatagtgaatcttatttggagatgttagaaaacttctgtaggtattgcaagaaaaaaaattttaaagaatgttatggtctttagctcatacgctctcttaaaaatataaaagaaagaaagctaaagactgatagtgatgggcttcattaagattagttggagaggttagtgtgtgtctcctaaagtgagaaacagtgggagctactgcttgattcatgtatcacagaaaagaatggcagtgtctgttttgcttctctgatggtagagaaaggagagcctacattagaattrgtctacaccagaacttgttgggatttttttaaaagcatatgcattttctttgggttagaaatgagccaagagggaatgagtcattcaggagttatcttgaaggtactttgcccacacggctttctaattgatcggagatctctacagagcatgcgagtggaccaccaaaaatcagacactgggagtatatcaaaagaggccaagcagatgacactttgtccatattaaagaaggcagatgagaaatacctaggaatagagtgtctctaacaaactaacagatcaccataaaatatttttgaacacattccaaatcaagagagcaccaatggcatatcagggtagtaagaagcacgtaaagtcattcttcagcacgatactttttctgtctattccttttctgagccagaacttctacaaaccaccgctggaaacttacaaggaaaggtaatgagaactaatgaaataaagaagaggcattttttttttttccatttcttacttcaggcttccatctagatataagccagaaatgaggaagggagcttacaatgactatcagaatttttatcattctgtgtagaacttcatta

SEQ ID NO: 704584 - DNA, 1337 bp, Homo sapiens
aatggagaaggaataattaatgaaataatggtcaagaactcctaaaatcaatagcagacacagaacacagatccagaaagctcagagaacaccaaacatggagggaaaacaacaacaataaaaaaatactgcatctaagaatatctagtaatagagtggtgtaaaatatttaaggtgttgaaagaaaaaaaaaacaccactaatctggaattctatattcactgaaattatcctttagcagtaaagcagaaataaatactttctcagataaacagaaactgaatacatcgccaggtgactttctctccaaaaaatattagaagaaattcttcagggagaagaaaagtataagtcagaaaacaaaacgtatttgaaagagatattaaaataaattttttttctctctattttctaaagatctagaagtctaagtacaaaataacagaggtcagtttatagtgaatcttatttggagatgttagaaaacttctgtaggtattgcaagaaaaaaaattttaaagaatgttatggtctttagctcatacgctctcttaaaaatataaaagaaagaaagctaaagactgatagtgatgggcttcattaagattagttggagaggttagtgtgtgtctcctaaagtgagaaacagtgggagctactgcttgattcatgtatcacagaaaagaatggcagtgtctgttttgcttctctgatggtagagaaaggagagcctacattagaattagtctacaccagaacttgttgggatttttttaaaagcatatgcattttctttgggttagaaatgagccaagagggaatgagtcattcaggagttatcttgaaggtactttgcccamacggctttctaattgatcggagatctctacagagcatgcgagtggaccaccaaaaatcagacactgggagtatatcaaaagaggccaagcagatgacactttgtccatattaaagaaggcagatgagaaatacctaggaatagagtgtctctaacaaactaacagatcaccataaaatatttttgaacacattccaaatcaagagagcaccaatggcatatcagggtagtaagaagcacgtaaagtcattcttcagcacgatactttttctgtctattccttttctgagccagaacttctacaaaccaccgctggaaacttacaaggaaaggtaatgagaactaatgaaataaagaagaggcattttttttttttccatttcttacttcaggcttccatctagatataagccagaaatgaggaagggagcttacaatgactatcagaatttttatcattctgtgtagaacttcatta

SEQ ID NO: 704585 - DNA, 1337 bp, Homo sapiens
aatggagaaggaataattaatgaaataatggtcaagaactcctaaaatcaatagcagacacagaacacagatccagaaagctcagagaacaccaaacatggagggaaaacaacaacaataaaaaaatactgcatctaagaatatctagtaatagagtggtgtaaaatatttaaggtgttgaaagaaaaaaaaaacaccactaatctggaattctatattcactgaaattatcctttagcagtaaagcagaaataaatactttctcagataaacagaaactgaatacatcgccaggtgactttctctccaaaaaatattagaagaaattcttcagggagaagaaaagtataagtcagaaaacaaaacgtatttgaaagagatattaaaataaattttttttctctctattttctaaagatctagaagtctaagtacaaaataacagaggtcagtttatagtgaatcttatttggagatgttagaaaacttctgtaggtattgcaagaaaaaaaattttaaagaatgttatggtctttagctcatacgctctcttaaaaatataaaagaaagaaagctaaagactgatagtgatgggcttcattaagattagttggagaggttagtgtgtgtctcctaaagtgagaaacagtgggagctactgcttgattcatgtatcacagaaaagaatggcagtgtctgttttgcttctctgatggtagagaaaggagagcctacattagaattagtctacaccagaacttgttgggatttttttaaaagcatatgcattttctttgggttagaaatgagccaagagggaatgagtcattcaggagttatcttgaaggtactttgcccacacggctttctaattgatcggagatctctrcagagcatgcgagtggaccaccaaaaatcagacactgggagtatatcaaaagaggccaagcagatgacactttgtccatattaaagaaggcagatgagaaatacctaggaatagagtgtctctaacaaactaacagatcaccataaaatatttttgaacacattccaaatcaagagagcaccaatggcatatcagggtagtaagaagcacgtaaagtcattcttcagcacgatactttttctgtctattccttttctgagccagaacttctacaaaccaccgctggaaacttacaaggaaaggtaatgagaactaatgaaataaagaagaggcattttttttttttccatttcttacttcaggcttccatctagatataagccagaaatgaggaagggagcttacaatgactatcagaatttttatcattctgtgtagaacttcatta

SEQ ID NO: 704586 - DNA, 1337 bp, Homo sapiens
aatggagaaggaataattaatgaaataatggtcaagaactcctaaaatcaatagcagacacagaacacagatccagaaagctcagagaacaccaaacatggagggaaaacaacaacaataaaaaaatactgcatctaagaatatctagtaatagagtggtgtaaaatatttaaggtgttgaaagaaaaaaaaaacaccactaatctggaattctatattcactgaaattatcctttagcagtaaagcagaaataaatactttctcagataaacagaaactgaatacatcgccaggtgactttctctccaaaaaatattagaagaaattcttcagggagaagaaaagtataagtcagaaaacaaaacgtatttgaaagagatattaaaataaattttttttctctctattttctaaagatctagaagtctaagtacaaaataacagaggtcagtttatagtgaatcttatttggagatgttagaaaacttctgtaggtattgcaagaaaaaaaattttaaagaatgttatggtctttagctcatacgctctcttaaaaatataaaagaaagaaagctaaagactgatagtgatgggcttcattaagattagttggagaggttagtgtgtgtctcctaaagtgagaaacagtgggagctactgcttgattcatgtatcacagaaaagaatggcagtgtctgttttgcttctctgatggtagagaaaggagagcctacattagaattagtctacaccagaacttgttgggatttttttaaaagcatatgcattttctttgggttagaaatgagccaagagggaatgagtcattcaggagttatcttgaaggtactttgcccacacggctttctaattgatcggagatctctayagagcatgcgagtggaccaccaaaaatcagacactgggagtatatcaaaagaggccaagcagatgacactttgtccatattaaagaaggcagatgagaaatacctaggaatagagtgtctctaacaaactaacagatcaccataaaatatttttgaacacattccaaatcaagagagcaccaatggcatatcagggtagtaagaagcacgtaaagtcattcttcagcacgatactttttctgtctattccttttctgagccagaacttctacaaaccaccgctggaaacttacaaggaaaggtaatgagaactaatgaaataaagaagaggcattttttttttttccatttcttacttcaggcttccatctagatataagccagaaatgaggaagggagcttacaatgactatcagaatttttatcattctgtgtagaacttcatta

SEQ ID NO: 704587 - DNA, 719 bp, Homo sapiens
gtttagaagttttgccaatttgaaacacgtcgtagtctacattccaatcaatgtggatatgagtgtgtatgtgtgtgtgtgtattgtatgcatcatttattgcaagacaaagacattctaaaacctttttaatcaatgaagccttgaatttgactggaacttttctttgtgtaccactacactttccctaaaagttgtctctgctttagacatttgttagtagtgccaatttgagagacatttgccaaataatgtgtggatgaatttttagcgctttcaaagaaaagaaacacaaggtagcctaggaatttatagggaatccattatttctttatgtattgtaattagactaaataaatggccctttagtaacattttttccccaccctgcccctctaacttccttctttctcttgttctgtcttcttgccttttgaggtgttaaagcaattaagtaaaaaaaaraaaaagaaaaagaagcctgacttgtcatctttcatggtgactggaaaatcaatattcagcctcttccagtcagagaaggctagtaaatccaaagattggaccctttaacatgaacgatttgcaaaaccaatttactgggaattacttaaaaatgcccatgccaaatctattagttataagactgaaaacttataaaattttattctagcctcatattttcctattttgaatgcatgtaggttgattttcttatt

SEQ ID NO: 704588 - DNA, 664 bp, Homo sapiens
ttctggttttgaaggcaggaagggaaacatatgggtttcaccatgggttggatataagacaacagggaatattggacactttggactttacgtgtgtgtgccccatgtaaaggagatagctgctaattggggtgagttttggcatatgggtagatggggccagtgatgctaagttttcaaaagaagccggaagtctgttaatgagtagaagagtgtatcagtcttatgatttttaaatgttggcagttagcatactagccaaataaaaggtgggagtgaagggttactcattgtgtgagtacaggtcgtgtatctatggttgtcattatctaattaataattgtgtcacttagaggagaatgaaaggggtattgccattctaggccgaaacctgttccaaaggacaacaacaagactacctggacataggttaagaacagtgattggaacaaaatagaaacagcagaaataaatactgtgaaagtagtcagtgtttaacaaaaaatattgggttgagtgatactgtgaagaaagctacrtttagatctactttaatctcataccatgcaaaataagttccacatgggttaaatattttaaaatcaatgttctactttgtataattgaatgaatattatactttaatggttgttatattttgtat

SEQ ID NO: 704589 - DNA, 2294 bp, Homo sapiens
  misc_feature 6, 7, 8, 9, 10, 11, 12, 13, 14, 15, 16, 17, 18, 19, 20, 21,22, 23, 24, 25, 26, 27, 28, 29, 30, 31, 32, 33, 34, 35,36, 37, 38, 39, 40, 41, 42, 43, 44, 45, 46, 47, 48, 49,50, 51, 52, 53, 54, 55, 56, 57, 58, 59, 60, 61, 62, 63,64: n = A,T,C or G
  misc_feature 65, 66, 67, 68, 69, 70, 71, 72, 73, 74, 75, 76, 77, 78, 79,80, 81, 82, 83, 84, 85, 86, 87, 88, 89, 90, 91, 92, 93,94, 95, 96, 97, 98, 99, 100, 101, 102, 103, 104, 105: n = A,T,C or G
aatgtnnnnnnnnnnnnnnnnnnnnnnnnnnnnnnnnnnnnnnnnnnnnnnnnnnnnnnnnnnnnnnnnnnnnnnnnnnnnnnnnnnnnnnnnnnnnnnnnnnnnaagcatttggtgtatagaacatttaagttcttttccttgtatgcaaggaatttatcatctaagaagcaaaggtagaaatatgcaggtataaaacatgtaagagcaaggattaggatattattccctagaaaatatctgactttagagctattaccattttcagcttcctctccctcactttgaacagtatttgaagagtgaatcccagaaatgaagctgtattttattgatttttgctctcctaccaatgttttgagaatccggcacacaatgagcacccaatgtttgttgaattcaatgagtgaattgtatctatcatacaaactgttatccattcaggactgagaattttaggaaatacacaagggctgcagcaaattaatatatctgtcataattgagaaatgagctgttctggttcacaactctgtagaatagaaccatgagcctggtcataagaaagaacttgatctcagtagtcaaaataggtactgcagatccaggttgaaaagttcctacacttaagtaaaagcttctcacactcactttaggaagggtttataggtgggttgaagactcaatagtttcaagatccttatcctatctcaatcttccactggggatatgactaagaaggggtactggctaatgcatacataggtgcttacaacctttatataatactttgggtggtgttatggctgaatcatgtcctccccaaattcatattttgaagccctaatccccagtgtgacagtaattggagatagggcctttaaaattaaaggaggtcataagggtggagccctaattcaatatgactggggtccttataagaagagaaagagacagcagggatgtgcatgcagagaaaagaccccctgaggatacgtacagacggcagctgtctccaagtccaattctaccaacaccttgatcttggacttccagcctccagaaccatgagaaaataaatttctgttgtttaagccatgcaggctgtggtattttgttatggcagtcctcacaacctaataaaggtggcaaacaaaacattcaggtaaatgtactctctcatattatacaagcttttttaaacagtaaaataattgaaacttggaaaataacagaatataaaaacatttacctaccactcagattttaacaaatgtggacatcttgtcatatttgcttcagatatttttttaactttaagaaataaatttgtttttgtttttttttgagatggagtctcgctctgttgcccaggctggagtgcagtggtgcaatcttggctcaytgccatctccacctcccagttcaagtgattctcctgtcttagcatcccgagtatctgggattacaggcatatgccaccacacctggccaatttttgtattttaagtagaaacaggttttcaccatgttgaccaagctggacatttgtgggttttttgttttgttttgttttgtttttgagaaggggacttcctgtgtcacccaggctggagttcagtggcacaattacagctcactgaaacctctgcctctgcctcccaggctcagacgattctcccatatcagcctcctgagtagctcaggccacaggtgcatgccaccatgcccagctaattttttgtatttttggtagaaacggggtttcatcatgttgtccaggctggtcttgaactcctgggctcaagagatctgcccgcctccctcccaaagtgctgggattacaggcatgagccactgcatatagcccagaaataaaattttatgcttttatacttaaaactttatattttggtaccctttgggtctgcttccatactgtcctagcccagaggtaaccacaattctgaagaaggagaccattcctgtccacatattcatatacttacatatatgcctatgtcaaaaagcaacatatagtactgctttgtatttacaaaaaggatacggttaaatacttgtgcaaatttttccttcaacactgtgttgaggtttatgtacacaatttgatacatgtagctatagttcatttattttcactgttctatagtcttccatagtatgagcataccacaatttacttatccattttcctgctgtcagatctttaggttgttctcaatttttcagtgttataaacaccacagcattgaacaaccttgcatatgtctgctt

SEQ ID NO: 704590 - DNA, 636 bp, Homo sapiens
tcaaatccattgttatgaagatttgctgtgatgtttcttttttgaaatactaaaccaaactttaaaaatctctaaacatctatttttaaaaatctgcattgttgaaatgttttattgggtggattagagttgagtcatagatgtaattttttgacaaacttgtgaaaagaatttatctcttacctgtgtcactgacattgtacagtatgtgctgggagaagctccttaaaaagcctcttgtctaggttactgatgacaaataggtttttacttttatggmagctccttcattttacctgggctgctgtgttcagaaagattgtgaggcctcatttagactaagcacagaggagtactggggtgtatttataatatttttcctgagctgtttagtagtagattttaaagtcatttgatacaggaggcatttctcaggataatttgattgtcccttaactacagtggttagtcagagatgtctatgtattcactgtgtgggaattcagtcatcacccaaaacatcttgaaaagggaattaaagaaaattgaggccaggcatggtggctcatacctgtaattccagcactttgggaggccgaggtgggtggatcacttgaggtcaggagttcgagacca

SEQ ID NO: 704591 - DNA, 636 bp, Homo sapiens
tcaaatccattgttatgaagatttgctgtgatgtttcttttttgaaatactaaaccaaactttaaaaatctctaaacatctatttttaaaaatctgcattgttgaaatgttttattgggtggattagagttgagtcatagatgtaattttttgacaaacttgtgaaaagaatttatctcttacctgtgtcactgacattgtacagtatgtgctgggagaagctccttaaaaagcctcttgtctaggttactgatgacaaataggtttttacttttatggcagctccttcattttacctgggctgctgtgttcagaaagattgtgaggcctcatttagactaagcacagaggagtactggggtgtatttataatatttttcctgagctgtttagtagtagattttaaagtcatttgatacaggaggcatttctcaggataatttgattgtcccttaactacagtggttagtcagagatgtctatgtattcactgtgtgggaattcagtcatcacccaaaacatcttgaaaagggaattaaagaaaattgaggccaggcatggtggctcatacctrtaattccagcactttgggaggccgaggtgggtggatcacttgaggtcaggagttcgagacca

SEQ ID NO: 704592 - DNA, 670 bp, Homo sapiens
ccgaatagctgggaccacaggtgcctgccaccatgtccggctaatttatttcattttactttttctactatctttaagtcttttatccttaagtggcgctttaaaaagatttttttttaattctttgtagacacagggtctcagactcctggactcaatcaatcctcccaccttggcctcccaaagtgctgtgattacaggcatgagccactgtgcccagcccaggagcttatacatatgagcatttatgtttgtattttaagcccatttctgctacaactgccatttattattatttctactattctttcctatttacaactttattaaggtataatttatacacaattaacttcctatattaacaagtacaatgtgaygagccttgacatatgtgaaacttccacgccaaagtttccttgtgtccctctgcagtccagctactggtctgttttctgtcactagaaactagtttgcattttctaatttttaaatataaatataatcatacaatatgttccctttatgtgtagcttctttcactcagcataattttaagtttcatccacgctattgtatcgtttgttcctttttattgctaagtgctacgaatatgtatttttaaatatccttgataaacatttaaaagcacaaacttttaaaaatgatg

SEQ ID NO: 704593 - DNA, 654 bp, Homo sapiens
tattctaacatttatcctaggttcttaaaagcaatattgtttgcacatgagtgatctaatgygcaactttcctttgcttgacaggatcgggggaggaagaagagagacgggtggacctagaattctcatataaaaaggcatctagctcttcccttcctaattacctgagtgctcactctgaactgctcacctgatgttaatgaacatcaggcttgtctgagaaaatgccagcctttaattaacggggctgatttatttagctgaagtctgaatttaggcaaaggttaaaagaagtcacagttagaacctactgcctgatagaactttcaagcctcctggaattttgcattgcaattgtgtcttcttaatttattgccactgagcgatccagaaagttaatgtgctcatttgtataaacagcgtagctgtaaatcattcactagttccctaactggtcttcatggaggtacaaaaggaaatgcttttaggttggtggcctctcatttctgtcctttgcggccacctggatttccacagaagttttgctctcttgggtccctcttgggtctcctgtgctctgagtgcatgcttttgggccaggttcaaaccaggtttgatgctgctacctgctgtttctttaggtgcagcagtggg

SEQ ID NO: 704594 - DNA, 654 bp, Homo sapiens
tattctaacatttatcctaggttcttaaaagcaatattgtttgcacatgagtgatctaatgcgcaactttcctttgcttgacaggatcgggggaggaagaagagagacgggtggacctagaattctcatataaaaaggcatctagctcttcccttcctaattacctgagtgckcactctgaactgctcacctgatgttaatgaacatcaggcttgtctgagaaaatgccagcctttaattaacggggctgatttatttagctgaagtctgaatttaggcaaaggttaaaagaagtcacagttagaacctactgcctgatagaactttcaagcctcctggaattttgcattgcaattgtgtcttcttaatttattgccactgagcgatccagaaagttaatgtgctcatttgtataaacagcgtagctgtaaatcattcactagttccctaactggtcttcatggaggtacaaaaggaaatgcttttaggttggtggcctctcatttctgtcctttgcggccacctggatttccacagaagttttgctctcttgggtccctcttgggtctcctgtgctctgagtgcatgcttttgggccaggttcaaaccaggtttgatgctgctacctgctgtttctttaggtgcagcagtggg

SEQ ID NO: 704595 - DNA, 660 bp, Homo sapiens
acctcccctggagtctccagaaagaacccagccataccaacaattatttttgcccagtgagacccattttggacttctgacctccagaaatttaagataaattcttgttttattccactaagttcatggtaatttgttatagcaacaaccaaaaaaaactaatacagtcaattcattgtttttgtttttaatcttcataggtacttgacagttgtacatatttatgggatacatgcgatattttgaccaagcatgccatgtgtaaggatcaaatcttggtaattaggattttcattacctcaaacatttatgatcatttctttgtgttgagaacattccaaatctacttttatagttatttattttgaaatatacaaaataaattattgttaagtatactcaccctatctactctggrcccaaggagatggggttccttggggtctcagaaaaaactttaagagcgggatctgatcgctaagaaaaggctgtggagcccaaaaagaaatttgaggtctcttggagatgccatgtagttctatggcctactgtccttaaaaatccttctcatctctattcacctttttaatgctttcaggaatcaatttcctccttcaggaaactggcattttctgtagagaaatttttctatgcaaatac

SEQ ID NO: 704596 - DNA, 1350 bp, Homo sapiens
tgcaattccaacagaataacagtgttttgcttatggtgagcctgtataaaatatttatttttatttaagagccctactttactttcttcagctacctatgccttttggcagaagaacaagatagatwcacatgactgtgtttcttttttttaatttcccctccaaatctaagtatagatttcagcagactaaatcaagagacctattgaccctggttcttatgttaaaaattatagggatctcagccacatttcatgagaacattaaggcagtttcaccatgatttaccagtgaggttaattatttttttttcagaaacatatggtgatgcctctttctagaagatgctatggtgaacattactctgtattggaatcctaaattaacttctgaccaatattctaaaagaaatgagaaggaattaatctcttaaaaattaagattacctctctctcttctgtccatgcacccccccaccccggccaaccccattcagcattcctaactgaaggctgctatattggtgctaaatataaagtctcttaccagtgtgtgctctgcatatctgaaaatcatgcagtggtgaacctcttgagtgtatttctttctttctttattaatgaaaaggtttttatttgtgccctctgttattctcagaagtacaacacaaaacaaaatgggaaaccatgatttatcttctatttgataaaaacatctgcagaataaaatgagcctcttgttgccggaattgtcatcaatgatgactttgacaaaatgagcaatacataatttgctagctcccttgtgaagctgaaacagattgtcaaataaaacactggaggagatgcatatgggctgagtagactggctttgaataggaacatgcgcaggtggaggcttagtagtggctgtaagaaggaggacagccctaatttggagggtcatttgcatttgaaaatgctccttactaaattgtgagtattccctacaggaaaagagaatgcattctgccaaaactgcagctatttttgtttcttggtaacttgaataaaccagaaaacccaaggcaaagtggagggggttgcactcaaaccaaccattttttaatggtgggcttatagaatacaaatcagtaatatatgaaaaggacacttatgaaaatcaattgctttatggttaaaaatggatttttcatcaacacgaagcatggaaagtgtactaatgggtatattcagcatgcgtttttacaaatgacaatcaaatgcttttattagtcttcatatctgaaaagtatggcaaaaatcacataattaattctaaactcatttggttttttgttgttgaatggcc

SEQ ID NO: 704597 - DNA, 1350 bp, Homo sapiens
tgcaattccaacagaataacagtgttttgcttatggtgagcctgtataaaatatttatttttatttaagagccctactttactttcttcagctacctatgccttttggcagaagaacaagatagatacacatgactgtgtttcttttttttaatttcccctccaaatctaagtatagatttcagcagactaaatcaagagacctattgaccctggttcttatgttaaaaattatagggatctcagccacatttcatgagaacattaaggcagtttcaccatgatttaccagtgaggttaattatttttttttcagaaacatatggtgatgcctctttctagaagatgctatggtgaacattactctgtattggaatcctaaattaacttctgaccaatattctaaaagaaatgagaaggaattaatctcttaaaaattaagattacctctytctcttctgtccatgcacccccccaccccggccaaccccattcagcattcctaactgaaggctgctatattggtgctaaatataaagtctcttaccagtgtgtgctctgcatatctgaaaatcatgcagtggtgaacctcttgagtgtatttctttctttctttattaatgaaaaggtttttatttgtgccctctgttattctcagaagtacaacacaaaacaaaatgggaaaccatgatttatcttctatttgataaaaacatctgcagaataaaatgagcctcttgttgccggaattgtcatcaatgatgactttgacaaaatgagcaatacataatttgctagctcccttgtgaagctgaaacagattgtcaaataaaacactggaggagatgcatatgggctgagtagactggctttgaataggaacatgcgcaggtggaggcttagtagtggctgtaagaaggaggacagccctaatttggagggtcatttgcatttgaaaatgctccttactaaattgtgagtattccctacaggaaaagagaatgcattctgccaaaactgcagctatttttgtttcttggtaacttgaataaaccagaaaacccaaggcaaagtggagggggttgcactcaaaccaaccattttttaatggtgggcttatagaatacaaatcagtaatatatgaaaaggacacttatgaaaatcaattgctttatggttaaaaatggatttttcatcaacacgaagcatggaaagtgtactaatgggtatattcagcatgcgtttttacaaatgacaatcaaatgcttttattagtcttcatatctgaaaagtatggcaaaaatcacataattaattctaaactcatttggttttttgttgttgaatggcc

SEQ ID NO: 704598 - DNA, 1260 bp, Homo sapiens
gggaccattattccccggagccaagctgttggcttcttgcttgtttaaacccagcgtcctggaggtccgtccatggctttcatacgattcttgaaggtcacccggtccacccatgaaactcctttcaggaggaagcagggcggccagtaaggaggatgggatgggccttgcccgccctgcagccctcatgcctagctttgtctcttcattcgtgaagaattgtgttttcttttttttttttttttttttttttggagatggagtctcgctctgtcgccaggccggagtgcagtggcgtgatctcggctcactgcaacctccacctcctgggttcaagcgattcttctgcctcagcctcctgagtagctgagactgcaggcgcccgccaccatttttttgtatttttagtagagacaggttttcaccatgttggccaggatggtctcgatttcttgacctagtgatccgcccgcctcggcctcccaaagtgttaggattacaggcatgagccactgcgtccggcccaagaattgtgttctcttctaaggtgattctttaagaagatagaccacaggatgacatgttcacaccagagagaggggccagtccctcctggccctggatcagggtagccagacccacctgccagcttactgtggggagagggcgtgggccccccaggggtgtgctgagggatggcggagtccccttccccacgcgggcggagccagacgggacagcacccaccccgtcgtcaccgcccgtccctgtcctgcagcgcagccaacgtgaagaagtgggagatcgagctgcagacccttcgggagagcaatgcacggctgaccacagcactgcaggagtcggcagccagtgtggagcagtggaagaggcagttctccatctgccgtgatgagaatgaccggctccgcaacaaggtgggtacggtggatgcagtgagccccgaggccagctggtgtgggcagtgggagatgggggcacccacaaccctttttctccctccccaactttgcccttatccccatggccagaggaagacttgctgcctctcccatgggaacgtccctccccctccctgcctttcttagtaggaatttaaccacgtacataattgactcattaccttttctggttttattttctttctttytttttgagatggagtctcgctctgtcacccaggctggagtgcagtggcacgatctcagtgcactgcagcctcctgtctcccaggttcaagtg

SEQ ID NO: 704599 - DNA, 1092 bp, Homo sapiens
attggaaacgtcctttgaactgcaaatcatagcctactgtgatttttatttattttttaaagtttgaggttttgtcccaatttatacatttagtctttacgattccacgatgggttttggagataaatggtggctactyggggagataaattcaggtcttcctggtggctgcaggaggaggctgtcagtgatgctgggagaatgtggcccggcaactgtgctgattcactctgtgtttgttcgcctgagagctgtgccacatcagtgctgaaacccaccactcagggggctgcattctggttttgcatctgggcaaaagaataaagctctgttttactagcacaaaggtatgattaaattgcaacagatttttttacataattaaaaaacttttttatagagatggggtctcactatgacacctggactggtcctgaactcctgggctcaagtgatcctaccaccttggcctcccaaagtgctgggatgacagtgtgagccaccacacccagcccagaacagaatttttaagctgtgtacacgtgtggtcaataataaatgttttctgcttaggtaataatgatgaccacctggaacacaggacaccaggcatttccctgagtgctttgtacgtgccatgcctcatttaatccttacaacaacctcgcaataaccccgagacagccctaagacaaacatatgattagccttgaagaatagagatgatgaaagttagaaaatctggcatgggtcactccaaaagacccttgtttctttgcctaggccgatgctctgctctgagttgcaccaccttccatgtcatgactatattttgaaatgccctctaaatgtcaggagaatatacagtacagaaaatgtgctcatgggctctgaatcccaagggaccctcttataccaaccacatagcagcttctgtaatttccaggtaggatggagatttccttctcattggagtgccagataaggcaatgctgtaaccaaagtctgtcttggaccttgatgccccatttatcagaaggtcaggaaagattacctcataatcaaaaattgtagttgtacattcacagcaca

SEQ ID NO: 704600 - DNA, 1092 bp, Homo sapiens
attggaaacgtcctttgaactgcaaatcatagcctactgtgatttttatttattttttaaagtttgaggttttgtcccaatttatacatttagtctttacgattccacgatgggttttggagataaatggtggctactcggggagataaattcaggtcttcctggtggctgcaggaggaggctgtcagtgatgctgggagaatgtggcccggcaactgtgctgattcactctgtgtttgttcgcctgagagctgtgccacatcagtgctgaaacccaccactcagggggctgcattctggttttgcatctgggcaaaagaataaagctctgttttactagcacaaaggtatgattaaattgcaacagatttttttacataattaaaaaacttttttatagagatggggtctcactatgacacctggactggtcctgaactcctgggctcaagtgatcctaccaccttggcctcccaaagtgctgggatgacagtgtgagccaccacacccagcccagaacagaatttttaagctgtgtacacgtgtggtcaataataaatgttttctgcttaggtaataatgatgaccacctggaacacaggacaccaggcatttccctgagtgctttgtacgtgccatgcctcatttaatccttacaacaacctcgcaataaccccgagacagccctaagacaaacatatgattagccttgaagaatagagatgatgaaagttagaaaatctggcatgggtcactccaaaagacccttgtttctttgcctaggccgatgctctgctctgagttgcaccaccttccaygtcatgactatattttgaaatgccctctaaatgtcaggagaatatacagtacagaaaatgtgctcatgggctctgaatcccaagggaccctcttataccaaccacatagcagcttctgtaatttccaggtaggatggagatttccttctcattggagtgccagataaggcaatgctgtaaccaaagtctgtcttggaccttgatgccccatttatcagaaggtcaggaaagattacctcataatcaaaaattgtagttgtacattcacagcaca

SEQ ID NO: 704601 - DNA, 2046 bp, Homo sapiens
  misc_feature 689, 690, 691, 692, 693, 694, 695, 696, 697, 698, 699, 700,701, 702, 703, 704, 705, 706, 707, 708, 709, 710, 711, 712,713, 714, 715, 716, 717, 718, 719, 720, 721, 722, 723, 724,725, 726, 727, 728, 729, 730, 731, 732, 733, 734, 735: n = A,T,C or G
  misc_feature 736, 737, 738, 739, 740, 741, 742, 743, 744, 745, 746, 747,748, 749, 750, 751, 752, 753, 754, 755, 756, 757, 758, 759,760, 761, 762, 763, 764, 765, 766, 767, 768, 769, 770, 771,772, 773, 774, 775, 776, 777, 778, 779, 780, 781, 782: n = A,T,C or G
  misc_feature 783, 784, 785, 786, 787, 788: n = A,T,C or G
tactgattaaaataaaacatttctgcaagatagaaattataattactttgctgaacttaagctgcactttatactctgaataaattaggccattattattctatgttcaaattcctaagggtaccttgcctttggtttgtacctatttaattcagatcagttattagtgaacacctttggttaatgtcatgatatttccattatgcaattcaaactctcctgaaagaagggtgtcaagttgctacccttcagcgaaggtgcattccattaaagactgaatttagaacttctttagaacatgtttcaacagcagaaggtattaagaaacactgtataaaggtacaattgattcacagaaactctttcttgctaacatgtgctatttttgtacatttatctcttccaataaagcctttcataatttttctttttttcatttcaattgtcctgttccaatccatattttgcactctctgattcagtatatttacctgccacatttttattatttttccaatgttaaccccataaagaaaagctatttcagttgactggagctcacagtattcattatagccaatcaattgtgtaagtagtggtaatgaataatcagaatatttgaaaaattatcaaaatagaaaagagtaataaatataaatgagacaggactaatcattttatgaatattnnnnnnnnnnnnnnnnnnnnnnnnnnnnnnnnnnnnnnnnnnnnnnnnnnnnnnnnnnnnnnnnnnnnnnnnnnnnnnnnnnnnnnnnnnnnnnnnnnnncaaatatttagaaaactgtcagataaaaatataatcaacattgtctgggggggggggaactacttatcaaaaatacagataaatttagtgtaacaatttaattctgaaggataataatctgttttattaataaatatatatgaataagtaaagtgtattacattttggacaaaaataatgtatttggcccatctcagagaaatggcactttgggtatgtaaatagatgtggtgtggagaagaaaggtgtggcccagaacctggttaaggcaaaaagaaaattcagctctttatgatgcagtgagttagaaatgcctgattcacagctgctgtgaaacttcttactgcacactaaaaagtaattttctaatactatatttttctgcccacatcttccatctcgtggaactcaaaatagtttattttgtgagagttcaccttaacttctcaaattaaatgaagagtttcagattttagaaataacaggaatggacttaaaagtttgcaaatgtgaagtagaaagttttagatttccaactttaatatggtgcatttagatagtacctgcagatatgatcaaaatgtctccattaatttttaagaaagcactcaggcggccataattgtagacagattagttaaacactttaggggtaagattcagattctcagaatactgttctatctttgtcaaaaagtcaaattttaagacaatagtttgtaaggcctagaacacccacaaaagacaaataaaaatacgagtataaatatatrgtctatatcacatttgtttaattcacaattctgttgagagcactaaatgttattttaaaaacttgaatatccagagtaaagagaaattagttctgacatatgaaaaatttttagcagcttctgatgattactttgtaccttcactgacaataaatgctgctatgtgctttttggttataattattttggcataaactttctttctttgactctaatttatacaggtagtgtttctgaaattctctgtttaaatgtcaatcttgaattacacgctcaccggctattacaagatatgaataaagaaactgaaaaagttttagataagaaacttatgtatgagatacttgttagtccaatgttaaaaaaatgcactaggccgggcgcagtggctcaagcctgtaatcccagcactttgggaggccgaggcaggtggatcacgaggtcaggagatcgagaccatcctggctaacaaggtgaaaccccgt

SEQ ID NO: 704602 - DNA, 652 bp, Homo sapiens
gagaccctaaacaacagtaatgtaatgggggagctaaattagccctagtgtaaagactacaacatacatgtccttaaaaagsctttaaaactggccttgaaagaatgaaacggctgtgccagaactgtaattcccttcagagcaaaaggccaatagtgtctatctaagtaaatacaatgcattgtacatatggacaacatttacgatgtctaagatccaatcggaaacaaattacatcttatagactgttaaatagttcatcattaggaaaaaatgcaccttctacatttaccacgcatgaaaaaaagcaagcatgcaaaacggcatcaaaatcaatttcacataatattaaatcttaaaatatgggtcataaattcaatgatgtaaaaataagttatccacaacaggcattgtattttaacttttttctcaaaaaattaaataaaggctggatatagtggctctcatctttaatttaatctcagcaatttgagagacagaggcgggagaatcgcttgagcccagaagtttgggaacagcctgggcacaaagtgagacccaatctctaaagaaaatataaaaattagctgggcaaggtaatgtgtgcctttagttccagttactctggaggctgaggtggaagaatcacttg

SEQ ID NO: 704603 - DNA, 652 bp, Homo sapiens
gagaccctaaacaacagtaatgtaatgggggagctaaattagccctagtgtaaagactacaacatacatgtccttaaaaagcctttaaaactggccttgaaagaatgaaacggctgtgccagaactgtaattcccttcagagcaaaaggccaatagtgtctatctaagtaaatacaatgcattgtacatatggacaacatttacgatgtctaagatccaatcggaaacaaattacatcttatagactgttaaatagttcatcattaggaaaaaatgcaccttctacatttaccacgcatgaaaaaaagcaagcatgcaaaacggcatcaaaatcaatttcacataatattaaatcttaaaatatgggtcataaattmaatgatgtaaaaataagttatccacaacaggcattgtattttaacttttttctcaaaaaattaaataaaggctggatatagtggctctcatctttaatttaatctcagcaatttgagagacagaggcgggagaatcgcttgagcccagaagtttgggaacagcctgggcacaaagtgagacccaatctctaaagaaaatataaaaattagctgggcaaggtaatgtgtgcctttagttccagttactctggaggctgaggtggaagaatcacttg

SEQ ID NO: 704604 - DNA, 652 bp, Homo sapiens
gagaccctaaacaacagtaatgtaatgggggagctaaattagccctagtgtaaagactacaacatacatgtccttaaaaagcctttaaaactggccttgaaagaatgaaacggctgtgccagaactgtaattcccttcagagcaaaaggccaatagtgtctatctaagtaaatacaatgcattgtacatatggacaacatttacgatgtctaagatccaatcggaaacaaattacatcttatagactgttaaatagttcatcattaggaaaaaatgcaccttctacatttaccacgcatgaaaaaaagcaagcatgcaaaacggcatcaaaatcaatttcacataatattaaatcttaaaatatgggtcataaattcawtgatgtaaaaataagttatccacaacaggcattgtattttaacttttttctcaaaaaattaaataaaggctggatatagtggctctcatctttaatttaatctcagcaatttgagagacagaggcgggagaatcgcttgagcccagaagtttgggaacagcctgggcacaaagtgagacccaatctctaaagaaaatataaaaattagctgggcaaggtaatgtgtgcctttagttccagttactctggaggctgaggtggaagaatcacttg

SEQ ID NO: 704605 - DNA, 652 bp, Homo sapiens
gagaccctaaacaacagtaatgtaatgggggagctaaattagccctagtgtaaagactacaacatacatgtccttaaaaagcctttaaaactggccttgaaagaatgaaacggctgtgccagaactgtaattcccttcagagcaaaaggccaatagtgtctatctaagtaaatacaatgcattgtacatatggacaacatttacgatgtctaagatccaatcggaaacaaattacatcttatagactgttaaatagttcatcattaggaaaaaatgcaccttctacatttaccacgcatgaaaaaaagcaagcatgcaaaacggcatcaaaatcaatttcacataatattaaatcttaaaatatgggtcataaattcaakgatgtaaaaataagttatccacaacaggcattgtattttaacttttttctcaaaaaattaaataaaggctggatatagtggctctcatctttaatttaatctcagcaatttgagagacagaggcgggagaatcgcttgagcccagaagtttgggaacagcctgggcacaaagtgagacccaatctctaaagaaaatataaaaattagctgggcaaggtaatgtgtgcctttagttccagttactctggaggctgaggtggaagaatcacttg

SEQ ID NO: 704606 - DNA, 2547 bp, Homo sapiens
aatgaatttgtttattagtttattagtcttatatataatgagtatatataagatatatatatcttatatataaaaacttataggagtttttatatataagatcatgtcatctgcaaaagagacagtttaactccctcatttctaatttggatgtcctttatccctcgcatgcaagaatgattcaacatatgcaaatcaataaatgtgatatatcacattaatcacatawgtagaatggtcatttcagtagatataggaaaagcatttaacatgatttaacaaccttttataataaagatgctcaacaaattaggtataaaaggaatgtaccacaacataataaaggtctttcccatacttaaaaatattattgcaatttctagttccatgtaaatatttactcttatactttattttgtttgttcattttgttttaaattctcaacacaaatcaggtaagcttcaggcttgagaggtagaggcagtcataaaagacttcttctccatgacctccaccactctcatggctttagaaaccatctgcaaaataatgccactcaaaaatgttcgtgattgcaaatctattttcctgagtgataggccactatattcaatcttctttctgacattctgagttgaattgatattatttatcaaatatgtaatacgtcctttgctaatatttctcatatttttaaatggaagagatattcattctcttcaccagtttaaacaatcttaacaatgactaatttcaaacattgatgttatttgaaataatatcatttttacaaaggcacatttttaattccttactacaaatccttgttagttgaatcctaagttcctattaattttcaacatagaggagaagaatgttcatagagattaaccactatgttttcacacatacataatgcattcttaccaacttttattgacatgctaatatgataacacccagtgcaaggtgccaatttaaattaataagtggctataatatattttaatatttctctataataattttagtataagtgagattgacagaaaaaatacatttaattagaagaatatgtctctattgtaggattgtttggagttttatctgtgaaaaaaatcctctctagaaagcagctgtcctaaaaaatgttctattgcaataaagttagtcattttcagtgtctctttttctgcaagataacctcaggaattgagataatgtgaataagttaaactttaatcagttgaggaaacatcattctaaagatgtttaaattttctccctttcctaaacttatatagtcttatcttacactactaaatatgtttttgtccaaagtttataaaaagtccaaaattaagagatgacggttaaaaaagatacagccagaagactctcttgatattttaaacttatcttctgaagtaaggaacatatattagttttctactgtggctgtaagaaagtagcaaaatctgggtggtttccaacaatgaaaaattgataactatacacttaaacatgtttaaaatggtaaattttatgttaagcatatttaaccacaaaaaaattattagcagcaaatagaataagatgaactctatgtactcccttccccacaccaaaataactttgtagctttctcaaaaaagcttttttaaggaaaaatatatagagatatttgttcaagggagataaagttacagacatggtgctaaaataatttttaaatattagcaacaaatgaacaaaaagtcatctttgtttaaaatagtaaaatgatagtatgaaaattcttttactcaggaacgactgatgatatgtaatcatattaaaataagaattcatatattattttaaattcatctattcaacatctgttgtccataaaatttttacattttattcacatgcacaattttgtcaagtttctgtcagatatttctcaataaaattataattgagattttaattacaacacaattaatacttatgatgaaataaacgtacttatagaaatgcagatcacacggcttaaaaagttaaaaaaaaaaagcctgtgttggcagttttgctgtatttctattttttattttgttttattttataagttctggggtacatgttcaggatgcacaagtttgttacataaacatgtgacatggtggtttgctgcacctacaacccatcacctaggtattaagcccagcatgcattaactattttttgtaatgctctcccacccctgccttcccctgacaggccccagtgtgcgttgttccctctctgtgtccatgtgttctcattgttcacctcccacttataagtgagaacatgcagtgtttggttttctgttcctgcgttagtttactgaagataatagcttccagcttcatccgtgtccctgcaaagaaaatgatctcatttcttgttatggctgcatagtattccatggtgtatttgcatcacattttctttatccagtttatcactgacgggcatgtaggttaattccatgtctttgctattgtgaatagtgctac

SEQ ID NO: 704607 - DNA, 2547 bp, Homo sapiens
aatgaatttgtttattagtttattagtcttatatataatgagtatatataagatatatatatcttatatataaaaacttataggagtttttatatataagatcatgtcatctgcaaaagagacagtttaactccctcatttctaatttggatgtcctttatccctcgcatgcaagaatgattcaacatatgcaaatcaataaatgtgatatatcacattaatcacatatgtagaatggtcatttcagtagatataggaaaagcatttaacatgatttaacaaccttttataataaagatgctcaacaaattaggtataaaaggaatgtaccacaacataataaaggtctttcccatacttaaaaatattattgcaatttctagttccatgtaaatatttactcttatactttattttgtttgttcattttgttttaaattctcaacacaaatcaggtaagcttcaggcttgagaggtagaggcagtcataaaagacttcttctccatgacctccaccactctcatggmtttagaaaccatctgcaaaataatgccactcaaaaatgttcgtgattgcaaatctattttcctgagtgataggccactatattcaatcttctttctgacattctgagttgaattgatattatttatcaaatatgtaatacgtcctttgctaatatttctcatatttttaaatggaagagatattcattctcttcaccagtttaaacaatcttaacaatgactaatttcaaacattgatgttatttgaaataatatcatttttacaaaggcacatttttaattccttactacaaatccttgttagttgaatcctaagttcctattaattttcaacatagaggagaagaatgttcatagagattaaccactatgttttcacacatacataatgcattcttaccaacttttattgacatgctaatatgataacacccagtgcaaggtgccaatttaaattaataagtggctataatatattttaatatttctctataataattttagtataagtgagattgacagaaaaaatacatttaattagaagaatatgtctctattgtaggattgtttggagttttatctgtgaaaaaaatcctctctagaaagcagctgtcctaaaaaatgttctattgcaataaagttagtcattttcagtgtctctttttctgcaagataacctcaggaattgagataatgtgaataagttaaactttaatcagttgaggaaacatcattctaaagatgtttaaattttctccctttcctaaacttatatagtcttatcttacactactaaatatgtttttgtccaaagtttataaaaagtccaaaattaagagatgacggttaaaaaagatacagccagaagactctcttgatattttaaacttatcttctgaagtaaggaacatatattagttttctactgtggctgtaagaaagtagcaaaatctgggtggtttccaacaatgaaaaattgataactatacacttaaacatgtttaaaatggtaaattttatgttaagcatatttaaccacaaaaaaattattagcagcaaatagaataagatgaactctatgtactcccttccccacaccaaaataactttgtagctttctcaaaaaagcttttttaaggaaaaatatatagagatatttgttcaagggagataaagttacagacatggtgctaaaataatttttaaatattagcaacaaatgaacaaaaagtcatctttgtttaaaatagtaaaatgatagtatgaaaattcttttactcaggaacgactgatgatatgtaatcatattaaaataagaattcatatattattttaaattcatctattcaacatctgttgtccataaaatttttacattttattcacatgcacaattttgtcaagtttctgtcagatatttctcaataaaattataattgagattttaattacaacacaattaatacttatgatgaaataaacgtacttatagaaatgcagatcacacggcttaaaaagttaaaaaaaaaaagcctgtgttggcagttttgctgtatttctattttttattttgttttattttataagttctggggtacatgttcaggatgcacaagtttgttacataaacatgtgacatggtggtttgctgcacctacaacccatcacctaggtattaagcccagcatgcattaactattttttgtaatgctctcccacccctgccttcccctgacaggccccagtgtgcgttgttccctctctgtgtccatgtgttctcattgttcacctcccacttataagtgagaacatgcagtgtttggttttctgttcctgcgttagtttactgaagataatagcttccagcttcatccgtgtccctgcaaagaaaatgatctcatttcttgttatggctgcatagtattccatggtgtatttgcatcacattttctttatccagtttatcactgacgggcatgtaggttaattccatgtctttgctattgtgaatagtgctac

SEQ ID NO: 704608 - DNA, 729 bp, Homo sapiens
tgtgttgccgacacaccatttagttgtggttggatgtgtgtagcgtgacctcgttgaagcctgtgttgccgacacaycatttagttgtggttggatgtgtgtagcgtgacctcgttgaagcctgtgttgccgacacaccatttagttgtggttggatgtgtgtagcgtgacctcgttgaagcctgtgttgccgacacaccatttagttgtggttgtatgtgtgtagcgtgacctcgttgaagcctgtgttgccgacacaccatttagttgtggttggatgtgtgtagcgtgacctgttgaagcctgcgttgccaacacaccatttagttgtggttggatgtgtgtagcgtgaccttgttgaagcctgcgttgccgacacaccatttagttgtggttggatgtgtgtagcgtgacctgttgaagcctgcgttgccgacacaccatttagttgtggttggatgtgtgtagcgtgaccttgttgaagtttgcgttgccgattcttgtgcagccatcaccaccaccccttccagaactgttccatcctcctaaacggaaactgtccatctccccattccccttcccctaaaccctggcacccaccatctagttctttctctgtggattggatggctctagggacctcatggaaatgggatcatacagtatttgtccttttgtgactggcttctttcactcagcgtaatgtcctcaaggttgaaccacaatgca

SEQ ID NO: 704609 - DNA, 729 bp, Homo sapiens
tgtgttgccgacacaccatttagttgtggttggatgtgtgtagcgtgacctcgttgaagcctgtgttgccgacacaccatttagttgtggttggatgtgtgtagcgtgacctcgttgaagcctgtgttgccgacacaccatttagttgtggttgkatgtgtgtagcgtgacctcgttgaagcctgtgttgccgacacaccatttagttgtggttgtatgtgtgtagcgtgacctcgttgaagcctgtgttgccgacacaccatttagttgtggttggatgtgtgtagcgtgacctgttgaagcctgcgttgccaacacaccatttagttgtggttggatgtgtgtagcgtgaccttgttgaagcctgcgttgccgacacaccatttagttgtggttggatgtgtgtagcgtgacctgttgaagcctgcgttgccgacacaccatttagttgtggttggatgtgtgtagcgtgaccttgttgaagtttgcgttgccgattcttgtgcagccatcaccaccaccccttccagaactgttccatcctcctaaacggaaactgtccatctccccattccccttcccctaaaccctggcacccaccatctagttctttctctgtggattggatggctctagggacctcatggaaatgggatcatacagtatttgtccttttgtgactggcttctttcactcagcgtaatgtcctcaaggttgaaccacaatgca

SEQ ID NO: 704610 - DNA, 638 bp, Homo sapiens
tctcagggcggtgtgtgtgggggcccgaggcaagtgtgtgtgacagtgcgtgcaggtgtgtgtccatacgcgcggtgcacaagctgacaatactgagttcacaccacggagtgtcagctcaattctgagaatccttcccgtgaacacagttgctttcctagtgattcatagatcgtgttcagatccacagataaaactgaatttgtggctgtaaagcaaatctagagggactcgccgccccgcacagggaccttccagccgcgactgaaaaactgcactcagccacaggctcagtcctgaccgggaagggctgtttcaacataagtctcttgggatttttggttttcaaaagggggcaggcggagctgcaggactgccaggctccagctgagcgygcctcacttgctacaagggaagctctggtgtgtccccttccaaacacagctgctgctgtccgggtgggagtggggagctgtccgggtgggagtggggagctgtctgggtgggagtggggagaaactcgggtttcttgatgctcagagctgagctccgggctggggccccagacctcccccagacaccaaccagatgacctgcaggctacagcaaggcgtggcccgccggagcagaagctcccc

SEQ ID NO: 704611 - DNA, 1314 bp, Homo sapiens
gatgacggcgcagcccagggcctgattctctcccggcccaccctgctctcctcttactgcaagaattttcgcaggggccgtggctggcatcagtccaggtggttcctagaaacagccagtgcccctggtgaggggaccgtagctgtgacgtccccgtactggcaccctgctcctgtcctgtggacccggttctctctcgttctctcgtcatagacagtcactcccacctggacggccccagctggacaagccgaggctcaggtcaagaggacacagggcagtgggacagaagaagggtggacaggagcagggcggggtggccggggagcctggtgcatcctggcgggtcagcaggagaggagcagggtgaggtggcccggaagcctggcgcatcctggactgggcactcacagcccctgaccaccggccctgcagggtccacacgagcatctttgcctgggagtcagcatcaacatgtggcccaggaccccggttaacgcacactgtctgcatggggctccccattgcctatggaagtgaagggggcagtcccagagcccagaggtagtgcatggacgcccgagctattttggggagaacttgggagctctcgtagactctcctcctctggcggagtgcttcctgtgatcgtgctggacgtacagtgtgggcacaggaacaaaccttcatttagaatgggcagcattttctccccagcacctacagacagtgaattttaggtttacaacttctgagggactacaactggacccagtacagacaaaccgaaatgcagacaattaaaagtgtccctgagggcagagggcgcctgcaatggaagctggtggtgcagctccttctcctcgcccgagctctcctgcacagcctggcccgggtcagctgcaggtgggagaggaggggcacactcgggactgccctcgttttgctcatctcttcctgggcccatgggggaggtcaggagtcatcctgccaggcctcaccgcagcaggatgccccaaggaaggaacagggtctacagggccgcgggttgctctgcacggggctggcaacgcagcctctgaggaaaggtctcctcaaggaaatcagtgagaatcatgacatcccattactccagggcaagagccctgctggcttcccgccttcaaacacagccgtgtttgatcccagggagamactgaggcaagctgtgagagggcctctcaggacaggaagaaggtctgaggctgactgctgctgggctttgcggtgacgggggaactggccacggcagacggtgcccctcagctgtcccac

SEQ ID NO: 704612 - DNA, 867 bp, Homo sapiens
ttttggcatcttttccctatagtagtagttttggttcaaattaatttttgaaaaatagcttttgtatggaacagtataaatgggcttatagttcagatactgagcaaatacacaatactactttttactaacaggcacataaaggaaatgacaactattcgtgggctcaaaaaactgcatattttaactaattttcaaaatttacaaatcagtatctcagagaagttaaagaaaatggaaaggaacaaagcccttttagaataattaatatacattgccttgcttcttyccaaaaggaacatgtacttgtcaccctagcttttgttatttagagcactggtacagatacgctgtcccatacatcaggatcaaattattagtttcagtttcacattgtaggaatttaagattttttttttttttaacacaggaaataatctcatcatttccaaagatgtcttcatgtcccatcaatgacatgctaccagacatatcagattccacaggataatggcaccaagctacccaagtagatgtttctggtattctagactgccgttcatgcttgtttcctaaagtatacttaaaagtttcaaatacagtttcacttagaaactgcaaccctccaagtaatgttatgtttacttaggtattaatgttatgtttacttaggtatgtatcagaggcaataatttccaaagcagatcttagaatataaccaatttgttagataactttatctctatcacatctgtttacaagcaaagtattactttgtctggacttatttcatcttcagtgtctgggatcgtgggcaacagagcagatcgcgttaagccccaaaatttttgaggtgacatgtctttt

SEQ ID NO: 704613 - DNA, 599 bp, Homo sapiens
gggacagtcatatgcatatgaaggtcaaagctgagtgatcatggcacctcttattctcatacattgagattagcacaaaaatagccctttagtgtaacattttgtagtgtgatacataaaagaggttgcaagtgaagcatctggagttcctcaaaaattgcattgctgtcatttgtatattacctacaacagatrtggagagctttgaatatccagggccaaattgcaactcttaatcctgttttgtttgttgttgtttgtttttgttgttgttgggttattttgggagatggttgttgtttggtttttggttttttattttgttttgttttgtagcaacgaagtaaacgaggaggttggtccaaaggaagaaagaggaagaaacctcttcgagacagcaatgcacccaaatccccccttacaggatatgttcggttcatgaatgagcgtcgagaacaacttcgagcaaagagaccagaagtcccatttccagaaatcacaaggatgttaggcaatgaatggagtaaactgcctcctgaggaaaaacaggtaattgttcctattcctgactctttgtttggttttgattatatctcaga

SEQ ID NO: 704614 - DNA, 1108 bp, Homo sapiens
tgactgcctcatccacggggttctgagcgatggggtttttgcctctggatgtggatgtgtgcttctctttggggagaaggtccatagttttcaccatcttcttaaaggacttccagaccctcaaactgttcagaaccaggagctccgttctccacccaggatctgcctcccagccacacccacgtccttactgacagggagaagaggcaggcagagggtgcgcacgaacctgaaagctccactgtccggaccccggacgggcctcagacaggacagtgagctccccggagacacacagagaaccgtggtgaaaccctccagcacggtgccttcctcatgccaggcatgaggcggtttaaagccgagtgttcagtaaagggctgactgaattgtcacaccctgggacgagctcccggttgcctctgggctgagcagccaccctgctgacctccaaggtccctgcccactctgctgttctctgctccttcattagggagggccaaggacagtctggtggtttgaagcagaggagtgaaagtcattccttcccgttgacccagcaacgtctggatcaggtgaacttttccagagggctcgccatgtccctggcatagtgctgcctgcccgtggggctgaacctgcttcatcctccattttagagatggagaaagcgagcctcagagaggccaagtgagtccatcaaacattgaggtcacatggccagtacgtaggggctggatggggcagagcgccgcgaggcagtcctgcagggatgccatctgccaaaccctttcctggaactcctctcttttcattctgtgggcctgcaagagaggccgggcaggggcgctgttaggaagctgaggcggcaagagtyagagtgacctgctcaaggtcacacagcgaagatagggcagaggtgaggctccaacctaggtcttccaacgccccattctctggtccctaaagagacaaatgttacagatactttgctttaagatgtactgaaacccatccactcatctgctcactcattccgcaggtgtttctcagggacctacactgtgtttgggcactgtgctaagtactggggagggtttcaatgtta

SEQ ID NO: 704615 - DNA, 745 bp, Homo sapiens
ccgacctggaaggtgtccatgatatattggtgagggaaaaaagcaagtggctgatcaatatgtatgccatgacccaatttttgttttcttaaaaaagtctgtgtataaaaawatatagaacagggacacctcagaaaaagctggcaatgatacacagtgaagcattcacaggggttgcctctgggggagacaagagggagtttgaggtcttttgctttctttctgtaattttttaaaaatgaagattatttggaagaaaaacaaagttagcattttcaaagactgtgtgtgttgaaatggaggccagctgcccacacagggatctccagctttttctcctctgccctggctccctggctctgcctcgactcctggcccaagcccacccctcttgctgcaaatcccacagcctagactccccacagccccataaaacccctcgatggctttgccatccctcaagcctttaggggttcactttcaatactagagcaggaagagccttcgggatcaagactcacctcttcatggcacagatagaggcaaactgaggcacggaggagggagggatacaccggaggcttctgtgaggctgcattggagccaaggtgagatgcggggtcctgaggacctgcccccatcttgggtgcccaaggccaccccctcccagcacagacctctgctgggacccatttccctcagagggggcctggaggatgagggaccagctttgtccctcttggga

SEQ ID NO: 704616 - DNA, 745 bp, Homo sapiens
ccgacctggaaggtgtccatgatatattggtgagggaaaaaagcaagtggctgatcaatatgtatgccatgacccaatttttgttttcttaaaaaagtctgtgtataaaaaaatatagaacagggacacctcagaaaaagctggcaatgatacacagtgaagcattcacaggggttgcctctgggggagacaagagggagtttgaggtcttttgctttctttctgtaattttttaaaaatgaagattatttggaagaaaaacaaagttagcattttcaaagactgtgtgtgttgaaatggaggccagctgcccacacagggatctccagctttttctcctctgccctggctccctggctctgcctcgactcctggcccaagcccacccctcttgctgcaaatcccacagcctagactccccacagccccataaaamccctcgatggctttgccatccctcaagcctttaggggttcactttcaatactagagcaggaagagccttcgggatcaagactcacctcttcatggcacagatagaggcaaactgaggcacggaggagggagggatacaccggaggcttctgtgaggctgcattggagccaaggtgagatgcggggtcctgaggacctgcccccatcttgggtgcccaaggccaccccctcccagcacagacctctgctgggacccatttccctcagagggggcctggaggatgagggaccagctttgtccctcttggga

SEQ ID NO: 704617 - DNA, 306 bp, Homo sapiens
atcagtgaacaaaacaaaattctaccccatatttttggataggggaggggggggggaggagaataaaataacaaacaatatatataagtaaaatatatatgtttgaaggtgattgtgacatgatcttttaaaaaaacaggatttaagagattagtggtgccagggagtagaggtattgcaactcaactagagtgagcagggtatggctcattaggaagggggctggaaggcaatgagcaatgtggtatcaggagaaaaaacattccaagcttacagtcagcayaaaggccctgaggcaaaaggaag

SEQ ID NO: 704618 - DNA, 619 bp, Homo sapiens
tacatggagtgagtgtgttgggcagagggaataaaacaccagtgcaaagttgggtttgtctgtttccccccgaaatcacacatcaacttaaattctcatcaaacaaagcatctttttgaaagacttgtcctgagtgaagagagtgggaggaaaattcttcctcaggattaagtccatggtggggcagaagaggctgaagagcagagagtgatatcatctgaagagagctttgacagacaggccaggctcagccaatgacaggctcctgccccgacctctgaaagtgtggaaaactcactctgggctgagatgggtgcagcccatgggggscccagagtcaagtgaaggcatagagagaagcactcctgacaaaatcagattgtttatgttcttacagatggaccttcttccaagaggaatcagcagagccagaaagcaagaggagccagaaagcaagaaggttggattttgttttaatcctttctaggcaaagggatagaaatcaacaggtgcagttcatccctctatgtcaggaactatgctaagtgctttacgatgagaacatatctatgttctcatcaaattaaagaaaaaaatagtttttccagtttctaaattg

SEQ ID NO: 704619 - DNA, 652 bp, Homo sapiens
ttgatttgattcaaacggaggacatccagattgtggcccagaaaaacccattttttacatccacattcaaaaatgcaaaaatatgtatgctgctaatcatatatgtatgctattaatcatatgatctcttatcaaatactgccctggcgtagtctgagatgtagcagtccaagtagcrgaggcgggggggtgaatctggtggtttcagctgaccacaagagctcccagcatgctatgggagctcagatggtgaagaagtgcagtcctaggctaccttaggagcgctgaaaggccacacccaagaagagatgctcgtctgtcacatggaagtcagaccacacaggagcataaccttcaggtctgaagccttgatggcagctcctccagtcttacctgccctggacaagtcactttggtgtaagtgttgggctgtgcctgaaaggacaggacttgccagataccacagcaccgaagtttctccattcgatgggagagagcaatgaaatcattttaaaacattggctctgtcaaagaattatgttttgaaacctgctttgtaaaactcttttttttttttttcaaagtaattgccctggtctttttctgtcactgtaatttaacttgaactcatgtcctccgtgggctaatggta

SEQ ID NO: 704620 - DNA, 636 bp, Homo sapiens
taaaacacacacacatacatacacatttcataagtataaatgtgaaattagaataaaattggtagattatctcaacgtccaaaaatattgagccattaatagtaaagaaaaaatagaaaaaatacatactttttgtttttgcacactgcatataatttcatctcagttcagaatcttataaatgctagaaattaaacattggctcaatgtattagtcagaaaattagaactaataggatgtggacacacagacagggaaacagagagacagaracagagagacagagacaaagagacagagaaaaagattgattttaaacaattgacttaattgattggcaagtcttgaatttgaagagcatgccggcagactggagacccagggaagtgtgatcttgaagtttgaaaccaaaatcaatcagaaggcagaattccctcttcatctagaaaactggctttttttctcttaaaatcttcaattaattagacaatgcttcacacattatagaatgaaacctgcttaactaaaaatctattgcttaactaaaaatctgttgatttaaatggtcttctctaaaagatattacaatgacatctagaatagcattcgatcaattatttgagtgaccacagcct

SEQ ID NO: 704621 - DNA, 1490 bp, Homo sapiens
tgagctggagctaaagtataggtctccacttcttctagtgctcttttgcctcaatgtattgctagttacttataataggctttattctgtaatcatttattgagtgtatacgatgtgcctaaaaatctactttgcactgaaggagggtataaaagatgtaagacgtatcctgagcttctcatgtactacaayctatttggataaaaaaatgtatatgagataattagggaagaaagtgaactaagggaatattgagagagggaagacaaatatgattcagaaaggtcaaaagtcaattgtgagttaagaccccaaagatgcacagagtataattttttaagcaaaaatcaagaaaaaagtgctgaagatgagagttgtttttgaacaatgtcttacctggagttgtgggcaatgttaggaaataaggtaaataaatgtctgttagaaagctagaactgaatgcaaaggacatttgttcatttactccctaatacttagtctttctttgtgttacccaaagtactctttctcatttttagctatgaagtctgagtgggattaactttacccagatttattgagctaataagtttataccatcttctgtcctcaattatttttgcaatgttgggcaaataatccaattagagtcagtaagatgttaagatatatttgtaggcattatagggaatggaaaatatatctttctttcataggaagtgaggtttacaacttcaatacccatttctataataagggcagagcccagacattccagaagcaactaggtagagtctgagaatgaagacaggatctcaaaggacaggaggaagagaaaggaagaagcttgttactgtttattacagttttatctagatgaagacttgtctgaagatatccttgttccttttacacaaaacagtggatctcactttttgtttaaatcactttgaattattgtatataatcgcatatatataatttgctgtataataggtatctttacagcagcaccccactctactggtaccaatttgctgtattagtctgtttttacgctgctgataaaaacatacctgagcctgggtaatttaaaaagaaaaagaggtttaatggactcacagatccacatggctggggaggcctcacaatcatggcagaaagtaaaaggcacatcttacatgacagcagacaacagagaacaaaccaagcaaaaggggtttccctttatgaaaccatcagatctcataagacttattcactaccacgagaacactatgggggaaactgctcccatgattcaattatctcccaccaggtccttcccacaacatgtgggaattatggaagccccaattcaagatgagatttgggtggagacacagccaaaccatatcaagccctaacgtaaacactaagagaaagattcaagctggaagtagaaacctgacgttaaacttgtggcaagcttaaatgaagtcataaactgg

SEQ ID NO: 704622 - DNA, 1490 bp, Homo sapiens
tgagctggagctaaagtataggtctccacttcttctagtgctcttttgcctcaatgtattgctagttacttataataggctttattctgtaatcatttattgagtgtatacgatgtgcctaaaaatctactttgcactgaaggagggtataaaagatgtaagacgtatcctgagcttctcatgtactacaatctatttggataaaaaaatgtatatgagataattagggaagaaagtgaactaagggaatattgagagagggaagacaaatatgattcagaaaggtcaaaagtcaattgtgagttaagaccccaaagatgcacagagtataattttttaagcaaaaatcaagaaaaaagtgctgaagatgagagttgtttttgaacaatgtcttacctggagttgtgggcaatgttaggaaataaggtaaataaatgtctgttagaaagctagaactgaatgcaaaggacatttgttcatttactccctaatacttagtctttctttgtgttacccaaagtactctttctcatttttagctatgaagtctgagtgggattaactttacccagatttattgagctaataagtttataccatcttctgtcctcaattatttttgcaatgttgggcaaataatccaattagagtcagtaagatgttaagatatatttgtaggcattatagggaatggaaaatatatctttctttcataggaagtgaggtttacaacttcaatacccatttctataataagggcagagcccagacattccagaagcaactaggtagagtctgagaatgaagacaggatctcaaaggacaggaggaagagaaaggaagaagcttgttactgtttattacagttttatctagatgaagacttgtctgaagatatccttgttccttttacacaaaacagtggatctcactttttgtttaaatcactttgaattattgtatataatcgcatatatataatttgctgtataataggtatctttacagcagcaccccactctactggtaccaatttgctgtattagtctgtttttacgctgctgataaaaacatacctgagcctgggtaatttaaaaagaaaaagaggtttaatggactcacagatccacatggctggggaggcctcacaatcatggcagaaagtaaaaggcacatcttacatgacagcagacaacagagaacaaaccaagcaaaaggggtttccctttatgaaaccatcagatctcataagacttattcactaccacgagaacactatgggggaaactgctcccatgattcaattatctcccaccaggtccttcccacaacatgtgggaattatggaagccccaattyaagatgagatttgggtggagacacagccaaaccatatcaagccctaacgtaaacactaagagaaagattcaagctggaagtagaaacctgacgttaaacttgtggcaagcttaaatgaagtcataaactgg

SEQ ID NO: 704623 - DNA, 1070 bp, Homo sapiens
tgttgcagtcaaccaaatcagatctctaaagaataagtctacagaatgacagaatgctgcatttattttcttctagagacattctctcctcaggtgtcccaagttcttagatgaccactttgaattctgtcagtttgacgatttttcctcctcaacttgtggaaaattcacatgtcaccaatacatcatgatcatgaaaggattcacacatccctgcattatgtggttcagagacccagggagagttatagagcacagactctttcaaaaaacaaacaaacaaacaaacaaacaaaacacaagaaagccaatatagtgtttatatttattaaatatttattaaaggtaaaggattgccttttattctgatattatgtctttcctaaattttgctgttactatatattttatgaaatgatggctacaaaagatagttgctttgtaaaattgtacatggcaaaataaaaagtttccacccctaagtctgtgtgtgtctgtttgtgtgtgtcagtgtgtgtgtgtataaacttggaagtttgttgtggggtctgaaggatgtgaggtatccttttctctatacttacatasagaattgtttttttttcctatcaaagccctgtgtagtctacacccttcctacaacaagaatgtaaatcaaatagcaaacatttggaggtaatgacatagtagactccagcaatggcatttctgatgtgatgagcagtaagtatttcagatgacaagaaaatctcccagtattataatttttagatgtaagcagtaattacaagacctatggataactggagttatagaaatactattgttaacacagtaattcctaagtagttgcaaacaaagcccaagttttaggtgtaagcagtaattacaagactcctggaataactagagttatagaaatactattgttaatacagtaattactaagtagttgcaaacaaagcctgagtagagatttattcttcaaaaggccaacatgggctaataatcagcaagtgcatagttctggaacaaagagaaaaaaaagatatctcctgtttctttgttac

SEQ ID NO: 704624 - DNA, 572 bp, Homo sapiens
ttgctmatgatagttattctacaatctccacaagaaaaatataccttttatccggaaatattggtttaaggcaaataaataaaactgtgcttgctctaaagctctgcactacaaaagcaaattttccagtctttattccactcataaccactgctttccccaccaggctaaagtgcttcttagtcttaaatagggtttttaacttcataaggtacaccattgtttatgttttagggtgcaggtccatatagtcgtaatacttaaaacactgctacactgatgcttttgtggctcatggtttcctggttctttgatttaacacctggcttcctggtatctatggctggttaaatatctaaacctgcattattagtgctttacaataataattcccttgactgaagtccagaaatactaaagcacttcttttttattgctgtgaatgccttagacttatcttccaaaataggatacttcgtttctattgcatatataactgaaatattttataaactcactgtaatcaaatcttataaaatctgaatcaacatgaaaagttgtcaatgcttgaa

SEQ ID NO: 704625 - DNA, 621 bp, Homo sapiens
ttattgtatgctatacatacacattgtagctattttatataaccctataaacaatttttaaaataaattttaaattgtctctttatattatattcactaacaaattcaaccttatcaccaacaatataatgttatcatcaggcccaaccttcatccccttcgttatactggtcttcttcttgtctataaaatgtctgcttttccataccattgcacctatcttgaataacctgtgtccttcaactacccatgtccaaayactagttcattgaaaagagctcattctttcaaaatagataagatatgtatttctatcccagctctagtaccttggacaagttaatctctttgagcctcagttttctcatttgtaaaatggggagaataactggaccttcctctctgctaaaaattccttgaatgttcactgagatgacttaggcagatcttctggtacatactggtactcattaaatggaatcgttgttattacttatatttcaagacaattactgtgccccttactccatcatgtctcccttgatgcaacctgagggcatctctccctcctctgaacagcatctatttagcattgaaccagacactaagatgtgccattca

SEQ ID NO: 704626 - DNA, 633 bp, Homo sapiens
tgctaaggaatgtgaaggccctgtcaccctcccaaaggcatccttgggtcctgggagcactgctattcccatgccactgtggggcaacgagggcaagatctctgcaaatcctcccggatagcccattccataggagctggaaggcttcttcccaacatagcatgcacccctgcttctctgtcccttcagcaaagagggaggaacagagggtgagggagacctttatgattccatcaaggctactttaaagtaacacgtttgagtagaaaattaggtatcatacatatagtctcttaaatatctcttaatggctgccatccttgtgccaggtactatgtttcatgaacttcatcacatttgttactagcaaaaagtgtgcaaggcaggtgtcattccagttgacagatgargaaactgagcctcagagaggtgcggtaacctggcccaagctcacaaagctagtaaatggcaaatccaggactcaaacacagtctaactaaaataatgcaaatacaaccatagctggcactaaaatgtaaaaactatttttgagcagtctggaatttgttaaattatattctgactgcagtggtaccattgcagtgctaccattacatttctccagtcccaagc

SEQ ID NO: 704627 - DNA, 2241 bp, Homo sapiens
ataatcctttctggcaactcagggttgacagaaaattcttcagtgaatcctgaaaaggacaatgttcccaacaatgcatgtaggccaacccccagcaagtttcaggatggcttcttgtgacatctctgggctcaagcatgcactaagcacacacaacacaacccacccagctggagaagctctgccacagtgcctttatcatactcattacgggaaaaaccctcttaaatatccacattttaaaagcctcaaaaaaaaaatgcagaatccttttattatgatcccataggaaaagtttaccttctaaagtagtggtgacttagtggcaattaaatttcaattaatatatttattgggtgtttcttttaggtctttacaacacatagaataaataagtggataggcatgaaccctaccacaatcaagtagaaggtacagctaggaaataacaaagcaatggctgccctttattgaagagcaaagatgtagactatgtgctttatgcaaattatctcagttaatccttgcaacaatccttagaggtgataacaatgaccacccccaatttacagttgaggaaagtgagtttggcacatattaagggggcacacaactcctcagtgcctgagaggggtctggagtgccagtctgactccagagaccgtccattgctgctgggtaccaccttccaggtgctcccatttcacagtcgagagaggagtgacatgcacacgacaggtgaaatatgaggaagaggaactgccttggagggccctagaatgcatgtcccaggagatcaccgtcacagtccttttagggtcagagttcaatcccatttgttccacaggcagggaggcaggcaggctgtgagcacttcccatgtgcaggccctctgcaattcactagagagagagggccctaccctgggtgcygagggaactcagacctataggagtggtcccctagaggcatgcccaggggtctctgggagcactggacacttagcacactctatgtgcggtaaggttatcacaaggttatgacaggtagaggcaatattatgtgcaaatgtttatacatcatgacccactggggatcaccaagaggtttggtatgaggagaggaagtaggggagggagagaggggaggtagggaggtggacagacagacagacagacagagtgaatatgaagcaaatggagtgtggtgagtgtgtacaccatgagaacagagaagcaggcaggcaccagaccagaccacagaggaacacatgcaatgatgagagtctgggtagtggggaaccctcggaaagatcttcagatgttaagtggagtcaagtcaagctccaatggaggtttcagaaaggttactccacgtgcagtgcagaggatggtgggatgcagataggacagctgtaatagcccatgcacaaggtgacagcagtgggaagagaaaaggaaatgaaaagtgatatttggaaggtaggattggtctgattagattttgggtaaaagggaaggttgagcagaatcctagggagctggctgaaaggtgacaggcaatacagagaaagggggactcaggggacttcaacaggtggtattgtggggtttgcagtatgttcgagtgatgtgtccttgaagtaactggatgtttctgggattgaaggggcatcctggggaatccaagtaatggactgggtggagatttcctctggagaggctgctgctatcattaagttccagtgtaaatgtctaactccagttctggcccagatgaagagaaactttttgatgaccacacactctgtattgggtagaatctcaggctgtctcttgtcactgactgtatgttgcaaagagggctaaaatctgaggtttcagctaaaactctcaccagggaaaagcaaaaggcaaacttgaactaattactctgccagtcgagatgacctttagaaacaagtttgaacttttgtcagcgtgttatcggtatttccatcaggaagtatttcaaccagctaatgtttgccaactgggaggaccaagtgttcggttcagcatcagggtttctgtgctaatctgaccttccaaggtatttaaagatgcaaaggccagattcaccacttgagttcccaaatctatgggtgttgaattccatagtgctgtctaccaacatttgcctagacttgctctctacattttcctcaaaaaaaaaaaaaaaaaagaaacaaaaaacaaaaac

SEQ ID NO: 704628 - DNA, 2067 bp, Homo sapiens
ctcttatgactttaaacctatacattatcttcttgctgttatgctgcttgatctcagctgaagaaccatagtatgttttcttaatcttctgattttttttttttttttgagacagagttttgctcttgttgcccaggctggagtgcaatggcgcaacctcggctcactgcaacatccgcctcccgcgttcaagggattctcctgcctcagcctccctagtacctgggattacaggtgcctgccaccacgcccagctaattttttttttttttttttttttgkatttttagtagagatggggttacaccattttggtcaggctgtaaaactcctgacctcaggtgatccacccacctcggcctcccaaagtgctgagatttcagacatgaaccaccacacccggccaatcttctgatttctgacatagattgagtagaaatataaactaaataatatcacatgaagtaaagtgttgctgaaaaacaaaatgttggcacagagaaatattgggaaaaataggcatctttgtttgtttgtttgtattaaatatagcatgaattgacaagacttctctagggaagagatattttaaagaaaaatgtgtttattccttacaaaggcactaaacatggtgaaagctgttgtagcagggaacagtaaactccaagattctaaggcaagaaggagcttggtgtcttccaagctggtaccatggaaggccagtttggtgaaaatgtgatatacaaagggagagagaggaatgaagtaagatgggaacaaatcatgaccaaatttacttaagttcactaatttactaatatctatctacacagtccctgtgataaaaccactactttagcacagacatatccctttgttattgcccagttccaattttgttaatattttctagaacttaagaacttaattttcagttgctactaatgaactttctagtttaatcgggtcctagcaattttgtgcttgttctttcactctctctctcctccacaataagttgctgaagaatttggctaccccacgttcccctgatatttgtagcgcctttgggatttgtttatttatttttcacttacttaaatacctactgcaagggtaattttattatatgagcttaacaaaaattctgaaatcgtaaatgcctaagaatatttttatgccttcaaatttgaggaattatccagctggatatttttcaatactttaacattattacttcattattcttacatcctgctactaccaaaatgtttgacaatctgattcttgtttttatacagatttgcaatttccctcagaatgcatttggaatattctcattgtctttgatattattaaatttcattaaatgtgctacgtaagggttttcctttttcctcttatttagcatccatcaactcttctgacttgaggagtcttctgtcttttgttaagtttatctttattaaattttgtgtatattttctgtatctttagagctatcatctagaagatttcttcaacattatcttgcaaattactaatatattcttcaagtatatccaggctggtatttttccttctattatgttctttatttcaaccataacatattaatgtctaatattaccaattatctgatttaagttcctgatttcatattgctgcaatcttaacctttcctgcctaagcacaaatatacatattatacttatttaaattataagtctaattattgtgcttcaaatgtgtatattgttcagtttaacccatagtggcattagtcaggtatctagtgtctgatttgtgagcccctgtttccctggaggtatcagctactctgtgcagtcactggcactaggggtggagataagcaccaaggcagaaaactccaaaccccactatggataacctctgtttgctgccactcccccaggcaaactcatcggtccttttcacttccacttttaagaaagagctggctgaggagactgtctttgatactaatctaatggcccaggcgatttagaaaggaagaggctgcaagctccaggatgcctgctgccg

SEQ ID NO: 704629 - DNA, 2067 bp, Homo sapiens
ctcttatgactttaaacctatacattatcttcttgctgttatgctgcttgatctcagctgaagaaccatagtatgttttcttaatcttctgattttttttttttttttgagacagagttttgctcttgttgcccaggctggagtgcaatggcgcaacctcggctcactgcaacatccgcctcccgcgttcaagggattctcctgcctcagcctccctagtacctgggattacaggtgcctgccaccacgcccagctaattttttttttttttttttttttggatttttagtagagatggggttacaccattttggtcaggctgtaraactcctgacctcaggtgatccacccacctcggcctcccaaagtgctgagatttcagacatgaaccaccacacccggccaatcttctgatttctgacatagattgagtagaaatataaactaaataatatcacatgaagtaaagtgttgctgaaaaacaaaatgttggcacagagaaatattgggaaaaataggcatctttgtttgtttgtttgtattaaatatagcatgaattgacaagacttctctagggaagagatattttaaagaaaaatgtgtttattccttacaaaggcactaaacatggtgaaagctgttgtagcagggaacagtaaactccaagattctaaggcaagaaggagcttggtgtcttccaagctggtaccatggaaggccagtttggtgaaaatgtgatatacaaagggagagagaggaatgaagtaagatgggaacaaatcatgaccaaatttacttaagttcactaatttactaatatctatctacacagtccctgtgataaaaccactactttagcacagacatatccctttgttattgcccagttccaattttgttaatattttctagaacttaagaacttaattttcagttgctactaatgaactttctagtttaatcgggtcctagcaattttgtgcttgttctttcactctctctctcctccacaataagttgctgaagaatttggctaccccacgttcccctgatatttgtagcgcctttgggatttgtttatttatttttcacttacttaaatacctactgcaagggtaattttattatatgagcttaacaaaaattctgaaatcgtaaatgcctaagaatatttttatgccttcaaatttgaggaattatccagctggatatttttcaatactttaacattattacttcattattcttacatcctgctactaccaaaatgtttgacaatctgattcttgtttttatacagatttgcaatttccctcagaatgcatttggaatattctcattgtctttgatattattaaatttcattaaatgtgctacgtaagggttttcctttttcctcttatttagcatccatcaactcttctgacttgaggagtcttctgtcttttgttaagtttatctttattaaattttgtgtatattttctgtatctttagagctatcatctagaagatttcttcaacattatcttgcaaattactaatatattcttcaagtatatccaggctggtatttttccttctattatgttctttatttcaaccataacatattaatgtctaatattaccaattatctgatttaagttcctgatttcatattgctgcaatcttaacctttcctgcctaagcacaaatatacatattatacttatttaaattataagtctaattattgtgcttcaaatgtgtatattgttcagtttaacccatagtggcattagtcaggtatctagtgtctgatttgtgagcccctgtttccctggaggtatcagctactctgtgcagtcactggcactaggggtggagataagcaccaaggcagaaaactccaaaccccactatggataacctctgtttgctgccactcccccaggcaaactcatcggtccttttcacttccacttttaagaaagagctggctgaggagactgtctttgatactaatctaatggcccaggcgatttagaaaggaagaggctgcaagctccaggatgcctgctgccg

SEQ ID NO: 704630 - DNA, 1075 bp, Homo sapiens
ttaagtaacaggaagaaatcagcagttgcaaggggaaaagggagaggaaagaagatacactgcatgggcaagaaaatacttgtgggtgattgacacgctcactcacttgactatgtggatggtttcaaacatctacacatttctcaaaacctattaaattgtatgctttaaatatgttgtttattgcatgtcaattatacatcaataaagctattaaaaactttttaaagtatcaaaattttgcatcccgttctctgatactgacatctgtatttttttgaaaaaaagaaaagcatctagaaaaatgaagatactggattcaggaaaaagggcttccaaaataggagagacacaaagggaatccccagaatgatggcaaagaaagttgtcagggcaaagcaacagcttgaaatcatgcctaaaaagccaaaatttcagatcacagaagaacagaaggctccagaggaaagtactatgaaaaacaaaataaaattaatagattttctgatgtattygagtgtggagagaaaatataacttctagcaagatgagggatgaatttcagggaagatcatagaaaattaagcaaaaagcaaaaagacagctagtagcaaaaagttagcatagcaggtgacttaatattcgtgtagccaaattattatacaatcttatttggagaacagaagaaagagatggatgggcaagggaggagttcaggaagaatcagaaagacaactaaatttccacagtaacaagtcaataaacagcatccaattaaataaatagtgataatacaaccaagattatcaaatttttaggaatacaaagtgtaaatacctaaagaaatataatacctcaatgagctgaaggtgatgtgtctacagaggaagaatcagagtgaaaattataacctaggtctactttgaattacataatagatgagaaagaatggggaaacatgagtcagagaaaaatgggaatttttttgaatttggattctttaataggctcaaaataagtgtcatacagagtgtttattcacaggcttgaatgagaattgaagaaattctgacaa

SEQ ID NO: 704631 - DNA, 1179 bp, Homo sapiens
caaaatcatttccctagagtgttctcagtcacttagacttcccttaggcttcacataataatagaacggaatgaatatgcattgtgaattgtgagtatgaatttttttttgcaagcattataggaaagctgtgtttgagctatactacgggagaaattttcattgctttcagtcttatacatttgtgaataaatggaatagcaaatctacctcacagaattgggttcctatgatagggaaatagcctgaagacatcaaaacttcattgctgagggctttcttatcatgtaatcccaagtactttaagtaaaattgagaattaattaaaaagaatgccaaagagaactcaaagaaccatagaatgatttcagaatgtccatgtgcrctaaaactcttgccaatgatcaaaagaacagaagttcatccagaattgtcttttgtagagccttatttattatttatttatttatttatttatttatttatttgagacggagtcttgctctgtcacccaggctgcagtgcaatggcatgatcttggctcactgcaacctccacctcccaggttcaaccaattttcctgcctcagcctcccaagtagctgggattacagccactcaccaccacacccaggtaattttttgtatttttagtaaagatggggtttcaccatggtggccaggctggtctcggtctcctgacctcgtgatccgcccgcctcggcctcccaaagtgctgggattacaggtgtgagccaccgcacctggctgcctgacttacatttaataaaaagtatgatttttacggtcgtgcttttgaaaaagcaaatttggaaagatgtgtgttagaatgaatgtgtacatggtccctatcacaatctgccagctatttctcattagaaacaatattggcacttagagattgaaatatgctgtttatttgacatcaacatatgtccaactgatcatgatacagttatagcactctctgtgatgtagactaccattctttggggaaagtttactgcagttttgtgggcatagtccaaacatccagtttcgcaaatttcactgccaagctggcaatgaattagtgaatttcattcaagagaactgctgggatcctaacctcagtgaggcagagagctaagtgccaataaagaaaatgagtaagaaagac

SEQ ID NO: 704632 - DNA, 627 bp, Homo sapiens
ggtttgctgatgccaagaatttgaataatcaggacagggtagatataaagaaacaaaaaggaaagcaagatagatgtaagcctgaatattttaaaagaggtaagctttaaaatgtgagaaatatgtggcaagataaaataatattaaatcattcactagatagctctcatatgatgtgtttgcaacttcttctgaatacaaattgattgtttacctattcataattctgagataaggaaatcttagctatagaagttcataggttagaaaaatgggccctctctcattagttttgaggtaggagatcagcaggacttgttctccamatcagtggggttatgatcccactgatcaaaacaggatgtagtaaagaaaccagctaaaatcaaaatggggaagaaagcaacctctagttgccctcactgctaattatacactaattataatgtattaacatgctgaaggacactcccagtagcaccatgacagtttacaaatgccatggcaatgcctggaagttatcttacatggtttaaaggaaagaaaccctcagttccaggaaatccacatcccttttctagaaaattatttaccatataattaaggagtagctataaatctagctaa

SEQ ID NO: 704633 - DNA, 854 bp, Homo sapiens
tcttaatttccacatcctcttaactgcaaataacacaagttagtagcctcggttttttctctttagcctcaatgccaagacctggttgagtttatagatacagacggcaaccatcacctcacattaataatatggagctaacttttattttgtgttatatatcttgaatgagaagaaaagctttcagggaacaaaatgattgatacctttgttaaatgcctttgcacttcctgagttctcaaatgtcacaactcctgagcactcatttgcagtttgagaattataggcacaatcaaggtctagctgtaagttaatttccatttgattttcacccagttttagagcattcttttttctccttttattgatatataataatttacaaatttatggggtacatgtgagtgttccttgcacgcatagarcatataatgattaagccagcatatttggggtatttattaccttgaatgattatcatttttatttgttgatatcatttcaagtcctgtcctccaattactttgaaatgtgcataatattattgctaagtatagtaaccctagtctgctatcaaacattaaaacttatttcttgtatctaactatatttttatatccataatcaaccctgcttcatcctgcccccctccaaccctcgccacaacccacctttcccagtgtctggtatctatcattctattctctatttccacatcaagtttattagctcccacatataaatgagaatatgtggtatttgtctttctgtgcctggcttattgtacttaatgtaatgacctccagttccacccatgtgactgaaaatgacatgatttcattatttttatggtc

SEQ ID NO: 704634 - DNA, 2427 bp, Homo sapiens
acacttggcatttctaccacacttttgtcaggagaagtgaatatacaaagcaccaagagtcacttcatagaggagataacattcgatttgaatatggaaagaagatttgataatttaaaaggctcctatgggaaaggaaaagaataaaagaaaacatcataattctcactgtagcagaaaacaaattccattagatctgtgaacaattcattctttagataacatgactcttcaatagtcagtaatagcatctcagtgccatctgtggtttaacatgggcccaaaaacatagggtaaagtgtcaatagtaagaaactctggctagtaatctctgaaatgcatggctgagactaaggtgaagcacatggggtgtccttgagtgcaaaatttaagggtcaaccatgtacttgcattaccctgaaagtctcagcctagtgaaccctagttgcagtccagctgaagttttttaatacaatatgaacgtcgccatttgttctgagttccagagttatgttttccaatacagtagccactagccaaatgtgactatttaagtttaaaataaacgtaaataaagtacaaacttcagtaatccagttggtctaggtacaattcaagtgctcaacagctacatgtggctagaggcttccatattggatagtgcaaatataaaatatatctaccatcacagacaattttgtgggacagaactgacttgcctcagtctacaatccaagatttaactgagactagatgctataatggactccagaatgaaggagaggttaaaagcagcttttattatgctataatttgttggatcatttacattctctgtctaaaaacttttaaatatttttgattcattcgttctatcagtattcatggagcagataccttgtggaaagtactgtgtatggacaggggcaagaaagtgattctcacagatgaattaaactcagatcctcccttcaaagagcctgtggcataatgggaaagctaagacttgcaaaaaataacagtaacataaagtggaataaactcccaaataggaattaagggtggggagaaattatttactgttaaatctatcaagaatttgttacagaaaagatggtattcacattgtgcctttatgaataggtaggattggaaaatgtaaatatagttgcagggagagctactacctttttaatgagaaaagtcaaggttagaggaaaatctgagccatacatgggaagaactatttggttggtttggaatataaagtgtgtaggggttggcatatttcttctgttttattggtactttctgttctgatagcttctgagaaactatattaatgtgaatacaattttaatactaatagatttaaattaataaataagtgtcatgtcattaatctgcctgatcttatgcataattaaattacatgcatcataaggtcactgtatcccctgaggttcaatgacagccayccagttttcctgtgagaagacagttgtgtgagagctcaacaattcctggtctaactggctcttaaggaatagtatcctgctgtgctgtaacagggatgttagggccttgtagccaccagaggactgagtgtattccatgcatatagtcaagagttgtccaaatctgctttaagataggttagccatttttcagaaaaatgaagaaaaacgctgcattaacaaaacaccattcattgccaagatgatgcttaataaaaaaaatcactgagagctcttttttatttccagcaataggtcagatttgtttcttccagccaaccctgattttctcaattactgttaatatcctgggtcaaagagttaattattttctaaaaatatgatttaatagataatatttaccattttagcacacaaaccttgtaaacctaagatatcaaaaaaaataacaaaaaactacagtgggttaaatgtactacatatcgatggatgtatgtgtgtgtatgtgtgttcatatgcacataactaaaatacagtaaaatgttttcaggtagaaatgctttttttcctggggatttaaaattggactggaaaatgaatctcaggcaaagtacaaagcatgattacaattcatatctgtaaaaccataaggaaaatctgaagagggctgaacataaataccccaagctgccagcttctttacattttgccacgttatggaaatatatctgttatatagcaactagaaaatgcaccacccaaattatatgtagatgaaatgtctgcaataaattctaaataacagaataaccataataaacgatgcttttgaaataaaaataaggccttttcatctaacagagagatgctgtaatttaaagggagtcattaataaaaataggacataaaataatatatccaagcaatatcccaactagctcttcttctg

SEQ ID NO: 704635 - DNA, 1337 bp, Homo sapiens
gccgtgggcaagctggggccatgaatacccaaccgttcggaagggaggccaaaaagaaatacgaggtagggatgagatgttgaagaagcaacgtagaggagtggaatcacacgaacragtgtggcaccctctctgtgtcctgcaaactcgcactggcaagagcgcgaggtaacagcctgttctccagctgcccggaggctggatgaccttcacaggccccaaattctaacctctagagcctgccatctccttcctcccttatattcctgtttgggtggtgtttcccagactcctgtgggatctggacgcttgtttccaatatttgaaaattatttccacaaaatgaaatcctttcattagtatcatatcacttgccctgtccatactactcattactaggggtacctcgagtaagcctcgcgccttgttaccaaaaaggataccttgacatacttgccctttccaactcacatcttcccgagatgcccctttcttgctggctagatagaatttattcactctctcagcttctctaccatatggtggtgtgacggtcaattttatgtgtcaacttgactgagctaagggacacccagatagctgataaaacgttgtttttggatgtgtctgtgagtgtgtctccagaagagattaacattttcatcagtagacgcagtggaatctaccctcaccaatgagagtgggcatcatctaatcccttaagaggccaaatagaacaaaaaggcagaggaagggcgaattctcttcttcttgatctcggacatccaactcttctgccctcagacattgaagggcctggtgtttgggtctttagactccaggactccaccctcgaattctcaagtctttgaccttggactgggggaagtcacgccatcgtcaccccattgacccccctggttctgagatcttcacactcgggctggatcacaccactggctttcctggttcttcagctcgcagatggcagatgatgcgacttcttagcctctgtgattgcgtgagcctgttcccctaataaatctcctggtgtatgtctctgtatcttattggttctgtttctctggagaaccccaatacagggggaggaagagacacttgctctttataaatgggcggtgtgtcacaattctgtggtgattttgagctaattttctgctttggaaccactgaagaggcttattgaagactggaatggaatggaattttgtaatggtagagctgtcgcgtatgccaattacaagtgttgcgggcaggacagttacttcacaggcagaagtagtgtctgtgtgattctctgagaagccctgccttcc

SEQ ID NO: 704636 - DNA, 1337 bp, Homo sapiens
gccgtgggcaagctggggccatgaatacccaaccgttcggaagggaggccaaaaagaaatacgaggtagggatgagatgttgaagaagcaacgtagaggagtggaatcacacgaacgagtgtggcaccctctctgtgtcctgcaaactcgcactggcaagagcgcgaggtaacagcctgttctccagctgcccggaggctggatgaccttcacaggccccaaattctaacctctagagcctgccatctccttcctcccttatattcctgtttgggtggtgtttcccagactcctgtgggatctggacgcttgtttccaatatttgaaaattatttccacaaaatgaaatcctttcattagtatcatatcacttgccctgtccatactactcattactaggggtacctcgagtaagcctcgcgccttgttaccaaaaaggataccttgacatacttgccctttccaactcacatcttcccgagatgcccctttcttgctggctagatagaatttattcactctctcagcttctctaccatatggtggtgtgacggtcaattttatgtgtcaacttgactgagctaagggacacccagatagctgataaaacgttgtttttggatgtgtctgtgagtgtgtctccagaagagattaacattttcatcagtagacgcagtggaatctaccctcaccaatgagagtgggcatcatctaatcccttaagaggccaaatagaacaaaaaggcagaggaagggcgaattctcttcttcttgatctcggacatccaactcttctgccctcagacattgaagggcctggtgtttgggtctttagactccaggactccaccctcgaattctcaagtctttgaccttggactgggggaagtcacgccatcgtcaccccattgacccccctggttctgagatcttcacactsgggctggatcacaccactggctttcctggttcttcagctcgcagatggcagatgatgcgacttcttagcctctgtgattgcgtgagcctgttcccctaataaatctcctggtgtatgtctctgtatcttattggttctgtttctctggagaaccccaatacagggggaggaagagacacttgctctttataaatgggcggtgtgtcacaattctgtggtgattttgagctaattttctgctttggaaccactgaagaggcttattgaagactggaatggaatggaattttgtaatggtagagctgtcgcgtatgccaattacaagtgttgcgggcaggacagttacttcacaggcagaagtagtgtctgtgtgattctctgagaagccctgccttcc

SEQ ID NO: 704637 - DNA, 626 bp, Homo sapiens
ttttatttttccactgtgactcagggagattcaggtggtcccttagtttgcaaacacaayggaatgtggcgtttggtgggcatcaccagctggggtgaaggctgtgcccgcagggagcaacctggtgtctacaccaaagtcgctgagtacatggactggattttagagaaaacacagagcagtgatggaaaagctcagatgcagtcaccagcatgagaagcagtccagagtctaggcaatttttacaacctgagttcaagtcaaattctgagcctggggggtcctcatctgcaaagcatggagagtggcatcttctttgcatcctaaggacgaaaaacacagtgcactcagagctgctgaggacaatgtctggctgaagcccgctttcagcacgccgtaaccaggggctgacaatgcgaggtcgcaactgagatctccatgactgtgtgttgtgaaataaaatggtgaaagatcacgattagcaagtgttttcttctggttgtgaaacagaactgaaagtaagtggttgaggttccagcacagttcctgggatccctctaattgcactgcttcctctggaactcagtatatctcaaagatgtaatttcctctccgtgctgcacctg

SEQ ID NO: 704638 - DNA, 530 bp, Homo sapiens
tgggattacaagcgcccaccaccgygcctggctaatttttgtattcttttttagtagagacggggtttcaccatattggtcaggctggtgtcgaactcctgacctcaggtgatctgcccgcctcggcctcccaaagtgctgggattacaggtgtgagccaccgcgcctggctaagtccttcttacttttaatgacttaactttatcttgcttagaaacctccaatttcttgtcttgcagttcacattctgttaagtcttagacataaaagctgtcgtctgagctgagctaaagataagccttacaagtcaaatcatgaatttaggggtttggtgtgtgtgtttttcaccactgttgtttttgaaataactcgttgatgctttgtttgctttctgttcactcctctttgtgaatgtggagagcagaatgttaaaatccaatgttaaaacgcaagtattagtaatttgaatgtttttcacttttctgttgattccagataaatgcagtttactatgaaaatctaaatcatct

SEQ ID NO: 704639 - DNA, 700 bp, Homo sapiens
taaaaatatgttttaaagagaaactgagttcttagtagtattggcacacacacagaatacatactccagaggctaaagatttgttaaaatagtatcagacatattcttaaaacctatggagacctatttaaacatacaaaaactagaaactaaacttccatccatcatgaaaccgagaagtggctgcaatcctaaactgcgaattgtgaaaaaatatgtatgaaatatagtgatatttgatcaaaagagaaaatggaaagctgatacagcacagaattgctttcataacgcattataattttkctgcagcataaataattaacttggaaaaattatcaggtggaacaaaaaaaaaagcgaaaaagtaaataacaaccagctttgaaacttcttaccagagttagctgatctgcaacaaacactgctgatgctgttaccactacaacacacagacacacaaatacacacagccacagctggcggagctcactgtgagcctaactcaccttgcctgaaacagggacggacacggaaagctgaggggagacgtgtccttagcaaaggtggagagaaaatgctctgagacaacatattcaaaatctgaaagtgccaactctttcaggtcactgccgtgggtcagcacgaattatagacctagattagactaccattctgagaagaacagtataaagaaattatg

SEQ ID NO: 704640 - DNA, 646 bp, Homo sapiens
gactaggactgaccccgctgcatgcatctgaagaggtaatggtccctacagtgtggtcctttttgggcaaggcttgttaatatctgctctttcattactgtgtagtagggcaaagtcactgcaaatggccgtttcccggtttctaatgtcctgcttttcctagmcccctaaggtactttgaccactggttatgaacaaggctgttggctattctattttcaaacagcagtcgtctgttaggaataactatcaatttaatggcgccaatggccatcaaaacaaagaaaattacacagtaagtctgtctttctttctcgaagggaatcatttgcatctcactgtggtaccaagtgtcgccgtttccctcaacatgctggtaaccatcagtcccacaacagagtgaaccaagaatgcagagggctttttgtgctcaatatctttgctttggccaaggaaacactttccataatatcacgtttacttttttaacttttatagtacagagtgaaacatgtagaaaatagtagctgtctcgaaagagatgggaagactaagcctagtgatgaatgaggcacacatagaaagggacaggtgcaccaggacatgggtggggatggtccctgctccatagaaagggacaggtgca

SEQ ID NO: 704641 - DNA, 1308 bp, Homo sapiens
tctcatctcagccgcacaagtagctgggactgcaggcgtgcaccaccacacccagctaatttttgtgtttttgatagaggcagaatctcactatgttgtccatgctggtttcgaactcctgggctcaagagagcctcctgcctcggcctcccaaagtgctgggattacagacatgagccactgctccaagccctattttatgttattttttccgtgattcagaatcagttgtggccaggcatgatgcccagsagttcaagacaaaaaataataataattagcccaggctggtggcatgtacctgtggtcccagctactcaggaggctgaggtgggggggttgcttgagcctgggagatggaggctgcagtgagctatgattgcaccactgcattccagtgtgggcaatagagcaagaccctgtcacaaaaaataaataaacaaataaataaataaaacgaaaagtaacaacaacaacaaaaaaacccacaaataaaataaatgaaataaagtccttctctctcagccaagctgtgacattcccttctgtaccccgacaagataatacttgcatgtttagtgaccgagcatttgctctacataagtagtcaataagtagttttgaggatcatctatttatagctaacagtgacacaggccccagatgctcccaataaacagaagcaaatgccagtcctgtgactatagatgatggcagttatgatattggcagcagttggaaatgatggttttgaaaacagtgaaaaaatcatgaagtatgttctatttttttcatcgcctcaccctacctgaattcactgcctgcagctttctattgtaattcgaaacaactatattaggcatgtgtttgtgtgctgtagatgctgtcttgaataccatggcaactgcgtgctcttagtcaaacattttgtctagattatacatttagaattttttaaatgatatttagaaacaatgggtatatttctgtaatagctttagacatggaattcttgctcagagacacgtaaagttaagcttaagtgaaagaagggtgggagatcaggaactgacaatgctgaggaggaaaagcttagtttccaataatggaaggctttcaaccattatcttttttcttgtaatcttaacactttgagagattgaggtgggaagatcacttgagcccaggagttcaagaccagtctgagcaacatagtgagacttctgcctctacaaaagataaaaataaaaaataaattagccaagtgtgatagtacaagcctgaagttccagctactaaggagggtga

SEQ ID NO: 704642 - DNA, 969 bp, Homo sapiens
ttaaactgaaatttattctttaattttaataaattgtttttaaactaaagaacaaataaaataataattattatgaattatttcatgattattgctttttggagcatagatgaatgaggtgttaaaaatgatgcactctgattgtctaatatgctagaaatactaggtgcayggctgattcctcaaaacatcactgttggcttcaattaaaagagagcatattaattaagatagagagaaagtaggttttataaccaacttttcatctccctccactcccataataattcaggaaaaattgagtaacttattaaaatctctgaatatgctttatcacctatgagggggcttcaatgaccagaggcgtttgttccttgaatgtttcacatttcaaaatttatgtctgttcgatggcaatttggggaaaatttgtcttttattttttattaaaaaaatttcttttgagacaaggtctcaatctgttgcccaggctggagtgtagtggtgtaatcatgactcactgcagccttaacctcctgggctcaagggattctcttgcctcagcctcctgaataactgggactacaggcatgtaccaccatgcccagctaattttttaaatttactttttttttttgtacagatgggggtctcactttgttgtccacgctggtctcaaactcgtggcctcaagcaaccctcctacctgagcctcccaaactgctgggattatacgcatgagcttggcctagacaaattgtcttttaaacatggtaaacatgttaataggtatttttaatttattgattatctatcatcttgtgacggaaagtttcctaataattttaaaataaggaaaaatgtttggcattgagtgttgtaatttaggaagtagcctaagatatggtcaccaagtttaatttaagtagtaaaatattttgggggtatgtacacatggcagcacttagt

SEQ ID NO: 704643 - DNA, 969 bp, Homo sapiens
ttaaactgaaatttattctttaattttaataaattgtttttaaactaaagaacaaataaaataataattattatgaattatttcatgattattgctttttggagcatagatgaatgaggtgttaaaaatgatgcactctgattgtctaatatgctagaaatactaggtgcatggctgattcctcaaaacatcactgttggcttcaattaaaagagagcatattaattaagatagagagaaagtaggttttataaccaacttttcatctccctccactcccataataattcaggaaaaattgagtaacttattaaaatctctgaatatgctttatcacctatgagggggcttcaatgaccagaggcgtttgttccttgaatgtttcacatttcaaaatttatgtctgttcgatggcaatttggggaaaatttgtcttttattttttattaaaaaaatttcttttgagacaaggtctcaatctgttgcccaggctggagtgtagtggtgtaatcatgactcactgcagccttaacctcctgggctcaagggattctcttgcctcagcctcctgaataactgggactacaggcatgtaccaccatgcccagctaattttttaaatttactttttttttttgtacagatgggggtctcactttgttgtccacgctggtctcaaactcgtggcctyaagcaaccctcctacctgagcctcccaaactgctgggattatacgcatgagcttggcctagacaaattgtcttttaaacatggtaaacatgttaataggtatttttaatttattgattatctatcatcttgtgacggaaagtttcctaataattttaaaataaggaaaaatgtttggcattgagtgttgtaatttaggaagtagcctaagatatggtcaccaagtttaatttaagtagtaaaatattttgggggtatgtacacatggcagcacttagt

SEQ ID NO: 704644 - DNA, 1458 bp, Homo sapiens
  misc_feature 279, 280, 281, 282, 283, 284, 285, 286, 287, 288, 289, 290,291, 292, 293, 294, 295, 296, 297, 298, 299, 300, 301, 302,303, 304, 305, 306, 307, 308, 309, 310, 311, 312, 313, 314,315, 316, 317, 318, 319, 320, 321, 322, 323, 324, 325: n = A,T,C or G
  misc_feature 326, 327, 328, 329, 330, 331, 332, 333, 334, 335, 336, 337,338, 339, 340, 341, 342, 343, 344, 345, 346, 347, 348, 349,350, 351, 352, 353, 354, 355, 356, 357, 358, 359, 360, 361,362, 363, 364, 365, 366, 367, 368, 369, 370, 371, 372: n = A,T,C or G
  misc_feature 373, 374, 375, 376, 377, 378: n = A,T,C or G
gcagaggtatatacaaaggaactggcctgcagcacacaactgaatttggtggccctgagtgagtatctactttataaggtggtggtgttctgccctctactatcacccctggaataaaaaatataggtgagaagacaccagtcatcactttctcttccctggaggcatgctcattgggccgattttctctaataactttcctaactggagagggtgcatgcacacattttaaattaagagaggatttctacaggcaaacagaacacgttctccccttgnnnnnnnnnnnnnnnnnnnnnnnnnnnnnnnnnnnnnnnnnnnnnnnnnnnnnnnnnnnnnnnnnnnnnnnnnnnnnnnnnnnnnnnnnnnnnnnnnnnntatgcagatgctcaggcgcccactcccaaatctactgattaaagatcacagcaggacaagcctaggaatcagaatttagagatacctaactgcctccttttccctccaaaattttgatatttggaccaagaaccaaagtttggaaatagtgtataagaagccagtggaggctgggtgtgatggctcaagcctgtaatcccagcactttgggaggccgaggtgggcgcatcaagaggtcaggagtttgagaccagcttggccaacatggtgaaaccccatctctactaaaaatacaaaaattagccaggygtggtggcgcatgcctataccagctactcagaaggctgagacaggagaattgcttgaacctgggaggcggaggttgcagtgagccgagatcgcaccactgtgctccagcctgggcaacagaacaaaactctgttttgaaaacaaaacaaaacaagaagccagtggatctctttaaggggcattttaaagaagtgagataaagcccctttgcaactctaccagtttcggaattatcttaagacttttgttaatatgtagatgattcactattttccaggaccctgtgggcaggacacccagatgtctctgaaatactgataatctgagaaacattgctttcaggtggtattttctaaactaaagaaatctgaagaattccaggacacttgctgaacataaacatttcatctcccccacattttttcaggccaacccaaatagaatcttcagagagggatctggaaaccttcaaatttaacaagccctcccaggtgatttttatcattaggcagattaggaagcactgcttgaagccaataattgctcacatttgctgaacacacactgtgtgcagggcaatgttctacgtgcttttctgtgtatttgttcatttgctcttaacaacaaccccacgcattactgcatcagcttcatttcacaaagtaactgctttcctcacaaatccataaaggatgaattttgccatttgactctcagggccatctccttttacatatccatggtcccttaaattatcatagattctgagcc

SEQ ID NO: 704645 - DNA, 1458 bp, Homo sapiens
  misc_feature 279, 280, 281, 282, 283, 284, 285, 286, 287, 288, 289, 290,291, 292, 293, 294, 295, 296, 297, 298, 299, 300, 301, 302,303, 304, 305, 306, 307, 308, 309, 310, 311, 312, 313, 314,315, 316, 317, 318, 319, 320, 321, 322, 323, 324, 325: n = A,T,C or G
  misc_feature 326, 327, 328, 329, 330, 331, 332, 333, 334, 335, 336, 337,338, 339, 340, 341, 342, 343, 344, 345, 346, 347, 348, 349,350, 351, 352, 353, 354, 355, 356, 357, 358, 359, 360, 361,362, 363, 364, 365, 366, 367, 368, 369, 370, 371, 372: n = A,T,C or G
  misc_feature 373, 374, 375, 376, 377, 378: n = A,T,C or G
gcagaggtatatacaaaggaactggcctgcagcacacaactgaatttggtggccctgagtgagtatctactttataaggtggtggtgttctgccctctactatcacccctggaataaaaaatataggtgagaagacaccagtcatcactttctcttccctggaggcatgctcattgggccgattttctctaataactttcctaactggagagggtgcatgcacacattttaaattaagagaggatttctacaggcaaacagaacacgttctccccttgnnnnnnnnnnnnnnnnnnnnnnnnnnnnnnnnnnnnnnnnnnnnnnnnnnnnnnnnnnnnnnnnnnnnnnnnnnnnnnnnnnnnnnnnnnnnnnnnnnnntatgcagatgctcaggcgcccactcccaaatctactgattaaagatcacagcaggacaagcctaggaatcagaatttagagatacctaactgcctccttttccctccaaaattttgatatttggaccaagaaccaaagtttggaaatagtgtataagaagccagtggaggctgggtgtgatggctcaagcctgtaatcccagcactttgggaggccgaggtgggcgcatcaagaggtcaggagtttgagaccagcttggccaacatggtgaaaccccatctctactaaaaatacaaaaattagccaggcgtggtggcgcatgcctataccagctactcagaaggctgagacaggagaattgcttgaacctgggaggcggaggttgcagtgagcygagatcgcaccactgtgctccagcctgggcaacagaacaaaactctgttttgaaaacaaaacaaaacaagaagccagtggatctctttaaggggcattttaaagaagtgagataaagcccctttgcaactctaccagtttcggaattatcttaagacttttgttaatatgtagatgattcactattttccaggaccctgtgggcaggacacccagatgtctctgaaatactgataatctgagaaacattgctttcaggtggtattttctaaactaaagaaatctgaagaattccaggacacttgctgaacataaacatttcatctcccccacattttttcaggccaacccaaatagaatcttcagagagggatctggaaaccttcaaatttaacaagccctcccaggtgatttttatcattaggcagattaggaagcactgcttgaagccaataattgctcacatttgctgaacacacactgtgtgcagggcaatgttctacgtgcttttctgtgtatttgttcatttgctcttaacaacaaccccacgcattactgcatcagcttcatttcacaaagtaactgctttcctcacaaatccataaaggatgaattttgccatttgactctcagggccatctccttttacatatccatggtcccttaaattatcatagattctgagcc

SEQ ID NO: 704646 - DNA, 3259 bp, Homo sapiens
ccagcactttgggaggccaatgtgggtggattacttgagcccaggagttcaagatcagcctggccaacatggcaaaaccagtctctactaaaatatatatgtayacaaaaattagccaagcgcagtggtgcacgcctatggtcctggctgcttgggaggctgaggccggagggtcagttgagcccaggaggcagaggttgcagtgagccgggatcacaccactgcactccagcctgggtaacagagctagaccctgtctcaaaacaaaacaataataacaacaaaaaaaacttaaaaaaatagttaaattaggactaaaatttcagatgcttttagtgctgcacagtcatctatgaacagggcctcttttagattaccattgtatccgcatgtattaatgtgctgtattaggcaggcccacttaaatctgtcttgtcccccagttggtgttttctgcttccactgatacaaaatggctctcccaggaaagggacaccctcaaagctcagcttctcacagggtcctctgcctttctcaggggagcttggagaatgggggaattggccctcatggggcagagtggaaaaagggtctatcttgtgctgaaaacagacacttatatgactatacggagaatgggtgctatacaacatgcctaactcttggattgatttttctagaaccaaggagtagaggtggggcaccaacactattccagctggggctccaaattcctgtctgtaggatggcctctgcctgaggtcagaaagcaggagcaccgtgaggttcaggaccgtcttctgcacactggctaccaggaccaggaggctattctatgctctgtccatcctcactgtttaaccagaaagggcatgcccaagcctacagcaggggctgacagcatctacagggttagaaagagatggggtccatgagggttccaagtccagggactgaaaacaatcccatggccccagagacaaaattacagctcaagtcaccatgttcacaactctaacgtcaacacaaggctccctcaattgccttgctgtaaaataggtgaataggtgtagtgggagattcagtggccaagcctgggtcccaggtaaggtgactaaccatcccagttttcctgaacagagaaatttcccaggaaactttgggttttaaagccaggaaagtcccaggtaagcaagggtgagttgatcaccctggcagggaactgattcattcaattctggataattgaataaagtccacatcctcaccgggaacattctactgaatgataagaagaagttccttctagttttgcctgtttcttttccaggatctgggtccatgggacccctaccttatcaactgtccccatacccaggccctggctctcatccctacattgacctccaccccttcctccacaggcaggccagaaagcagacccagggaggatagcacatgtcttcggctacactggtgaaggcatcgtgcctgctccacagcacatttttattcaaggtattgtatttgcaaacaaaaatgaagtcccacaaatgcgggactccacctgactctcaaaaagaaaataaatcacaagtgtattttaaaagctacatttgagattagcaaactggaatcaaatgacagatactttatccagaaagcaacagacattcttttttcagttgtgcttctttgttaaagcatcttgcctcccagaggtataatgcgttccccaggagcaaacactgaagcgcactacagtaatatctttcaagagcggtgggtgtggttccagcaggattctaattatggcagagaaacagcaactatgaccaccaaaccaacaaaaatgatgtgaaatgcaatttcttaatttcagtctcaaactgtgcctgggccaatgtatgtgaaagcccgatgtccatgtggattcaaatcctgattcactcaggcatggtacttaacattctaagcctcagtttcctcatctgtaaaatggctttcctatctcacacaggcagttagccaaggcctgatatgcagaaagtgctcagctgctgtgactcttcacccttcctgtgagatgccttctttaaccccacagatgtgtaccatgtgatggccaagggagcttcatcaatcatggcatctcaagggagctggagcagatgaggaggagatggaggtcccaggaagggctgtgatctgcctggggtcccacaatgggaaacaggcatgagctctccacactccctgtccaatgctctttccactacaactggctgtcggtctcccataggacaagaaaaaacagtcaaaaaggaaatcgaagggatttttgtttttatccctgttcttttgttggttctatctgttctgttttgggtattttgtttgtttttatttgtgtactttttttttttttaaatggagcttccatcatgtaggagtagggtgtagaaatctgagttggtggctccctggtataagaccatagccttcattttggtgagtaacaacataatttctgctttgagtcccattttcttgcagtggaagcttaatctcagagtatcaaaatcactgcatctgagcgtgggcctccccacatcatgggaggagaaggatgagtagatgatgtctcatggagaggacctgccaggatccctcatcgctggccttcagctttctcatctgccctcaaccacagaaccctgggaggaggctccctcagtggctcgtgcactcttgcaggccctgtgaacatatatacttcctggtgggaagagcaagggagcctctggtggaaagcagccccagggtccaagaaccacacagccctgcattagggcccccagggagggagaagaccaaggtcatgcttttgaacctggatgccagaagagaacagctgtggggaaaagcatgcctggaaccaagaaaaacatgtttaccaggggccattcctcacaccagctgcaggcagggtcaggaaagccacaggctgcactgtagttgcaaccttgcatgcggacgcaaggctcagaatgttcctcaaagatcctaaaatgttcccagagtcaggctgagtccattcaaatgttcactcaccctggccacactcactacacctgacttccctgtatcatgagttagagaaatagtatagagtctggttgatgctggcaggtgggagggaatgggataggaaggagagagagagagagcaagaaagaaggctgtttgggtttttgtc

SEQ ID NO: 704647 - DNA, 669 bp, Homo sapiens
ctacacagatacccctgaagcatgcgacattccccaacacccccagctttggctgtaacagaactagtgtggatgccaaaacaagatgccccacatggttaaagaatctgacgactctttttgtagaggagtagtcgactatgtcgttgttattcccaaagatggaagacagaatcatcagaaattacagtgacaggggtttctgctcggtagtatgccgaaaaggtaaggtccaaaccctcagtctcgctttcaaggccctccatgacccgcaactcccctcctcctcctccttttcttttctaagctttttcttattattgccctgcccagggcctgcacccaccaactgttcctagtatcattggttgatgataccaygaacgatgaaccgtggggctggccttctctccagctcagaacacacttgctttagctcaagactgtccaacccaagcccgcaggatgcacgtggcccaggacagctttgaatgtgggccaacataaattcataaattttcttaaagcattatgagactttttgctattatttttgttgttcttcatcagctaacattagtgttagtgtattttacgtgtggctcaagacacttcttcttccaatgtggcccagtgaaaccaaaaggttggacatccctgcagtcttta

SEQ ID NO: 704648 - DNA, 669 bp, Homo sapiens
ctacacagatacccctgaagcatgcgacattccccaacacccccagctttggctgtaacagaactagtgtggatgccaaaacaagatgccccacatggttaaagaatctgacgactctttttgtagaggagtagtcgactatgtcgttgttattcccaaagatggaagacagaatcatcagaaattacagtgacaggggtttctgctcggtagtatgccgaaaaggtaaggtccaaaccctcagtctcgctttcaaggccctccatgacccgcaactcccctcctcctcctccttttcttttctaagctttttcttattattgccctgcccagggcctgcacccaccaactgttcctagtatcattggttgatgataccatgaacgatgaaccrtggggctggccttctctccagctcagaacacacttgctttagctcaagactgtccaacccaagcccgcaggatgcacgtggcccaggacagctttgaatgtgggccaacataaattcataaattttcttaaagcattatgagactttttgctattatttttgttgttcttcatcagctaacattagtgttagtgtattttacgtgtggctcaagacacttcttcttccaatgtggcccagtgaaaccaaaaggttggacatccctgcagtcttta

SEQ ID NO: 704649 - DNA, 669 bp, Homo sapiens
ctacacagatacccctgaagcatgcgacattccccaacacccccagctttggctgtaacagaactagtgtggatgccaaaacaagatgccccacatggttaaagaatctgacgactctttttgtagaggagtagtcgactatgtcgttgttattcccaaagatggaagacagaatcatcagaaattacagtgacaggggtttctgctcggtagtatgccgaaaaggtaaggtccaaaccctcagtctcgctttcaaggccctccatgacccgcaactcccctcctcctcctccttttcttttctaagctttttcttattattgccctgcccagggcctgcacccaccaactgttcctagtatcattggttgatgataccatgaacgatgaaccgtggggctggccttctctccagctcagaacacacttgctttagctcaagactgtccaacccaagcccgcaggatgcacgtggcccaggacagctttgaatgtgggccaacataaattcataaattttcttaaagcattatgagactttttgctattatttttgttgttcttcakcagctaacattagtgttagtgtattttacgtgtggctcaagacacttcttcttccaatgtggcccagtgaaaccaaaaggttggacatccctgcagtcttta

SEQ ID NO: 704650 - DNA, 669 bp, Homo sapiens
ctacacagatacccctgaagcatgcgacattccccaacacccccagctttggctgtaacagaactagtgtggatgccaaaacaagatgccccacatggttaaagaatctgacgactctttttgtagaggagtagtcgactatgtcgttgttattcccaaagatggaagacagaatcatcagaaattacagtgacaggggtttctgctcggtagtatgccgaaaaggtaaggtccaaaccctcagtctcgctttcaaggccctccatgacccgcaactcccctcctcctcctccttttcttttctaagctttttcttattattgccctgcccagggcctgcacccaccaactgttcctagtatcattggttgatgataccatgaacgatgaaccgtggggctggccttctctccagctcagaacacacttgctttagctcaagactgtccaacccaagcccgcaggatgcacgtggcccaggacagctttgaatgtgggccaacataaattcataaattttcttaaagcattatgagactttttgctattatttttgttgttcttcatcagctaacattagtgttagtgtattttacgtgtggctcaagacacttcttcttccaatgtggcccagtgaaaccaaaagkttggacatccctgcagtcttta

SEQ ID NO: 704651 - DNA, 952 bp, Homo sapiens
ggaaaggatatgtcaagtccgtattttaaataaaaaatggaagccactgctatccatgttcacaggatacaataatcagacagaaaatggttgaattgacatcaaagtttgccaatattataaagtaagattgggagacgctgggcagaaaacaagtaagtttttattaaaactaagcatgagttagaattgtattcctaatgcaataattctttcccaaaagkgataattttgaggttgatgccaacggctaaatgtcacataactccaggaaacttaactcataggggaaggggaattatgcatttgattggagtagcatttcctccaatttgcagctaactatgattagttcctgcaaatgaggctttaattagacccactttgaactgatgagctcatcatggaaatgtttcttatgtctcacaggtggattcggtcacacttgggtaaagagtagaggttagtctatgacccagctgtgccccagctttttcctaatgacatattatctcaggatggagagtctggagggaagggtgtttattatttcctaatataagggtaaaaactgctcaaatcatacaaattataaaagacatgttcttagttggtcttttatttatttttcatctccttataaatgatataaagtgtcagtttctgctttcaataaatgatttccttttaagcacacaatttaaaatattttctaaaagtctaaaccatatggtagaatttattagaataaataacgtaatagtagtaacacaatattaattgttctaattaacataataaaattaatgagaaacatgattctgaagataattattcactttaacaagcagttatggagcctaaagtccagacactgtgattcacatacatgatccctaaaataaataaggcaagcttctattctcagaaagttcacaatctagtgggaaag

SEQ ID NO: 704652 - DNA, 567 bp, Homo sapiens
tgataaaaatgtagttaaggaagaaagaaaagtaagaaaggaatataaacaatgagaaaacagaaatgcaagtgatcaaaagtcataagacacaaaagtaaaagaaaaaataaaactaagaaagtaatagaaataccaaaagcaaaatagaacgtgaaaataatacagacagtaaataaaatcatgattaagtaaaaactagaaaataaggtwaaaaaaaataaagcaaagaaatcaagtgaagaaagaaaaggaagtatggatgcacagactctctctggacgggagaaggaggcaccccttctttactgtgacaacacgagtgctccaccttgaaatgaggctgttgggcagaaatggagaaaacattgggttttgatgagtgaatgcagttccccaaaagcctttcttccagttacactttcagactggcgagggtgagctattgataatattatttaatccccaaattacaggtgcatcatatcttgaacaagatcagggacataggagtttactgtggaagacgatgatgagagagaagaggataaagaactaaaagttaag

SEQ ID NO: 704653 - DNA, 630 bp, Homo sapiens
tagttagttgtacttgaaatctggctatttcattgaaacacatttgctattgtgtatgaagaatcaataacatggacagggaagaaagaagttataattatctttcaaaagctcttatttctccagtcttcgttaaggtatgaagcatctgcaaaaagtcctgcaaaagtgtcaagatagaattacctttctgaatcattatttcttttgcagcaattatccccctgaataataaagttatggaaatgaatgatagaaccaacctgaggaaattaatcagcaagcctgggaatacaatttsggtctccttaacaatattccaacttaattgaaaacaaggacagttaggttggtttttggtcgttttatgtctttaatatgtaattttcataaacgaaagcttcatattgcactttggggatgatggttacagagtacttgataagttttactgcaaggacatgtagtaatgtatatgccagcctcttatatgacaactattgaatttacactttcaactcttttaaaatataaacgtgtggattgcatactcctgtgttttgcattgcttgtgaaatgttgagaaggcattgtgttgacaaatgcagcatgacattaatccaagtgcat

SEQ ID NO: 704654 - DNA, 1038 bp, Homo sapiens
tgagcaagaaatgtttttctcatttacagataagaaagttgtcgtagagggatgagatgtcagttccagaggcaacagctgtcatgtgacaggattaagtcaaaatcaaagtttctatcactggattccttaagctttacatagataagaaagtgtgataacgaagattatctgtggagaggatatgagaagaaaaagctgaagccatcacyagagacaatgctgtggccagtgggtctgtcctgctgaggcacgggtggctaatctggagccctcccccaggtcagggccatcacggcaagccagaacctgaagtagagcacggccctctagcgccctctagcgccctcctcgacctctgcctccagctgggcacttccctgaaacttccctaggcctccttccaaaatacacaggtctcctgtgttttcaagactttactgctttttcaatgagaaagcagtcaacaaaaactaaaaagcatgaggaagttacaaactttacataggttttatagttgctgtctttggtttacaatatactagtattcattgaatatagtaagatattcaattataggatgtgttagtagtattcaaagtaaaaatatttaaagatcatggtctatttgggacaaaaaattcctaggcacttttcttcaatcagcctacagttctctcatcagctttttacaatggtgaagcaggacctgttagcagaaccatgccctccaatttagatcctaattttgccccactccatgccaaagcctgtgggaaagtagatcacaccctttagaaataagtggcagaaagttaccctgtatcatttcataccaacagaatacttcatttttgaaattttattttaccctacttacaaagagctcacctgttaccatttcctgaaggttgacctaagacataagacgtctggtggaactcaaaggaccttattactcatcgtaaagcaagcaacattgtcatcagcatattagccttggtttccactgttcccaatcccaagggagagggaagc

SEQ ID NO: 704655 - DNA, 576 bp, Homo sapiens
atccattgaaggcctaaatagaaaaaaagtacaagagggaggatttgttccgttcctgcctgcctgtttgagctgggacactggtcttctcccgccctttgactagggtttacaccataggctcccctggttttcaggacttcagagaagaattgaggttacacctgccaatcaagaaaaatgactgcacaagcctcaatcattttaggaggcttatttgccaaagttaaggacgtgcacctgggagacaggtctatgcctttctccaaagatgattttgagggctccaattttaaaggggaaagggagggatattgagaattatacaattttcatgtaagaggtgggtagagaaaaatcgtcattcatgcctttgkctggctcggtgaaccctcgttttttacataagatgacatagacaaatgaagcagaggaaaaatgcagggtatctgcattttatatgagacaacatagacaaaatggacaggggaacaatcagatatgtatttgtgtctagtagaccggtcgggggggcaggggtgtgactgcatctgttaaaataagctatcaatttac

SEQ ID NO: 704656 - DNA, 2050 bp, Homo sapiens
tggtgcaggtgagagatgagagtttgcagaaagtggagacatcaaaatgtcattggacagacatccacatcctagcattcttgagacctatactcaagtcacccaacattaactcagtctcagtctcgcctttgaagagaaacttactgtggcctactttttctgggtgttgggaagataaaccatctgtttgtgaagttctttaagagtatatggtataatttgcatttatttttttcttaagttcttctccagctccaatagtgagagcaagttattagtagtctgtacataacctccaaaatgaccactaaccaccggataccgtagtaacctgcaataaattttagaaacatgtcagccatttaggtaaatcttctataattttaatttaattctattgatgaatgttgaggataatctcttgaaattgattcctattgatttgtgcwaatgaaattcaattaaaccctagtgatttgcattgaacaaattaaattgcacagactaattggattgaaggcattttcactgaggtggagagcattcatggggatgaacccactgtgatatggctttaatatgggctcctggagtgatagttattggaaaattattaaaactcagcacatgtgtcgattattaagagcacgtttttttaaagaaagatgaactgcataggtcttgtaattatattaactctttggctccatcacctgtaactagttgaggattgggtgtaagggctgctcttctaatgattttaactttaattgtaaagaatgaggaatgcaatacatctgaagagaaaaggcaaggtagagaaggaggcaaacattcactaagcattggatgattcttttgtgcctttgttttttaaaaataaacatgcagaataaatctgcatatagctgcctgccttgaatacatcttgtgtaatatttcagatcctctcagactttcctgtcccttattttagccacaattgcaacaatccctattttaagatgcattgcatcctgctagtgccccacctcagatccttgccagtcgtgtcatctgggacttcactgttgacactgctgcaaaggacatcacaggaatccactgggggttcatctctacatgcaacctagaaatgcaggggagttagcagccccaagagttaagctttgagtaacaatgaacagctttgggaggctgaggagggctgatcacttgaggtcaggggttccagaccagcctggccaacatggcaaaaccccatctctactaaaaatacaacaaaaaattagccgatcatggtggcgcatgcctgtaatctcagctacttggaggctgaggcaggagaattgcttgaacccaggaggcagaggttgcagtaagccaaaatcgcatcactgcactccagcctgagagcctggataacagagtgagactctgtctcaaaacaaaacaaaacaaacaaaaacaaacaataaatgggagttcatgaactgaatgtcctcccaaatttgtgtgttgaagccctaacctccaatgtgatggtatttgaaggcagagtccttggaggtaattatgtttagatgaagccgtgagggcagggcactcatgagccctctttatttctctttctgccatgtgaggatactttcactcgcgtccctgtgaagagaccaccaaacaggctttgtgtgagcaataaagctgtttatttcacctgggtgcaggggggctgagtccgaaaagagagtcagcaaagggagatcgggtggggccgttttataggatttgggtagttaaaggaaaaaggggggttgttctctggtgggcaggagtaggggtcacaaggtgctccataggggagcttttgagccaggatgagccaggagaaggaacttcacaagataatgtcatcagttaaggcaggaacaggccattttcccttcttttgtggtggaatgtcatcaattaaggcagaaaccggccatctggatgtgtacctgcaggtcacaggggatatgatggcttagcttgggctcagaggcct

SEQ ID NO: 704657 - DNA, 1246 bp, Homo sapiens
atagaaataagcaaggaaaactgagaaggagccaatgaagtagaaagaaacctggaatcggcttgaagccaggcaacaaaagcatctctaggaggatggagtgcctaagttaagaaaatacatatgaaatgtcaagtaagataaggacagagaataaaagactgactgccactggcaatttttacaagaacagtttatgtggagttatcgatgtgaaatcctgattaagataggagacataacagtatgtttctatgtagatagaaatcatctaccaatgtggaaaaatatagtgctctgaaagagaaaggagagaattataaagtgataactttgagtaggaagaatgcaatctagcactttgctactcaaagcagggtccatggacagggagcttcgtcactgtctaagaatttggtagaaatgcagactctcagcacttcccaattattgagtcaagatctttatttatcaagatcttcatatgcactttataggcacataggggtctcaaatrtatcacatactacaaaattgcatattggtgaattatttgatagcattttacttctggcacttaaataaattattctaaaatcagcccataaatcaattttgtttagaaaagaagaatgagatgtagagtaatgtgaactgttacgagttttcccatgttgttttggctcataacaataaaacaggttgttctctcttcttggagcattcttttattccactgcctttattcagagatgacgtcccagacactctttccaacttctacaccagatttctttcagtaaccatagcttcattagcatacagcatgtctccttagtagtactaatcacaaataggggacagtaaacaattgtgaagtaccctgggatcccttgttataggaacgttgacatttcttcaaagtgactgtaaccacactatttagtacattaggagaaaaaaaaatcaaaaccattttctttgttaaaaaatgtatatcaatgtggattcgcttactaaaccacttccatatgttcaaatgaagaatatgaaaaactgttaaaatattgatcacttttgcatacctcttattctccttttagtaattttcctctcttttgtagtttgtctccaaatctgatgatttcttacagagcatattaaggaatttaaataactagcatagtaatccttctgattagcaaacaatgagtgcatgcatttatttcattttttctcaaacttt

SEQ ID NO: 704658 - DNA, 2977 bp, Homo sapiens
tcatccattcactcatttctgttggtgaataattgagaacacttaaggagaactgtgtatccacctaaatcatgcatattcattatcccctcagctaaaatatattacttgcaatcaatgctacttacacttcatatttgtagtaagacttgattcctgtgttgattctgttcaataatataagagtttagacactgctaaaagaaactatagcaagaaagggggaaggaaattgctctttcaagaacctattcaggggaccaaacccatactttgcccttctgccaaccattctttcaggcatcaaaacagcccttaaaatacagacatagaagatcaagaggcatcatgcatggcttcatcaaaagcagcatgcgttcaaactcagcttctccctaggctaaatgcattccctttatgagactacaactttcacattggctttaaaagaactattcagtctttggataaatggaatagggcagaaaagagtagtttctgttgctccgattcttttagcccgtaattctttgcaaggttgagaacagaccagagaatgctagatcatgagatgtctggctgcagacaaaagatgagcctcctaggccctaagcgatgaacctcccatcgcatgcacacaccctacacagactgtgttctctcagtgtttctggaataattccatgaggccctattaagagtttgcttaatcagagaaaatatcaaagcgtttaattgtttgcaattcttctgaagttgcagaaaccaacagccaattagtactcaaagttctcttttcagatgggaaactaatctctttttaatagaaacttttcctactgttttttttttcttggaaacacactttgcaacccaaatcacatttagaatacaatgaaacagaatatgaaatgatatttttctgcaaactatcatcttttctggttcattttcaagatctttgatatttacatatgacctttccatttttattaacagtttgttgaatttttgcattccagccagcagaagagaaaggtaatttacagaaagatttgacagttatacacacagctataaacttcagtccattaacttatttcttgtgtaacctttagtcaattctaccaaaacatccatataagcatatgccttttttcctttatgttaaagaggtctcattatgggaccctatttgtagaatgtcaaaagaaaaggaaacaattttatagtgtctccttatggttcacagatgtttatggcttttactttttaagtcacacaagtaaaaatcaaatatatttatgtgttgctcagatttctattacatgtgaatggatacatatttgacatcttttatttggttaatttataattatacatttgataatggtaatattgttttaactatttaactttaaatagtggcttagaatggtcctataaaattcatggcattttctgaagcaatacataatgttatttctttgtaaaacatacgaaagtaattctaaaagtttatgttaaagattatatttgagccttaaactttgctaaactatgtcttaaaaatatagtcatttttaacttcttgaagccctgaagttgataaacttttgcataaatataatgacaaaattgcattccagcaaaatgaaaatgttgtatattatttggctttgcacagaatggatgtttctaattaaatattaatatttaaatgcatggcatagcactctaaatggatttttgtaccactatgccctgagtcatttctgtttgaaaaaaggcaccaaagagaagctgtaaaacaaaaaaaagggaatgaggacagaagaaaactgtactttaaaaaatatgaatcatgttttattatttgtaaaatatcataaattggagtgctttctccaaaacaattgaaagccaaatactgtatattcatatcaccttcactatagaaaaacaattaaaaacacaaaatataaacatttatttwaaaaagtaagatgaaccagatgtggtggcaggtgtctgtggtcttggctactcgagaggctgaggtgggaggactgcatgagtttaggagttcaaggccagtctgggcaacatagcctgacccttaagtcttaaaaaaaatatggtatgtatatatttgagaaagaaatggaattagtagtaagaataaactgtaagaggtctcagtttgtctttatatcctttgtatgtaggaaggaagtgataactgaaatatactgatgaaacctgaaaattagtaagtagctaagttagggccagttgagctacataaccatggtactaggaaagtgtgcactaataaattgttgtgattgtagtaagctgaagactctctacaaggtccataaagtgggcataaaatgcataagatagtaaattattttccagaaaatgcgttaaacttgaggttttctggaattctcagggaaactgattcttgtttatatatttacctatactttatagagttgtaaagaagttagaccggcatatttctgtgctgtgtattaaacaataatgccagttgacctcacaaaacagaaatgagagacacattttactcaagaatagtttttcactgtacttcatcttttttatttctgcttgccctcttaaagaaatggaaaagttccatagtgccatctggtgtcaattaaggaaacagcttctttcaaggattgtctactggactattcttctaagcctcaagctgagactgttgttcataaaagctgaaaaggacttacaactgattatgtaatatatgtttatgttcatttttaccatattatctttatccagaaaaattaaatgattttctttctccagagaagggtatgtatacttattagtttatatttaagcttaagaaaaaaccacttgtacgtgtggagattttatatataagattaggacatatatgtatgtttgtatgtcctaa

SEQ ID NO: 704659 - DNA, 2977 bp, Homo sapiens
tcatccattcactcatttctgttggtgaataattgagaacacttaaggagaactgtgtatccacctaaatcatgcatattcattatcccctcagctaaaatatattacttgcaatcaatgctacttacacttcatatttgtagtaagacttgattcctgtgttgattctgttcaataatataagagtttagacactgctaaaagaaactatagcaagaaagggggaaggaaattgctctttcaagaacctattcaggggaccaaacccatactttgcccttctgccaaccattctttcaggcatcaaaacagcccttaaaatacagacatagaagatcaagaggcatcatgcatggcttcatcaaaagcagcatgcgttcaaactcagcttctccctaggctaaatgcattccctttatgagactacaactttcacattggctttaaaagaactattcagtctttggataaatggaatagggcagaaaagagtagtttctgttgctccgattcttttagcccgtaattctttgcaaggttgagaacagaccagagaatgctagatcatgagatgtctggctgcagacaaaagatgagcctcctaggccctaagcgatgaacctcccatcgcatgcacacaccctacacagactgtgttctctcagtgtttctggaataattccatgaggccctattaagagtttgcttaatcagagaaaatatcaaagcgtttaattgtttgcaattcttctgaagttgcagaaaccaacagccaattagtactcaaagttctcttttcagatgggaaactaatctctttttaatagaaacttttcctactgttttttttttcttggaaacacactttgcaacccaaatcacatttagaatacaatgaaacagaatatgaaatgatatttttctgcaaactatcatcttttctggttcattttcaagatctttgatatttacatatgacctttccatttttattaacagtttgttgaatttttgcattccagccagcagaagagaaaggtaatttacagaaagatttgacagttatacacacagctataaacttcagtccattaacttatttcttgtgtaacctttagtcaattctaccaaaacatccatataagcatatgccttttttcctttatgttaaagaggtctcattatgggaccctatttgtagaatgtcaaaagaaaaggaaacaattttatagtgtctccttatggttcacagatgtttatggcttttactttttaagtcacacaagtaaaaatcaaatatatttatgtgttgctcagatttctattacatgtgaatggatacatatttgacatcttttatttggttaatttataattatacatttgataatggtaatattgttttaactatttaactttaaatagtggcttagaatggtcctataaaattcatggcattttctgaagcaatacataatgttatttctttgtaaaacatacgaaagtaattctaaaagtttatgttaaagattatatttgagccttaaactttgctaaactatgtcttaaaaatatagtcatttttaacttcttgaagccctgaagttgataaacttttgcataaatataatgacaaaattgcattccagcaaaatgaaaatgttgtatattatttggctttgcacagaatggatgtttctaattaaatattaatatttaaatgcatggcatagcactctaaatggatttttgtaccactatgccctgagtcatttctgtttgaaaaaaggcaccaaagagaagctgtaaaacaaaaaaaagggaatgaggacagaagaaaactgtactttaaaaaatatgaatcatgttttattatttgtaaaatatcataaattggagtgctttctccaaaacaattgaaagccaaatactgtatattcatatcaccttcactatagaaaaacaattaaaaacacaaaatataaacatttatttaaaaaagtaagatgaaccagatgtggtggcaggtgtctgtggtcttggctactcgagaggctgaggtgggaggactgcatgagtttaggagttcaaggccagtctgggcaacatagcytgacccttaagtcttaaaaaaaatatggtatgtatatatttgagaaagaaatggaattagtagtaagaataaactgtaagaggtctcagtttgtctttatatcctttgtatgtaggaaggaagtgataactgaaatatactgatgaaacctgaaaattagtaagtagctaagttagggccagttgagctacataaccatggtactaggaaagtgtgcactaataaattgttgtgattgtagtaagctgaagactctctacaaggtccataaagtgggcataaaatgcataagatagtaaattattttccagaaaatgcgttaaacttgaggttttctggaattctcagggaaactgattcttgtttatatatttacctatactttatagagttgtaaagaagttagaccggcatatttctgtgctgtgtattaaacaataatgccagttgacctcacaaaacagaaatgagagacacattttactcaagaatagtttttcactgtacttcatcttttttatttctgcttgccctcttaaagaaatggaaaagttccatagtgccatctggtgtcaattaaggaaacagcttctttcaaggattgtctactggactattcttctaagcctcaagctgagactgttgttcataaaagctgaaaaggacttacaactgattatgtaatatatgtttatgttcatttttaccatattatctttatccagaaaaattaaatgattttctttctccagagaagggtatgtatacttattagtttatatttaagcttaagaaaaaaccacttgtacgtgtggagattttatatataagattaggacatatatgtatgtttgtatgtcctaa

SEQ ID NO: 704660 - DNA, 2977 bp, Homo sapiens
tcatccattcactcatttctgttggtgaataattgagaacacttaaggagaactgtgtatccacctaaatcatgcatattcattatcccctcagctaaaatatattacttgcaatcaatgctacttacacttcatatttgtagtaagacttgattcctgtgttgattctgttcaataatataagagtttagacactgctaaaagaaactatagcaagaaagggggaaggaaattgctctttcaagaacctattcaggggaccaaacccatactttgcccttctgccaaccattctttcaggcatcaaaacagcccttaaaatacagacatagaagatcaagaggcatcatgcatggcttcatcaaaagcagcatgcgttcaaactcagcttctccctaggctaaatgcattccctttatgagactacaactttcacattggctttaaaagaactattcagtctttggataaatggaatagggcagaaaagagtagtttctgttgctccgattcttttagcccgtaattctttgcaaggttgagaacagaccagagaatgctagatcatgagatgtctggctgcagacaaaagatgagcctcctaggccctaagcgatgaacctcccatcgcatgcacacaccctacacagactgtgttctctcagtgtttctggaataattccatgaggccctattaagagtttgcttaatcagagaaaatatcaaagcgtttaattgtttgcaattcttctgaagttgcagaaaccaacagccaattagtactcaaagttctcttttcagatgggaaactaatctctttttaatagaaacttttcctactgttttttttttcttggaaacacactttgcaacccaaatcacatttagaatacaatgaaacagaatatgaaatgatatttttctgcaaactatcatcttttctggttcattttcaagatctttgatatttacatatgacctttccatttttattaacagtttgttgaatttttgcattccagccagcagaagagaaaggtaatttacagaaagatttgacagttatacacacagctataaacttcagtccattaacttatttcttgtgtaacctttagtcaattctaccaaaacatccatataagcatatgccttttttcctttatgttaaagaggtctcattatgggaccctatttgtagaatgtcaaaagaaaaggaaacaattttatagtgtctccttatggttcacagatgtttatggcttttactttttaagtcacacaagtaaaaatcaaatatatttatgtgttgctcagatttctattacatgtgaatggatacatatttgacatcttttatttggttaatttataattatacatttgataatggtaatattgttttaactatttaactttaaatagtggcttagaatggtcctataaaattcatggcattttctgaagcaatacataatgttatttctttgtaaaacatacgaaagtaattctaaaagtttatgttaaagattatatttgagccttaaactttgctaaactatgtcttaaaaatatagtcatttttaacttcttgaagccctgaagttgataaacttttgcataaatataatgacaaaattgcattccagcaaaatgaaaatgttgtatattatttggctttgcacagaatggatgtttctaattaaatattaatatttaaatgcatggcatagcactctaaatggatttttgtaccactatgccctgagtcatttctgtttgaaaaaaggcaccaaagagaagctgtaaaacaaaaaaaagggaatgaggacagaagaaaactgtactttaaaaaatatgaatcatgttttattatttgtaaaatatcataaattggagtgctttctccaaaacaattgaaagccaaatactgtatattcatatcaccttcactatagaaaaacaattaaaaacacaaaatataaacatttatttaaaaaagtaagatgaaccagatgtggtggcaggtgtctgtggtcttggctactcgagaggctgaggtgggaggactgcatgagtttaggagttcaaggccagtctgggcaacatagcctgacccytaagtcttaaaaaaaatatggtatgtatatatttgagaaagaaatggaattagtagtaagaataaactgtaagaggtctcagtttgtctttatatcctttgtatgtaggaaggaagtgataactgaaatatactgatgaaacctgaaaattagtaagtagctaagttagggccagttgagctacataaccatggtactaggaaagtgtgcactaataaattgttgtgattgtagtaagctgaagactctctacaaggtccataaagtgggcataaaatgcataagatagtaaattattttccagaaaatgcgttaaacttgaggttttctggaattctcagggaaactgattcttgtttatatatttacctatactttatagagttgtaaagaagttagaccggcatatttctgtgctgtgtattaaacaataatgccagttgacctcacaaaacagaaatgagagacacattttactcaagaatagtttttcactgtacttcatcttttttatttctgcttgccctcttaaagaaatggaaaagttccatagtgccatctggtgtcaattaaggaaacagcttctttcaaggattgtctactggactattcttctaagcctcaagctgagactgttgttcataaaagctgaaaaggacttacaactgattatgtaatatatgtttatgttcatttttaccatattatctttatccagaaaaattaaatgattttctttctccagagaagggtatgtatacttattagtttatatttaagcttaagaaaaaaccacttgtacgtgtggagattttatatataagattaggacatatatgtatgtttgtatgtcctaa

SEQ ID NO: 704661 - DNA, 2335 bp, Homo sapiens
atatttatgctatttaatattatactatgtactagaaatatttaaaaatgtgttattggaatacggtgtcagaaatataaatctccatttacaaattaatggtgtctacatataagataaaatctaatcagacattactttggaaaacattacataacaaattgtattttaaaaatgactaaaaccaagtaaccagcaataagccatctttatgagaataattttagtaagtttagaaaccaataaattacaaaaattgtataattgagaactttcctttttggaaaattaagataataaaatgaatgtttgtgaagtcttaaataaagaacaaacatctaatctatattttagttttaaaaaatgtcaatatctgaaaggtttcataattatataaatattaaagttatatatatctttatcactaaagaaaataaaacatatacaacacttaattcatttaaaaccattataagattaacttttgttctcttttaaaacgtatgggaacctttaaatgcctgagtttagaaatgcctattttgactgaataatatcacagtttgcaacaaaaccatactttttcctgttaaaatattgtttaaatataattattatgaatttcaaaagtgtgcagaaactttaacaagtataatgtaatcaagattttaaatgcttagctaaagctgacctttaaatatgtattctaatcaataatgaaattttatttagcaccctgaaacagtactctgaatgacattatagagtaataagatagagtgcatttgaacaagtaaactttcaagcatggcaatacattttaaaaattataatgtcaatagagaagaatataaaatatgcatgtaaataatatttatgataaaatagtagattttagttgtgactcagaattgagtttaattaaagtaaatattttaaatgtatagttctttttaacaaatagtaatgtggaagttatattaggaaaacccaattcaaaatgttaggtttcaaaatcacaattctacttttaacatttaactaaatatgaaaagtataattgcaatggtgggacaaactggggagaaaactaatgttttgtttgttagcttcaataatgtcaccatgtttttgggtgaagataatatacaaagcatagcaataaatataatcaactataatttcattctcttgagataatccccattaatatgtgcatttgttgatatgtatatttcaattatatgctgtttatgttgggccattggattggttgttagaaatactattatttcccgaacaatactgttttagcctagttcccacagagatggcttccaataagatgcaacgtaattccctccccattattcagtcagcatgacacagttgagattctgttattccaggcagtactgatctttatatgtgtttttcagaattgtgatgtatttccaacaattcaaaattttctgctggacttttacctgtttctgcaaccatttttttaaaagaagcattgtgcaacattaaaatgtcttttatatttctaatactcctttctttttttggaggagatacaaaattatcacgtctcaacattttgtgaggcactatgagtccaaaatattccaccaaatgaaaactaagacagaaagagagttaatagagaaatgaaagacataagatacatttcatagtgaaatcaagagagcactctagagtatttattcactggccgagagcaattccagtatgcagagttaatatcattcaatgawtgagaacatacagtggaaagtaccaggctgattctctttagttaatagtgcatgacagcactcacagcatgatacaaacaatattgcactataaattttatatatatatatgtgtgtatgtaattaaattgaagatatattttaggtagaaatagatttggactaaattggtaatgatagggagaatattatgtaggaaacgtatgaatgtatttatatataggtatatattgtatacactgttttaaatatttcactttcatttattattttttcatattatgccttcaatatatcatgtgataatttgcttatcatgttgtattgatatgccatattaatcttgcaaagcgtctattaataagcatttactgtttccaatttttcagtgttataagacggtgaaatgcaagcatgcatctccagattttttaaactgttttattaacttagaatagtcaaaataaaaaaatccatacattatggagtctagatgaatgaattatcacatagtgaacatactgaggtagctactctctagatcaataaattta

SEQ ID NO: 704662 - DNA, 2335 bp, Homo sapiens
atatttatgctatttaatattatactatgtactagaaatatttaaaaatgtgttattggaatacggtgtcagaaatataaatctccatttacaaattaatggtgtctacatataagataaaatctaatcagacattactttggaaaacattacataacaaattgtattttaaaaatgactaaaaccaagtaaccagcaataagccatctttatgagaataattttagtaagtttagaaaccaataaattacaaaaattgtataattgagaactttcctttttggaaaattaagataataaaatgaatgtttgtgaagtcttaaataaagaacaaacatctaatctatattttagttttaaaaaatgtcaatatctgaaaggtttcataattatataaatattaaagttatatatatctttatcactaaagaaaataaaacatatacaacacttaattcatttaaaaccattataagattaacttttgttctcttttaaaacgtatgggaacctttaaatgcctgagtttagaaatgcctattttgactgaataatatcacagtttgcaacaaaaccatactttttcctgttaaaatattgtttaaatataattattatgaatttcaaaagtgtgcagaaactttaacaagtataatgtaatcaagattttaaatgcttagctaaagctgacctttaaatatgtattctaatcaataatgaaattttatttagcaccctgaaacagtactctgaatgacattatagagtaataagatagagtgcatttgaacaagtaaactttcaagcatggcaatacattttaaaaattataatgtcaatagagaagaatataaaatatgcatgtaaataatatttatgataaaatagtagattttagttgtgactcagaattgagtttaattaaagtaaatattttaaatgtatagttctttttaacaaatagtaatgtggaagttatattaggaaaacccaattcaaaatgttaggtttcaaaatcacaattctacttttaacatttaactaaatatgaaaagtataattgcaatggtgggacaaactggggagaaaactaatgttttgtttgttagcttcaataatgtcaccatgtttttgggtgaagataatatacaaagcatagcaataaatataatcaactataatttcattctcttgagataatccccattaatatgtgcatttgttgatatgtatatttcaattatatgctgtttatgttgggccattggattggttgttagaaatactattatttcccgaacaatactgttttagcctagttcccacagagatggcttccaataagatgcaacgtaattccctccccattattcagtcagcatgacacagttgagattctgttattccaggcagtactgatctttatatgtgtttttcagaattgtgatgtatttccaacaattcaaaattttctgctggacttttacctgtttctgcaaccatttttttaaaagaagcattgtgcaacattaaaatgtcttttatatttctaatactcctttctttttttggaggagatacaaaattatcacgtctcaacattttgtgaggcactatgagtccaaaatattccaccaaatgaaaactaagacagaaagagagttaatagagaaatgaaagacataagatacatttcatagtgaaatcaagagagcactctagagtatttattcactggccgagagcaattccagtatgcagagttaatatcattcaatgaatgagaacatacagtggaaagtaccaggctgattctctttagttaatagtgcatgacagcactcacagcatgatacaaacaatattgcactataaattwtatatatatatatgtgtgtatgtaattaaattgaagatatattttaggtagaaatagatttggactaaattggtaatgatagggagaatattatgtaggaaacgtatgaatgtatttatatataggtatatattgtatacactgttttaaatatttcactttcatttattattttttcatattatgccttcaatatatcatgtgataatttgcttatcatgttgtattgatatgccatattaatcttgcaaagcgtctattaataagcatttactgtttccaatttttcagtgttataagacggtgaaatgcaagcatgcatctccagattttttaaactgttttattaacttagaatagtcaaaataaaaaaatccatacattatggagtctagatgaatgaattatcacatagtgaacatactgaggtagctactctctagatcaataaattta

SEQ ID NO: 704663 - DNA, 2335 bp, Homo sapiens
atatttatgctatttaatattatactatgtactagaaatatttaaaaatgtgttattggaatacggtgtcagaaatataaatctccatttacaaattaatggtgtctacatataagataaaatctaatcagacattactttggaaaacattacataacaaattgtattttaaaaatgactaaaaccaagtaaccagcaataagccatctttatgagaataattttagtaagtttagaaaccaataaattacaaaaattgtataattgagaactttcctttttggaaaattaagataataaaatgaatgtttgtgaagtcttaaataaagaacaaacatctaatctatattttagttttaaaaaatgtcaatatctgaaaggtttcataattatataaatattaaagttatatatatctttatcactaaagaaaataaaacatatacaacacttaattcatttaaaaccattataagattaacttttgttctcttttaaaacgtatgggaacctttaaatgcctgagtttagaaatgcctattttgactgaataatatcacagtttgcaacaaaaccatactttttcctgttaaaatattgtttaaatataattattatgaatttcaaaagtgtgcagaaactttaacaagtataatgtaatcaagattttaaatgcttagctaaagctgacctttaaatatgtattctaatcaataatgaaattttatttagcaccctgaaacagtactctgaatgacattatagagtaataagatagagtgcatttgaacaagtaaactttcaagcatggcaatacattttaaaaattataatgtcaatagagaagaatataaaatatgcatgtaaataatatttatgataaaatagtagattttagttgtgactcagaattgagtttaattaaagtaaatattttaaatgtatagttctttttaacaaatagtaatgtggaagttatattaggaaaacccaattcaaaatgttaggtttcaaaatcacaattctacttttaacatttaactaaatatgaaaagtataattgcaatggtgggacaaactggggagaaaactaatgttttgtttgttagcttcaataatgtcaccatgtttttgggtgaagataatatacaaagcatagcaataaatataatcaactataatttcattctcttgagataatccccattaatatgtgcatttgttgatatgtatatttcaattatatgctgtttatgttgggccattggattggttgttagaaatactattatttcccgaacaatactgttttagcctagttcccacagagatggcttccaataagatgcaacgtaattccctccccattattcagtcagcatgacacagttgagattctgttattccaggcagtactgatctttatatgtgtttttcagaattgtgatgtatttccaacaattcaaaattttctgctggacttttacctgtttctgcaaccatttttttaaaagaagcattgtgcaacattaaaatgtcttttatatttctaatactcctttctttttttggaggagatacaaaattatcacgtctcaacattttgtgaggcactatgagtccaaaatattccaccaaatgaaaactaagacagaaagagagttaatagagaaatgaaagacataagatacatttcatagtgaaatcaagagagcactctagagtatttattcactggccgagagcaattccagtatgcagagttaatatcattcaatgaatgagaacatacagtggaaagtaccaggctgattctctttagttaatagtgcatgacagcactcacagcatgatacaaacaatattgcactataaattttatatatatatatrtgtgtatgtaattaaattgaagatatattttaggtagaaatagatttggactaaattggtaatgatagggagaatattatgtaggaaacgtatgaatgtatttatatataggtatatattgtatacactgttttaaatatttcactttcatttattattttttcatattatgccttcaatatatcatgtgataatttgcttatcatgttgtattgatatgccatattaatcttgcaaagcgtctattaataagcatttactgtttccaatttttcagtgttataagacggtgaaatgcaagcatgcatctccagattttttaaactgttttattaacttagaatagtcaaaataaaaaaatccatacattatggagtctagatgaatgaattatcacatagtgaacatactgaggtagctactctctagatcaataaattta

SEQ ID NO: 704664 - DNA, 760 bp, Homo sapiens
tcaggcaaatctgaattatatttgaaagttaatgttctggccgagcacagtggctcacacctgtaatcccaacactttgggaggccgaggcaggcagatcacctgaggtcaggagttcgagaccagcctggccaacatggtgaaaccctgtctctactaaaaatacaaaaaaattagccaggcttggtggtgggcacctgtaatctcagctacttgggaggctaaggcaggagaatcgcttgaacccgagaggtggaggttgcagtgagccgagatcgcatcattgcactccaacctcagtaacaagagtgaaacaacgtctcaacaaaaaaagaaagaaagaaagttcttatatttttgtctgtatttttctcttttccgtacttctgtaaatgatacatggatatttcttcagtgaaaaaaaaggaataaattcagaaagggaatcaggaaagagagaaaaggacaaaaaactagactgggggatgatagcattagagctgacagttggttcgccagagtcccaagactagactggctacaaccaaaaaactacagtaggagtagagagagatggagagatggcaatggagggagaaaatttaggaaagaagacttgctaattgaaatagtaagttgagaaayatgcagaatactggaagaggcttctaggaaaggcaggaccatggcacaattatgaatataagcaatgccaccttccaggtgtgatactcagagctccgacttgactaacatcctc

SEQ ID NO: 704665 - DNA, 770 bp, Homo sapiens
ctgactcaataggtctgagatatggcctcagaacttgtactgtttttgttttgttttgtttgtttgttttcagacagggtcttactttgtcacctaggctggagtaccaagctgtccattgaggctgatgctacatttttagtattaagtaggctaaagcaatcttaatcagtaaaaagtgaccttttgaattcattgtttgcttctatttcctactcatctgctctcccacttggcctccaggtttgctatgtatgcaaaatgtctctactgagtaggaaaagtgggatggcagccatttccctgctcctgaggtcaacatgrcctaaggacttcagcaagcccaaatatgtacaacagtatccggcccactcgcgcctggagggggccatgctggtagactcagtccggctgcccagcaacagtgattctggctaatggctccccgttggagcagtttcctgaggttcctgctaatcctgttatttgcaaagagccaaagcccccataacagcagttttaaagcttgcttctggctgtattaagttagaccttgcaagggagatgaaggcagcagcatccgacactgaagaaatggctccagaggaaaagagccaatatccatgggtcctctgtattgatctctttctttgcctctcctggaacacccactttgctctcttttggctgctttaagtctattccaaataccaccagagaacatattaattcctttttagtctgaactggggatgggaaacttccttatt

SEQ ID NO: 704666 - DNA, 605 bp, Homo sapiens
gtgcagcagagaaggagggaagaaaaagagtgtctgaacattgagaggagctcggctggggacggtcagagaggagatagccatgggatggccaaactccaggggaagatcatcttcccactctatcctctttctagctccccatccatcctgctgagagccacctccatccagcaataaaatcttccccatttatcatccttcaatttgtccrtgtggactgattcatcctggacacgagacaagaacctgggtaccaagagggcactgagctggttaacacttaagccatctgtggaaggcaactgctaaaagagcactgtcacacacccactggggctttggaagtcacaggcacccaccccagatgctaccgtggggctggagcccaaaagcactctccccagctcctgcacctgctcatctacatgttcctcctcccataaagggtttgagcatgcacagcagccaaacagatgtgctacacccctgttgcacctcctgtcaggggggccagtgagctctcccatttcaatattaaacctcctccttcctcttatactgactatgaagagggaagggagatagacaagcagggaggggta

SEQ ID NO: 704667 - DNA, 604 bp, Homo sapiens
tggaaagagagggccaaggacaatctccacacatccctctggtgttgcgtctctatgcattcttcttgagggagtaatgacaacagcccttggtgtttacctgagcagcctccagttcattctccagggcccttctggctgacacagcttctttttcttcctttctggcgtgcacaagggcctcctctaactgtcgtatttctccctacaatgaaacactgggtcagtgtgcacttagatgtgtgctgtacctatgaaactgactcaatggaattaaatgaacaccgaagacacccatagatatggcagtggctatggtcacartgcacctgtcacagacccaaggtggcacacaacagccgtgttcttggatgcgtgtgtttatctgcagttccagttctcaggcaggtgtgaacatccacattatctcgggtgattttttattttttatttttttagagacagggtctcactatattgctctggctggtcatgaactcctgggctcaagtgatcctccctcccacctctcagcctcccaagtagctggaattacaggcatgagccaccatgcccagctggggtattttttttttttttaata

SEQ ID NO: 704668 - DNA, 915 bp, Homo sapiens
tagctaatatgtggtgaagtcggaattagaattcagatctgtttgagttgaaaactcaaattcaggccaatctccctttctgaattcttttgggtatgaacttcctgtgggatatgccataaagtgaaggggaaactgaggaatgatcttgccagttaataaacatgaatttaaaaaattaatacatatgaatacaaatacatttaaaaattcattgtcaaccttgagtcacccagataagtggtaaatgattgctaagcacaaatgtggagtttctgcctttaatacgcagctagtcctctgcactcaattctctggctttccaaacagtcagtcaaaaacaatagattggattccagttaacctaattcttcartctgcttggtgtcagtttgaggttgacgatagtgagactataggtaagcttatcaccaaaacattgtactatggggagtatagctgagaagccatcattctgcgctctgagatctagtcacttgtcaattaacaagggacctcaaatgctgaattcaatgaattcaagtgcaaatttaagaattctttggtgactgaatctcctgtaattcaagtgggttcatatttccaactttacttcagacatctgtgtattaggacaaccatctacttatttggtttaattttaggaaagaatttaaggtttcctgctgtactaaggcagactattagcttgaaagttatttttcagaatcctgtaaaaaaaaatctagcattttgagcctaacgcagtattttgaataatctgagacttaaagtgtcttccctctagcttttttccattgctctttgctctctttacttatgcaaacaggcttccttatcctctgaggctcattgagccaacacaccagttggaacagaagccatgaaaaagaa

SEQ ID NO: 704669 - DNA, 915 bp, Homo sapiens
tagctaatatgtggtgaagtcggaattagaattcagatctgtttgagttgaaaactcaaattcaggccaatctccctttctgaattcttttgggtatgaacttcctgtgggatatgccataaagtgaaggggaaactgaggaatgatcttgccagttaataaacatgaatttaaaaaattaatacatatgaatacaaatacatttaaaaattcattgtcaaccttgagtcacccagataagtggtaaatgattgctaagcacaaatgtggagtttctgcctttaatacgcagctagtcctctgcactcaattctctggctttccaaacagtcagtcaaaaacaatagattggattccagttaacctaattcttcagtctgcttggtgtcagtttgaggtkgacgatagtgagactataggtaagcttatcaccaaaacattgtactatggggagtatagctgagaagccatcattctgcgctctgagatctagtcacttgtcaattaacaagggacctcaaatgctgaattcaatgaattcaagtgcaaatttaagaattctttggtgactgaatctcctgtaattcaagtgggttcatatttccaactttacttcagacatctgtgtattaggacaaccatctacttatttggtttaattttaggaaagaatttaaggtttcctgctgtactaaggcagactattagcttgaaagttatttttcagaatcctgtaaaaaaaaatctagcattttgagcctaacgcagtattttgaataatctgagacttaaagtgtcttccctctagcttttttccattgctctttgctctctttacttatgcaaacaggcttccttatcctctgaggctcattgagccaacacaccagttggaacagaagccatgaaaaagaa

SEQ ID NO: 704670 - DNA, 915 bp, Homo sapiens
tagctaatatgtggtgaagtcggaattagaattcagatctgtttgagttgaaaactcaaattcaggccaatctccctttctgaattcttttgggtatgaacttcctgtgggatatgccataaagtgaaggggaaactgaggaatgatcttgccagttaataaacatgaatttaaaaaattaatacatatgaatacaaatacatttaaaaattcattgtcaaccttgagtcacccagataagtggtaaatgattgctaagcacaaatgtggagtttctgcctttaatacgcagctagtcctctgcactcaattctctggctttccaaacagtcagtcaaaaacaatagattggattccagttaacctaattcttcagtctgcttggtgtcagtttgaggttgacgatagtgagactataggtaagcttatcaccaaaacattgtactatggggagtatagctgagaagccatcattctgcgctctgagatctaktcacttgtcaattaacaagggacctcaaatgctgaattcaatgaattcaagtgcaaatttaagaattctttggtgactgaatctcctgtaattcaagtgggttcatatttccaactttacttcagacatctgtgtattaggacaaccatctacttatttggtttaattttaggaaagaatttaaggtttcctgctgtactaaggcagactattagcttgaaagttatttttcagaatcctgtaaaaaaaaatctagcattttgagcctaacgcagtattttgaataatctgagacttaaagtgtcttccctctagcttttttccattgctctttgctctctttacttatgcaaacaggcttccttatcctctgaggctcattgagccaacacaccagttggaacagaagccatgaaaaagaa

SEQ ID NO: 704671 - DNA, 915 bp, Homo sapiens
tagctaatatgtggtgaagtcggaattagaattcagatctgtttgagttgaaaactcaaattcaggccaatctccctttctgaattcttttgggtatgaacttcctgtgggatatgccataaagtgaaggggaaactgaggaatgatcttgccagttaataaacatgaatttaaaaaattaatacatatgaatacaaatacatttaaaaattcattgtcaaccttgagtcacccagataagtggtaaatgattgctaagcacaaatgtggagtttctgcctttaatacgcagctagtcctctgcactcaattctctggctttccaaacagtcagtcaaaaacaatagattggattccagttaacctaattcttcagtctgcttggtgtcagtttgaggttgacgatagtgagactataggtaagcttatcaccaaaacattgtactatggggagtatagctgagaagccatcattctgcgctctgagatctagtcacttgtcaattaacaagggacctcaaatgctgaattcaatgaattcaagtgcaaatttaagaattctttggtgactgaatctcctgtaattcaagtgggttcatatttccaactttacttcagacatctgtgtattrggacaaccatctacttatttggtttaattttaggaaagaatttaaggtttcctgctgtactaaggcagactattagcttgaaagttatttttcagaatcctgtaaaaaaaaatctagcattttgagcctaacgcagtattttgaataatctgagacttaaagtgtcttccctctagcttttttccattgctctttgctctctttacttatgcaaacaggcttccttatcctctgaggctcattgagccaacacaccagttggaacagaagccatgaaaaagaa

SEQ ID NO: 704672 - DNA, 915 bp, Homo sapiens
tagctaatatgtggtgaagtcggaattagaattcagatctgtttgagttgaaaactcaaattcaggccaatctccctttctgaattcttttgggtatgaacttcctgtgggatatgccataaagtgaaggggaaactgaggaatgatcttgccagttaataaacatgaatttaaaaaattaatacatatgaatacaaatacatttaaaaattcattgtcaaccttgagtcacccagataagtggtaaatgattgctaagcacaaatgtggagtttctgcctttaatacgcagctagtcctctgcactcaattctctggctttccaaacagtcagtcaaaaacaatagattggattccagttaacctaattcttcagtctgcttggtgtcagtttgaggttgacgatagtgagactataggtaagcttatcaccaaaacattgtactatggggagtatagctgagaagccatcattctgcgctctgagatctagtcacttgtcaattaacaagggacctcaaatgctgaattcaatgaattcaagtgcaaatttaagaattctttggtgactgaatctcctgtaattcaagtgggttcatatttccaactttacttcagacatctgtgtattaggacaaccatctacttatttggtttaattttaggaaagaatttaaggtttcctgctgtactaaggcagactattagcttgaaagttatttttcagaatcctgtaaaaaaaaatctagcattttgagcctaacgcagtattttgaataatctsagacttaaagtgtcttccctctagcttttttccattgctctttgctctctttacttatgcaaacaggcttccttatcctctgaggctcattgagccaacacaccagttggaacagaagccatgaaaaagaa

SEQ ID NO: 704673 - DNA, 1087 bp, Homo sapiens
ggtactattgcaggagagcatttatgaagcaatgaatcttctaggctctgatttcaaagatttccccagagctcctctgaattctcacaggttctctatcctctgaatagagagaagaaatgcacttgtacattaaatgcattctgttttttcttaaacagcaatactatgaggtaccaataacaatgaagtctgtgtttgatctgatcgatactttccagtcccgaatcaaagatatggagaagcagaagaaggagggcattgtttgcaaagaggacaaaaagcagtccctggagaacttcctatccaggtacatcacctttggagtcgctaaagaggaaggtgcaaatttgttctgagtgagctcatgaaaatgccaaagaaacacagatcccacaggtgtttacagagagtaatcctccttggagaaaaacctacccatctctggccactgagcttagtcttgtcctgttgaaatgtctctggctacagggctggctggctgcagctccaagcatcaatgttgatttggtgactcaggataggtcttttctctgtttttttttttttcttttytttttttttctctttctttggtacagaatatagaatcctgacctcccaagaaagttaatttactcagtcagtaaatctggagatctctgcatgtagcatttttattttacatatttatttattaggccccttctggttccaaacaggatttggcacactgtgcttgattttccgcttccttccaactctgcaggaaacaacaaaagccccactaagacctcaaaaggagaaatcctcttgacccagtttcacgaatttttcgacactgtcgtttattgaaggccatcttgtggcaaccccagtgtccatgggggaggagcatacccagagaagagtgtaaaaacaactccatctgttacaggacaggggtcccaatccagactccaagagagggttcttggatctcgcgcaagaaagaattcaggacaaatctgcagtgcaaagtgaaagcaagtttactaagaaagtaaaggaatagaagaacagctactccatagacagagcagccccg

SEQ ID NO: 704674 - DNA, 1568 bp, Homo sapiens
  misc_feature 421, 422, 423, 424, 425, 426, 427, 428, 429, 430, 431, 432,433, 434, 435, 436, 437, 438, 439, 440, 441, 442, 443, 444,445, 446, 447, 448, 449, 450, 451, 452, 453, 454, 455, 456,457, 458, 459, 460, 461, 462, 463, 464, 465, 466, 467: n = A,T,C or G
  misc_feature 468, 469, 470, 471, 472, 473, 474, 475, 476, 477, 478, 479,480, 481, 482, 483, 484, 485, 486, 487, 488, 489, 490, 491,492, 493, 494, 495, 496, 497, 498, 499, 500, 501, 502, 503,504, 505, 506, 507, 508, 509, 510, 511, 512, 513, 514: n = A,T,C or G
  misc_feature 515, 516, 517, 518, 519, 520: n = A,T,C or G
aaacatggctccctccctcaccttctccatcttgctaagacacctcctcaacaatgaggccttccctgagcactctttgcaaagtccactcccttcattccatcctagcattccttctctgctttatttcttgccatagctcttactaccatcttctatgccatatattttacttatctgcctgtgtgccgttcccaactagaatgtaagccccctgagggcagggattttgttttgttttcccccatacccagagctaatgtatcagtatatagcaggcactcaaacatttattgaatgaagagtaaatggatgaatgtttatgttcctcctgccatatcccactgccccaacctacataaaatgcctaacataggatgcagcacaatgcaagtattcaagttcccttcctggctgggcnnnnnnnnnnnnnnnnnnnnnnnnnnnnnnnnnnnnnnnnnnnnnnnnnnnnnnnnnnnnnnnnnnnnnnnnnnnnnnnnnnnnnnnnnnnnnnnnnnnnctgagcaggtctacagtggcctgggcactgaagcctgggggaagggcttactgctggtcccagacgatgaggtggaagaggtacttggagaagtgagctcttcgggtctgcagggggctgcacagctccttgccgccatggctgagggagcaggagaggtagaaatcttcatagctataaaagaaagggagcaggtcaggacacccagctcccaaaaccaatcacccaaacctatgcgtccctctaaggccaaaatccatttcccctggtaaaactctcagtctctgagggctgtaacacaggatctccggataggacagccaaactggatgtaaggaaatgtgctcaggccaaagcaactcaatctagattcctctgctcggttttaggctccattctgagccttgttgtttttcttcctttaatgggaactggccacccagcctctttatagaaagctccagcccatggagcgtctgtgtgtgcrtgcgtgtgtgcgcgtgcacgtgcatgcgcaagtgagaagggtgggggaggaagacgacatatgccgacatgaatgccaacacacgggggtccctgtggctcatgacaggtgcctgacagaagaggtcagagaaggccccggtttcccaggctgcctcctttgttctctgccaatcgcccagaggaatacattaagtgaggaacaaagagagaaggggaagggggttggggaaaggggaccggcaggggcggggtagggcccagtgcctattccctcaggccttggatgctggggacccaacagaggcgctgaggattttaccaaaagaacatcctcctccacccacccctgcaggcctagagaaccccagacaaagggtcaatcccacctccccaccccctcccactggccagggagcgtgcactctatctgggaatcggccatctgttgccatgtctccttccactggtcttggatctggagggggcagggatgcagaggcagccagcaccaagagggaataacaggatcttcttcatctcctaagggacctcctctctc

SEQ ID NO: 704675 - DNA, 631 bp, Homo sapiens
cagctatatgtgccaatagaccccttacttcctttctagttggtttgagctgggtttctgcccctaacaaatgaaaaagtcctgaccgatataaaagtcacacacaaaaaaaggctttttgtgtgtaatgggaaagccaaagagataatcatgtgtgtttctagtgactcacaaataggagctcttctgttctgagaaaaccacaattttagatcaagaaagggtcttagtgatcatctaccccaaaaaaacacatttttcccaacsaagatactagagaattcaggaaagtacccagagttgtggcaattccacagtagagttaagaccaaaactcaaatctcctgaaaacctgaccagtagaaagttcacattgagacatttgctacatcatttaaacatatttggccaagagactcacatagttacaagaagattataacagattcctttgctctataaaagaatagccacaacagcaatctgcgttgagggctggtgtttaatagttatgctcacctgcaggcaaggtcactagccactgttgattttcttccaagaactaggaagcaaaggaaaggaaggcaacagctatctctgctggcattcgagatatggctgtgtaaatatg

SEQ ID NO: 704676 - DNA, 643 bp, Homo sapiens
ataaaagactgtgaaataaaatgagaagagatataaatgcctttagtattatcttcagctgaacttaaatactataacccaattaayaaaaatataactggaagtagctactctgaaagaatgttcttttaatttgaatataatagtttcacagattttaagtttgaattttaaagatacgatatgtaactgtttccccaaagccattattttggtttcttaattttttgatatgtgtatttttaaaatgaaaattgcaagggaaagtggtttagaaaatacaaatttaggttttagaaagtataggaaaaggcttacaaatgtaaggcggtggcttacatctgtcataccagcactttgggagacagaggcaggaggatcacttgagaccaggagtttgagggtagcctggtgacatcgcagagcccccacatctctacaaaaatataaaaatatattaacagagcatggtgacacatacctgtacttccaactacttagaaggctgaggtagaaggattgcttgagcccaaaaggtagaggctgcagtcactatgatggtaccactgctctccagcctgggcaacagagctaaattctctttttaaaaaggtaggaaagtattaagattagagaaataata

SEQ ID NO: 704677 - DNA, 1838 bp, Homo sapiens
cattatttgcctttcagctggggattggcatggattacaatatgcagtttaaatgccttcaacatcattgttctattattatcatcatcaccatccccaaatgtgttgtgtgtcaacttcaggagctatcctagtcattatatagaatcagtttaaatggatgtagcaaatcctcacaaaaatttccagacttaactgcataacatggattagacagacatatatagatgcagaaatagacaagagttcaaatattarcattcttaaataatgtgttactctatagtaccagtggcaaggagaatttttctgctaagagtgggaactgacattttttccaagctaaggagaaagcgttcctggatgtggtgcttcagaagcctattgatggaggagaagtacttctgttccttttgcaaatattttccagccagttgtaaactgatgggtggtaaaggtccaatatttataatgccaaattgctctggaaatctattcgtccagtaatataactttattgttttataaaaatgaggcttctgcacaactagtaaatttagtattttaattcaatagataatatttaaagataagaaagacctatgtataattcatgccttttctggcagtggttctcaatagcagtgggccatgcttaactccagaaattctgatgctcaaatttaggaggccagtgttgctcactttccattcctggatgagagtcagtgcttcagtgagttactcttcctgagaggtgtgtgtctgttgagtccgttgggtgtgttggctcagtttccaggatcatcccactgtgtgctacgtgcgttacatgcttttaacctttatagaaaacccaatcagtgggtatcaaataaagcccaaagaattttccaaactcaaggcaggacatattaagccaattatgagaaaaactaggattagaaccatatctttcactccaaagcctgtgctaattttattgaaccactaagattccaattctccatcaaagatggttttctttgagttattgtagttttgttaaccctattccacatgattttctaggtttttgttggtggtggcggtgctttttaatacaaatgatggtaaggtgttttgtctctctgctcttttgctttgaaggaataacaactgtcctcaccatgaccacactaagcatcagtgcacgacattctttgcccaaagtgtcctatgctaccgccatggactggttcatagctgtctgctttgcttttgtattttcggcccttatcgagtttgctgctgtcaactatttcaccaatattcaaatggaaaaagccaaaaggaagacatcaaagccccctcaggaagttcccgctgctccagtgcagagagagaagcatcctgaagcccctctgcaggtatttgacttaatccaccttcagtttaagattttagcttcttggtcaaatttattttgtcagggaaacaaactgagaacttaaaaatcctgatatcaacttgtaagtcatttaaaaatacagaaaaacataaaagtaactgtatgagcttaaactttatgttggtgattaacagcttaaaaattaaacagctgtgacagagctagatgtaggcgaagctaattgtttgaaagtttctttcggagttacaggttttttttacagaaaggggcaaaatcccatgtatactattaggaggaacctgtggacatctttaagtgagttgaaaaaacattttaatagagttcattgtgcaaagcaaagcagcagttagtttttgtttgtgtctttaaaaattgcttatgtttaatttttgtgactacataatag

SEQ ID NO: 704678 - DNA, 1838 bp, Homo sapiens
cattatttgcctttcagctggggattggcatggattacaatatgcagtttaaatgccttcaacatcattgttctattattatcatcatcaccatccccaaatgtgttgtgtgtcaacttcaggagctatcctagtcattatatagaatcagtttaaatggatgtagcaaatcctcacaaaaatttccagacttaactgcataacatggattagacagacatatatagatgcagaaatagacaagagttcaaatattaacattcttaaataatgtgttactctatagtaccagtggcaaggagaatttttctgctaagagtgggaactgacattttttccaagctarggagaaagcgttcctggatgtggtgcttcagaagcctattgatggaggagaagtacttctgttccttttgcaaatattttccagccagttgtaaactgatgggtggtaaaggtccaatatttataatgccaaattgctctggaaatctattcgtccagtaatataactttattgttttataaaaatgaggcttctgcacaactagtaaatttagtattttaattcaatagataatatttaaagataagaaagacctatgtataattcatgccttttctggcagtggttctcaatagcagtgggccatgcttaactccagaaattctgatgctcaaatttaggaggccagtgttgctcactttccattcctggatgagagtcagtgcttcagtgagttactcttcctgagaggtgtgtgtctgttgagtccgttgggtgtgttggctcagtttccaggatcatcccactgtgtgctacgtgcgttacatgcttttaacctttatagaaaacccaatcagtgggtatcaaataaagcccaaagaattttccaaactcaaggcaggacatattaagccaattatgagaaaaactaggattagaaccatatctttcactccaaagcctgtgctaattttattgaaccactaagattccaattctccatcaaagatggttttctttgagttattgtagttttgttaaccctattccacatgattttctaggtttttgttggtggtggcggtgctttttaatacaaatgatggtaaggtgttttgtctctctgctcttttgctttgaaggaataacaactgtcctcaccatgaccacactaagcatcagtgcacgacattctttgcccaaagtgtcctatgctaccgccatggactggttcatagctgtctgctttgcttttgtattttcggcccttatcgagtttgctgctgtcaactatttcaccaatattcaaatggaaaaagccaaaaggaagacatcaaagccccctcaggaagttcccgctgctccagtgcagagagagaagcatcctgaagcccctctgcaggtatttgacttaatccaccttcagtttaagattttagcttcttggtcaaatttattttgtcagggaaacaaactgagaacttaaaaatcctgatatcaacttgtaagtcatttaaaaatacagaaaaacataaaagtaactgtatgagcttaaactttatgttggtgattaacagcttaaaaattaaacagctgtgacagagctagatgtaggcgaagctaattgtttgaaagtttctttcggagttacaggttttttttacagaaaggggcaaaatcccatgtatactattaggaggaacctgtggacatctttaagtgagttgaaaaaacattttaatagagttcattgtgcaaagcaaagcagcagttagtttttgtttgtgtctttaaaaattgcttatgtttaatttttgtgactacataatag

SEQ ID NO: 704679 - DNA, 1838 bp, Homo sapiens
cattatttgcctttcagctggggattggcatggattacaatatgcagtttaaatgccttcaacatcattgttctattattatcatcatcaccatccccaaatgtgttgtgtgtcaacttcaggagctatcctagtcattatatagaatcagtttaaatggatgtagcaaatcctcacaaaaatttccagacttaactgcataacatggattagacagacatatatagatgcagaaatagacaagagttcaaatattaacattcttaaataatgtgttactctatagtaccagtggcaaggagaatttttctgctaagagtgggaactgacattttttccaagctaaggagaaagcgttcctggatgtggtgcttcagaagcctattgatggaggagaagtacttctgttccttttgcaaatattttccagccagttgtaaactgatgggtggtaaaggtccaatatttataatgccaaattgctctggaaatctattcgtccagtaatataactttattgttttataaaaatgaggcttctgcacaactagtaaatttagtattttaattcaatagataatatttaaagataagaaagacctatgtataattcatgccttttctggcagtggttctcaatagcagtgggccatgcttaactccagaaattctgatgctcaaatttaggaggccagtgttgctcactttccattcctggatgagagtcagtgcttcagtgagttactcttcctgagaggtgtgtgtctgttgagtccgttgggtgtgttggctcagtttccaggatcatcccactgtgtgctacgtgcgttacatgcttttaacctttatagaaaacccaatcagtgggtatcaaataaagcccaaagaattttccaaactcaaggcaggacatattaagccaattatgagaaaaactaggattagaaccatatctttcactccaaagcctgtgctaattttattgaaccactaagattccaattctccatcaaagatggttttctttgagttattgtagttttgttaaccctattccacatgattttctaggtttttgttggtggtggcggtgctttttaatacaaatgatggtaakgtgttttgtctctctgctcttttgctttgaaggaataacaactgtcctcaccatgaccacactaagcatcagtgcacgacattctttgcccaaagtgtcctatgctaccgccatggactggttcatagctgtctgctttgcttttgtattttcggcccttatcgagtttgctgctgtcaactatttcaccaatattcaaatggaaaaagccaaaaggaagacatcaaagccccctcaggaagttcccgctgctccagtgcagagagagaagcatcctgaagcccctctgcaggtatttgacttaatccaccttcagtttaagattttagcttcttggtcaaatttattttgtcagggaaacaaactgagaacttaaaaatcctgatatcaacttgtaagtcatttaaaaatacagaaaaacataaaagtaactgtatgagcttaaactttatgttggtgattaacagcttaaaaattaaacagctgtgacagagctagatgtaggcgaagctaattgtttgaaagtttctttcggagttacaggttttttttacagaaaggggcaaaatcccatgtatactattaggaggaacctgtggacatctttaagtgagttgaaaaaacattttaatagagttcattgtgcaaagcaaagcagcagttagtttttgtttgtgtctttaaaaattgcttatgtttaatttttgtgactacataatag

SEQ ID NO: 704680 - DNA, 1512 bp, Homo sapiens
tcagtgaatatggggatgatagcaatgctgcctaactttttttttttttttttttttttttaaagggatagtctcgctctgttgcccaggctggagtgcagtggcgagatctcagctcactgcaacctccacctcccgggttcaagcaattctcctgcctcagcctcctgagtagctgggattacaggcgtgtgccactatgcctggctaatattttgtattttttttttagtaraaacagggtttcaccatgctggccaggctggtctcgaactcctgaccttgtgatccacccgcctcggcctcccaaagtgctgggattacaggcatgagcccagccgagttttctttcttttcattcccccatccattaggatagacatttcataagaaatatccttgaagaatatcagaaaaaaggcaaagaatcaagtgcttagtcaatcctatcaaaacataaagttggttgtaaataataaaaacaaaaccaagtgtatgcattaaagcaaatacaccctttggtttataaattcttttattaagtcaattaactcttctcttgcatgccctccctcacatgataattttattatgagtagataatagaatggttaagagcacagaccctacagccagagggcaagaagtccaatcttagctccaccacttgcttagctgcataacattctgtcactttttaaactctctacatgcctcagctccctcatctttaaaatgggaataatattagtgcctacctgtaggactgttgcctagcacatagtaggcattttaaaagtgtgtgtcattatttctaggactgacagaaaatggatcagccaagagaggaatttttatgcttcctaaaatactggtccatgattatatacagagttgctagaaaaagcagctcatgtggttgccctgagcctgtaccctgtagacctccaactacagggagtgtaactaatcaaggacctcagctactgtgctctgaaatccataactacatttgtacagaggtctcactttctgccagctgctcccagccagtaactaagtgctgtgtgaaaactaagggaggtcatttctgggagacatgggactcctcttatggtcaactttggctcaagtattctttgacatctttgtcaaaatttctttattctgatgatcaagctggaccttccattccactttgtcttcacttcacttcactttgtcagacttgcatcatgggctaatgtccctccaacctttctgcctccctccctattttatctcatctttttaatcccatcttggtgtctgattcttagaggacttgaactaacacaatctagcattcaaaccactcttagatatgacatcctattttccaccatatctcccacctcttatttacctgtatctcatactcttggtttctgcatgtgcccaataccttcctgtctctgagcttttgcccatactccttcactgagaaagcactcactacctgaccaattttgc

SEQ ID NO: 704681 - DNA, 1512 bp, Homo sapiens
tcagtgaatatggggatgatagcaatgctgcctaactttttttttttttttttttttttttaaagggatagtctcgctctgttgcccaggctggagtgcagtggcgagatctcagctcactgcaacctccacctcccgggttcaagcaattctcctgcctcagcctcctgagtagctgggattacaggcgtgtgccactatgcctggctaatattttgtattttttttttagtaaaracagggtttcaccatgctggccaggctggtctcgaactcctgaccttgtgatccacccgcctcggcctcccaaagtgctgggattacaggcatgagcccagccgagttttctttcttttcattcccccatccattaggatagacatttcataagaaatatccttgaagaatatcagaaaaaaggcaaagaatcaagtgcttagtcaatcctatcaaaacataaagttggttgtaaataataaaaacaaaaccaagtgtatgcattaaagcaaatacaccctttggtttataaattcttttattaagtcaattaactcttctcttgcatgccctccctcacatgataattttattatgagtagataatagaatggttaagagcacagaccctacagccagagggcaagaagtccaatcttagctccaccacttgcttagctgcataacattctgtcactttttaaactctctacatgcctcagctccctcatctttaaaatgggaataatattagtgcctacctgtaggactgttgcctagcacatagtaggcattttaaaagtgtgtgtcattatttctaggactgacagaaaatggatcagccaagagaggaatttttatgcttcctaaaatactggtccatgattatatacagagttgctagaaaaagcagctcatgtggttgccctgagcctgtaccctgtagacctccaactacagggagtgtaactaatcaaggacctcagctactgtgctctgaaatccataactacatttgtacagaggtctcactttctgccagctgctcccagccagtaactaagtgctgtgtgaaaactaagggaggtcatttctgggagacatgggactcctcttatggtcaactttggctcaagtattctttgacatctttgtcaaaatttctttattctgatgatcaagctggaccttccattccactttgtcttcacttcacttcactttgtcagacttgcatcatgggctaatgtccctccaacctttctgcctccctccctattttatctcatctttttaatcccatcttggtgtctgattcttagaggacttgaactaacacaatctagcattcaaaccactcttagatatgacatcctattttccaccatatctcccacctcttatttacctgtatctcatactcttggtttctgcatgtgcccaataccttcctgtctctgagcttttgcccatactccttcactgagaaagcactcactacctgaccaattttgc

SEQ ID NO: 704682 - DNA, 668 bp, Homo sapiens
gcaagggtggaagatccaaagttcaagaaaaaccaagatttgatggagtatcaaaaaagaagcctaggcaacatggcaaaaccctgtctctacaaaaaatacaaaaagttagccaartgtggtggtacacacctgtagtcccagctactccggaggctgaggtgggaggatcacctgagtccccggagactgaggctgcagtgagctgtgatcacaccactaccttccagcctgggcaacagggcaagacctcatctcaaaaaatatatatatatccacaatgatctaaaatgttatctgtatgagattggtctttgttcacattttttcaagaaaatatcacacaataaattgaatgcagaagcaaactgacatatcaatttgctaatgacatgtcaaacatcatgcaaatgacatatcaaacatcaaaaaaatttgcaaaagatgtaagattgtactactttgggtttagaaattttcttttcataaaagcatttataacaatatgtggtgagcttttaaagaatattttaaatatttctgatttaatttctagtgataaataccaatagatataccctacataaaccaaagctccttgggccctcaatgtatttttaagagtgtaaaggaatcctgaccccaaaacttggagaactgctgccttc

SEQ ID NO: 704683 - DNA, 668 bp, Homo sapiens
gcaagggtggaagatccaaagttcaagaaaaaccaagatttgatggagtatcaaaaaagaagcctaggcaacatggcaaaaccctgtctctacaaaaaatacaaaaagttagccaaatgtggtggtacacacctgtagtcccagctactccggaggctgaggtgggaggatcacctgagtccccggagactgaggctgcagtgagctgtgatcacaccactaccttccagcctgggcaacagggcaagacctcatctcaaaaaatatatatatatccacratgatctaaaatgttatctgtatgagattggtctttgttcacattttttcaagaaaatatcacacaataaattgaatgcagaagcaaactgacatatcaatttgctaatgacatgtcaaacatcatgcaaatgacatatcaaacatcaaaaaaatttgcaaaagatgtaagattgtactactttgggtttagaaattttcttttcataaaagcatttataacaatatgtggtgagcttttaaagaatattttaaatatttctgatttaatttctagtgataaataccaatagatataccctacataaaccaaagctccttgggccctcaatgtatttttaagagtgtaaaggaatcctgaccccaaaacttggagaactgctgccttc

SEQ ID NO: 704684 - DNA, 657 bp, Homo sapiens
ttcagtgtctgaactggaaggccagagctgtggtggatctgctggtagccacctatagctgtctggatctctgcactgcccagggcaccacgggcatgttatatcacagcacagtgcaaccagctggttcctgggcatgactacaagtcgttatgaaaaggctgaggacaagatgatagggaaatgtgaaaaggaaaattctagaagtaattttcatataaattaatttaaataacaaaaaaamcaaacatttaagtttctccaggtaatctggcaactctctggtactgtgctaaccaggcaaccattggttagggagcttccaaaactccgtgtccactccaggccccgctccagccatctggccaagcacactcagcttcaggacacaatgagcatagccagtccctctttgatgtccttggtaccagaaccttcccattttaccccacaggactcccaggattcctttctagggaagagtttgatgatgatgatggtgaagatggtaaagaagagcagttacccctgattgagtgccttctgtgtgccaggcattgtgccagagcctctaaacaaaccatctctaatcttttcaaccttacgaagcatattttttgtgattcccattttatagaggagtaaacggaggcccac

SEQ ID NO: 704685 - DNA, 1955 bp, Homo sapiens
tagtttccagcctctttaaatcaagccattttctcttgagacatatcaatgtgtgtgacatattgtcaggttgaacacacctgacgagtttttcagcctccagggctttagattactattggcgtacaaagtttgtcatgctataaatattgccgtttgatgatcaatcagatttttaaatgaaattaaaatctaaagtaatttcagcttcattttactatattttctttgacagttcccaacttaaatgatgtctgatataaaaaacagcggagaagtatgtgttttatttatttatatcaagcagaaacttgaaaatgattatactcacatacatgtatgctcagttgtattctatgccatttacagcaaagacataatagcattaatgtaacataacattaataaagcattttatgttagttttaatgtaattataaaatacaattaatataacattttctctgtaaacaaaaacagtttacaatatgacagaaaggtaatgaaaaaagggtgtgtgtgcctgtgtgtgagtgtattcatgaatgtgtgtgcctctgtgtgcataaggcctatattttcttctgggctatgcctagttcatggaactcctaaagactccccataggtaaaagattaaagcttccattctaggggaattttaaagggtctgcatttaccaaaattgagtgcagagccagaaagatattgatttgtagctcatatgtgaggcaagccttgacccttgctgaagtgcattggataatgagttatttaaagaaatgtcacacagctttgaytgagtaatgcccccttgctaaaaaaaaatctataattaatctccattttttcagaatatactaaggcttcttaatttggtatgcaagacactcatgatttccaagtgtattttcaactatttatcatcaggaaagctacattattgctaaaaagaactccagacttacttagttattgcgtatgtgcccagtgcttccctatcttcattaaaaacatgctttatttctcccacacttctgttttcttaaggtctaaagatggtgcatcttttataactcagtttaaattatgtatcctctatattgtctgccctaataaagtcagtaaaaaaataatttcttcactggggggaatctcaagactctggattttctgtgtcattttagaataaaaaatttcattttttatcttgtatttatcattttgatattttttattaatgctttccttgatgaatctttgtaacatctgcatcatctcagtgctttgcacacattagtcattcattagctacttgtcgagtgaatgaatcaacaaatgaagtaataatgaagagtagaatttttttcttaataattctttactttggcttatgctgcctgtcagcttgggttagcagcaactcttgctctcaataatttcatgattgattatctgttcagcagtacctaatgaagaaaacaattcttagctgagaatactgatccaaagtatcatttgctttgctggagttgatattaccatgtaaacaataaatttttaattgtcaggacttagcaatattagatttttgaaaaagaatcttaaaattctattcatatggaatcatacaaaaatagaaagtcttgtgatagagctacagattttatgttaaaggctatttattatccaattgatgtattaagagcctgttacaaatcacgtactgtgcacagactttacatcaaacctcagaagagccctcagattaggtgtaactccattcctcaaatgaaagtacaaggcccagagaggttaagcggattcacatcacacaactattgattggtacattgaagatttatatccaggtctgttctctttccattgtactgattttgttcttaagtttgctttaattttgacattgaagatgtcagatatagaaaattttg

SEQ ID NO: 704686 - DNA, 606 bp, Homo sapiens
gttcatcaaattgttaacttttggttaactgtgtgtttctttgtttgctttccaagaatatgtttcacagacactattagttcaagaaagctgggggaaaaaaaaaaagttaaratcctgactagagaatgaattagagaaagccaaagtaattgcctggaaaacatatgtgggaggttgggtcaagtttaaaggttcagaagtagactttgagataagcatttttctggatattttgaattatttcctaaagatattattctttgagatatgaccaaaaacatatagcgaaagatcaattttgttttggcaaatccagtccaagaaaataagttctctaaaggctcagaagtgctttgtcctagtaatcagtaatcacaactctgtaccaattattggtaagtaatatatatagattatcagatactgcagtttctgccagtttgtctgaattaaccctttcagtgttttgtgagcttcagttttaaaatattagcagaatataaaataattttaaatttttaaaattttaaagtaggaaaagatttaagcaaacacttaaccaaagaagatacacaaatggccagtaagcatatgaaatgatca

SEQ ID NO: 704687 - DNA, 1159 bp, Homo sapiens
tgtctcttcatatactgcagtcagtgctatgagcaatggccaaagcttctgtaaaaacagggttgygatgctgctggcaatatagtcagccctgtgtctacttgggttcttcatccacagattcaaccaaccatggatcaaaaatatttgagaaaaaaacaataaaaaataacctacaacaataaaaatgtaatacaggtgaaaaccaatacagtataacaactttttacatagccttcacattgtattaggtaccataagtaacctagagatgatttaagctataacggaggatgtgggtaggttatgtgcaaatactatgccatttacacaaggaacatgagcatcctcagattttggtactagggaaggtcttggaaccaattctctgaggtatcttagggacaactgtacctagaggcaaaatatgtctggcaagaataggaatttccagggctgatcacatttcttcaggctttctccccggtaatgacatatcctatcgctgggcctccaaaacatggtaattgaagccaaaacatggtaattgaagctatcacatcctcccacacctgcaaattagattttcacttgaggaaagagtgtttacatgtgaaaaagttggaaaataagtgatcatcagggacaacttttgatgttgctgctactctgacttgtgactgttggtcaaattttgaaatttatgtcttccatcaaatttgcaaaaatgcaaacttggcaaaaacatatatctctaaaataacattctgaaaaaatgtatgatagaaatgataaccaaagaaaatatcttggaaagggaagaatgaaagtaatatagccatgtgttacatagcaatgttttggtcaatgagggaccacatatatgaaagtgttccacagaattataatactgcatttttactgtaccttttatatgtttagctgtatgtagatataaaaataccattgtattacaactgtctacagtattcagtgcagtaatatgctgtcaaggtttgtagcctaggagtaataggctttacccatatagcctagatgtgcagtaggctattagtatgtaggtgtatgtatgtacactctatgatgctcaagcaaaggcaaaattgcctaataactcatttctcagaatgtatcccca

SEQ ID NO: 704688 - DNA, 1439 bp, Homo sapiens
gttggtagggtgagtaataactgaatggggtgacaatgaggagagtcaggagggctaaacatggcttccacctcttgccaaagcctggtgtggctgcagccgaaccatttcgtgcctccyatccttgaggagggtggagaccaccattcagataggaagatggatcatacttctcatatggcatctgcgccatttgcttttctggtttccaaggcatctggatcctatcctcaattatcaatgtaagataacggtgctcttgtttttcttctgagagtttcacctagaattgttgcccatttagtacccacattatgtggtgagagaagtgccatctaggggtgactgtccaaagtcccacatcccatccacccctgtaagcactctgagacctgtgatcttagcagaccatcagaaggcaaatttcttgaaagatattcatttgttttcttacataattaccttccttggattgcattttgagaatcatgcccttggctttaattaaacgtgctagaaacagtcatgcagagttcactgctacatttgcagaagaactatggtcgcagacaccatcctataccattctggaaaagccttttccaagtgtgttttgtggagtgcaagtctgcaagacactaataaaaatgtcactatgtgccgggcacggtggctcacccctgtaatctcagcactttgggtggctgagacgggcggatcacctgagatcaggagctccagaccagcctggccaacatggcgaaacccagtctctactaaaaatacaaaaaaattagccgggtgtgggggtgggcgcctgtaatcccagctgctgaggaggctgaagcaggagaattgcttgaacccaggaggcagaggttgcagtgagcactctagcctgggcgagaagagtgaaattccatttcatgaaaaaaaaaaaaaattcttcatggggaaaggttagaaagtttgcgaaaaacagggatgattttcctgaaggttgtttaaaaggtttcactaacaacaacaacaacaataaacatcatggatccttagaaaggggatacacggtgcagcatttcccattccatttcattgaccatagagtcctattttgggctgcatctcttgagagtgtgttccatgcgtccagcagaagaggctctggatgcttcttgctcagtcagtttagcaccatgggctgggtcatgcgagatgcggagaggaggggtacatatgcacttcatggtgtggagagctgcaggtggctcctcagtgcatggtggtctttggtgctaagggttccaggaagctgtgcagcattttggctgcattagatattaacttctgctattcatgatgtcaggggtccaatttcaaatctatcactcagcactcttctgtaagaacagtacacaaagttaaatattaaaatttta

SEQ ID NO: 704689 - DNA, 1439 bp, Homo sapiens
gttggtagggtgagtaataactgaatggggtgacaatgaggagagtcaggagggctaaacatggcttccacctcttgccaaagcctggtgtggctgcagccgaaccatttcgtgcctcctatccttgaggagggtggagaccaccattcagataggaagatggatcatacttctcatatggcatctgcgccatttgcttttctggtttccaaggcatctggatcctatcctcaattatcaatgtaagataacggtgctcttgtttttcttctgagagtttcacctagaattgttgcccatttagtacccacattatgtggtgagagaagtgccatctaggggtgactgtccaaagtcccacatcccatccacccctgtaagcactctgagacctgtgatcttagcagaccatcagaaggcaaatttcttgaaagatattcatttgttttcttacataattaccttccttggattgcattttgagaatcatgcccttggctttaattaaacgtgctagaaacagtcatgcagagttcactgctacatttgcagaagaactatggtcgcagacaccatcctataccattctggaaaagccttttccaagtgtgttttgtggagtgcaagtctgcaagacactaataaaaatgtcaytatgtgccgggcacggtggctcacccctgtaatctcagcactttgggtggctgagacgggcggatcacctgagatcaggagctccagaccagcctggccaacatggcgaaacccagtctctactaaaaatacaaaaaaattagccgggtgtgggggtgggcgcctgtaatcccagctgctgaggaggctgaagcaggagaattgcttgaacccaggaggcagaggttgcagtgagcactctagcctgggcgagaagagtgaaattccatttcatgaaaaaaaaaaaaaattcttcatggggaaaggttagaaagtttgcgaaaaacagggatgattttcctgaaggttgtttaaaaggtttcactaacaacaacaacaacaataaacatcatggatccttagaaaggggatacacggtgcagcatttcccattccatttcattgaccatagagtcctattttgggctgcatctcttgagagtgtgttccatgcgtccagcagaagaggctctggatgcttcttgctcagtcagtttagcaccatgggctgggtcatgcgagatgcggagaggaggggtacatatgcacttcatggtgtggagagctgcaggtggctcctcagtgcatggtggtctttggtgctaagggttccaggaagctgtgcagcattttggctgcattagatattaacttctgctattcatgatgtcaggggtccaatttcaaatctatcactcagcactcttctgtaagaacagtacacaaagttaaatattaaaatttta

SEQ ID NO: 704690 - DNA, 845 bp, Homo sapiens
tgcgtggagatggaaggacaggattctcctgggggtctcctcagctgtgccctgtggttgagggcactgcctgtggtatcccagagtcttatttagatggatgtttgagagaaattttcctttgctctcctctacaagaaaagccattcctcttttgagtggcagctcagtgtagacccttgactctgttttttgatttgcttttgacaccaaattcatggtcacatccagcaaccaaacagggtgctgtgtacacatttcttgtgcttgacttacctctgattgttattttatttcccctgttttattttattttatttttatttttggatggagtcttgctctgttgcccacactggagtgcatttgcatgatctcagctcactgcaacctccacctcctggattcaagagattctcctgcatcagccactcgagtagctgggattacaggcacgcagcaccacacccggctaatttttgtatttttaatagcgacagggtttcaccatgttggccaggctggttttgaactcctgacctcaagtgatctgcctgccttggcctcccaaagtgctgggattacaggcrtgagctgccaagcctggcctctcctgttttattttaaatatgtatcactcatttattttatctgattgtattagatgtagatatattttggtatttgttcttgaagtctttgagcaaaatggttgagtataaatatgtgaatatttgttattttaacattttattcattcatttttttgcagaggcagcaaattcacaattcaaaaactatgaaaagtatagtatgtgaaaagtctcccacctattcctatttct

SEQ ID NO: 704691 - DNA, 585 bp, Homo sapiens
ttccttcctccctttgaatatttccagtgcctctggagtagccacggtgccacaattgatggtgcatcactggaggagctcccaccacgtaatgtattccagcctgagaagcctccagtcagggcttcagggtctgcaaaatgatttagagtcctgcctctccctcaccataaatccagaagcctgtacatcacatttcctgcaataaggatacgtgtacctgagcctgataaatagayagtcccccatctacccaccctagccttctgcctgctcttctccagaagaaacagcctcagctctttcaactcagcatattttaccctcttcctaccacccttctggctcccagagaagcatcccaggtacgcttgcttctgtcctgatgatcaggtattacaggctcattcatcgtgctgatgcgtgtcaacttcaggcccatgaggccaatttgatagccagaaaacatccttgtgggtggctcccacttgacctcccttctcaccctccactgggcctgggagttcactggtgtttcacacaggactgtcacgggaactgtgaaacgggttcctactccttcgc

SEQ ID NO: 704692 - DNA, 1310 bp, Homo sapiens
tggtgcagaaggactcttgccattggcacataagtcagaaggtcagctgcctctggctctgccagggcagtgggcatattctccaagtccgtcagggatcaggctgcaatgtgtttgcccatcatgactttcctttgtaagtcttcacagatgagaaaacgagtcagggacctgactaagcaagacctggaattttgagccagatctataatgtggaaacatgaaaatcttttcatctggattaatgccctgctggtggtatctttctataactatccagggataaagtctaaccggaataataataatttaaaaaaatcccaacagagcctccaaacatcctaccctcatcagaaacttggcagcatgattttggggtgtttttttgtatagccctgttgggaagcagacccctggaactgttcatttgtatagcttccttgaccaagctaggattctagcatgaagatagtctgtgatgtttttccctcttgattttgtgcacttgatttatttcttcactttattttccctttstgaagttttcaatgatataccaggattgtagtagaagacagtcttctgaaaagtgtccttttgcagtggaagttgtgagacagggtgggagaaaatgaaaaagatatagggggtgaggcaaatgagaaagtagagtcgaggttcacccttctgcagaacctgcctgtagaagccgctgcagtagaggcttttctggctctagaagcctctacagaatgtcctgggcctggggttgcccttcactagtattgtgagagaacctagtcatagggaccaagaccaggaacactcgccttgaccactcaatctctgcctgcttttagcagtgatttgctagacccatctttctataatggagattattttgtttgaaaaaaaccttattttttattaatggtggcggtgggggtgcataagcaatgctattccacagatgatgtgcacggaacaagtgagaagggaaagggaccttgtgctagaaccagtacagaattcagagccatttctcttggctgattatttggtgttggatagtggacaaagtgtttggtcctctctgatgaggtgcaggcattaatttctggtagattctgatgacactgctaggaaaagaaggtgtgacaacgattctataggagaaactgggggaaggcgggtaaaaacaagaatgaaattccttttgaaatgtgcctagatactattcagaggaaattagtggttgaaagctggcagttggagcacaaagtattagacaatgacttagtatcatggcc

SEQ ID NO: 704693 - DNA, 1021 bp, Homo sapiens
catggatatattctattttgtttatccactcatctgttgatggagatttgggttatttccaccttttggctattgtgaatagtgctgatattgtgaatagtgcagatatgagcattcatgyacaagtttttctttgaatatctattttcaaatctttggggtatagacctaggagtggaattgctgggtcatatggtaactctatgtttaacttattcaggaacctccaaaaggttttccacccacactcactcttataaggcatctgatacctcagtctgtgctctggcacaggcacccaaggcatcccagtctgtgccttggaagcctgtagcagagtcttagggtttaaaagatctgggtgtaggtcagactgtgattctacaagctgtgacaccatgggttggtcatttctttgtactttggtcatctttgtgctttggtttccacataggacctcacagggtggtctaaatattgaatcagataataagtgagactatggataaaacgagaggtgccatattagagtagtagggggtaagggctctacctggccctattgttcagtgatggtaaaaccttggtcaatttcttatagcctatgcttcagtctcatctataaaatggggtgaataagctgggcatagtggtgcaagcctgtggttctagctactggggaggctgaggcagtaggattgcttgagcccaagagctggaggctgcagtaccccatgatcacacctgtgaatagccactccatagctctagcctgggcaacatagtgaggccctgtatttttaaaaatgggatgaataagagtacctgcctcataggactctagtgttaaaacagtcaattcatggaaagcattcactggaaagtggtaccaacttagctactgctagaaaatgcttagcaatactggtgggggccgggggactggtgctcacattttcagcttgcacctgggttcctcgcccctcccctttgctcaacttctctacttctgtctgtgggc

SEQ ID NO: 704694 - DNA, 1021 bp, Homo sapiens
catggatatattctattttgtttatccactcatctgttgatggagatttgggttatttccaccttttggctattgtgaatagtgctgatattgtgaatagtgcagatatgagcattcatgtacaagtttttctttgaatatctattttcaaatctttggggtatagacctaggagtggaattgctgggtcatatggtaactctatgtttaacttattcaggaacctccaaaaggttttccacccacactcactcttataaggcatctgatacctcagtctgtgctctggcacaggcacccaaggcatcccagtctgtgccttggaagcctgtagcagagtcttagggtttaaaagatctgggtgtaggtcagactgtgattctacaagctgtgacaccatgggttggtcatttctttgtactttggtcatctttgtgctttggtttccacataggacctcacagggtggtctaaatattgaatcagataataagtgagactatggataaaacgagaggtgcyatattagagtagtagggggtaagggctctacctggccctattgttcagtgatggtaaaaccttggtcaatttcttatagcctatgcttcagtctcatctataaaatggggtgaataagctgggcatagtggtgcaagcctgtggttctagctactggggaggctgaggcagtaggattgcttgagcccaagagctggaggctgcagtaccccatgatcacacctgtgaatagccactccatagctctagcctgggcaacatagtgaggccctgtatttttaaaaatgggatgaataagagtacctgcctcataggactctagtgttaaaacagtcaattcatggaaagcattcactggaaagtggtaccaacttagctactgctagaaaatgcttagcaatactggtgggggccgggggactggtgctcacattttcagcttgcacctgggttcctcgcccctcccctttgctcaacttctctacttctgtctgtgggc

SEQ ID NO: 704695 - DNA, 653 bp, Homo sapiens
cccagcactttgggaggccgaggtgggcagatcacaaggtcaggagatcgagaccatcctggctaacatggtgaaaccccatctctactaaaaatacaaaaaaaaaaattagccgggcrtggtggtgggcgcctgtagtcccagctactcaggaggctgaggcaggagaatggtgtgaacccgggaggcagagcttgcagtgagccaagatcgtgccactgcactccagcctgggcaacagagggagactctgtctcaaaaaacaaacaaacaaacaaacaaaaaacaattttagcatttatcagtgaatcttgcctgctgccatttttactgtggtattctaagagtgatttttctactttcctcaatttttcatttattacttagaattcttttgtaagaaagagttgtcccttctccccatttatccatttatttatttattcaatacattatttacattagtattgacccaaagatttttattctttgagtcataatacaatgctattgttgtttattttgttactcaaattgttctacctttggaatatcagtcattggatgttttgatcattggaagctttttcaggttagaggttttatcctttttacttccttcctttgttcctttcttccttcttaacttcttt

SEQ ID NO: 704696 - DNA, 653 bp, Homo sapiens
cccagcactttgggaggccgaggtgggcagatcacaaggtcaggagatcgagaccatcctggctaacatggtgaaaccccatctctactaaaaatacaaaaaaaaaaattagccgggcgtggtggtgggcgcctgtagtcccagctactcaggaggctgaggcaggagaatggtgtgaacccgggaggcagagcttgcagtgagccaagatcgtgccactgcactccagcctgggcaacagagggagactctgtctcaaaaaacaaacaaacaaacaaacaaaaaacaattttagcatttatcagtgaatcttgcctgytgccatttttactgtggtattctaagagtgatttttctactttcctcaatttttcatttattacttagaattcttttgtaagaaagagttgtcccttctccccatttatccatttatttatttattcaatacattatttacattagtattgacccaaagatttttattctttgagtcataatacaatgctattgttgtttattttgttactcaaattgttctacctttggaatatcagtcattggatgttttgatcattggaagctttttcaggttagaggttttatcctttttacttccttcctttgttcctttcttccttcttaacttcttt

SEQ ID NO: 704697 - DNA, 653 bp, Homo sapiens
cccagcactttgggaggccgaggtgggcagatcacaaggtcaggagatcgagaccatcctggctaacatggtgaaaccccatctctactaaaaatacaaaaaaaaaaattagccgggcgtggtggtgggcgcctgtagtcccagctactcaggaggctgaggcaggagaatggtgtgaacccgggaggcagagcttgcagtgagccaagatcgtgccactgcactccagcctgggcaacagagggagactctgtctcaaaaaacaaacaaacaaacaaacaaaaaacaattttagcatttatcagtgaatcttgcctgctgccatttttactgtggtattctaagagtgatttttctactttcctcaatttttcatttattacttagaattcttttgtaagaaagagttgtcccttctccccatttatccatttatttatttattcaatacattatttacattagtattgacccaaagatttttattctttgagtcataatacaatgctattgttgtttattttgttactcaaattgttctacctttggaatatcagtcattggatgttttgatcattggaagctttttcaggttagaggttttatcctttttacttccttcstttgttcctttcttccttcttaacttcttt

SEQ ID NO: 704698 - DNA, 640 bp, Homo sapiens
gggtgaacctgggaggcggagcttgcagtgtgccgagactgtgctactgcactccagtctgggcgacagagcgagactccatctcaaaaaaaaaaaaaaaaaaaaaaaaaaaaaaaattaaaagtaaaaagaaaaagcaaactgtatgcattgtgaaaactcatcaaatttcctcttatttgtgcattctactgtatgtacgttttaccttaaaaaatccatgagccgccgcgcgcggtggctcacgcctgtaatcccagcactttgggaggccaaggcgggcggatcacgaggtcaagaaattgagaccatcctggctaacrtggtgaaaccccgtctctactaaaaaataccaaaaattagccgggtgtggtggcaggcgcctgtagtcccagctactcgggaggctgaggcaggagaatggcgtgaacctggaaggctgagcttgcagtgagtcgagatcgcgccactgcactcaagcctgggcgacagagcgagactccctctcaaaaaaaaaaaaaaaaaaagaaaaagaaaaaaatccatgagcgataaacgaagattgaactctagttatctaactagagttagataactacatgctgaagtgttaaagattgaagaatactgatgttagcaa

SEQ ID NO: 704699 - DNA, 631 bp, Homo sapiens
tcttcaaagcaagcaacaatgactcaagcccttctcacatttcaaatttctctgcctcatctatctcctccctttctcttctgctggatctctgactgtaggcagagaaatttctctgtttttaagggttcatgtggttagattgagcaaacctggataacccaggataacctccccatctcaagtactataaccttaattatgtctgcaaaatcccttttgccatataaccataatacattcacaggttctgggaatcaggaagtaggcattttagggagtcagcattctgtctaccatgttactctttagataaagttataatttagtaacagacagttgtatagagccacaaacatttttaagttargggcgattaattggatcagcctagaatagggcacacaatcttgattacacataatgtaaaaagtacaaagcagaaaagcaaataatttcttatagcacgttctctctttcctgtacaaagacccatctgaaagtttctctatagttacaaaaatttataaagctttgaccttatgcttttaatagctagttgtctaacaatgacacattcttgtatttttctccctttaccctgaatgtttaattcactgacatttaaaaa

SEQ ID NO: 704700 - DNA, 1883 bp, Homo sapiens
cctttcttcatttctaatacaggtgtttgcaggtataaattttcctctaagcactgctttagctgcattttgaaattttccatatttgtgttttcatttgcattcagtttaaaatactttctaatttcccaggtaatttcttcttgatccatgggttatttagaaatgtgttgtttgatttctaaatgtttatggatttcccaaatttccttctgctgttgatttagaattaattcctttgtggacagaaaatatactttcatgatttcagttcttttaaactggatgagacttgttttatggcctascatatggtctagcctggtgaatgttccatggttgataatattcttcaagtcttctttatcctacttattttcctgtttggttgttctatccattatttagagtggggtactgaagtttccaactattatacttcaattgtctatttctcccttcaattttagccttcatactgtaggtagtggtatatctagagtattctctcttgcaaaatcagtgctgatggcaatgtagacagcattattggaagtaaagactggaacttgagagatacttccatgatccaacaagagacggtgagagcctagggaagggaagtgaacttagtgatggataacagagtgatttgggaaagattttaaaatttatatttatttattaaaactaataaaaatgtaaagtgaatagggcatggtgactgattacatgagaggtatgaaaaagtcgaagaattttaggaagggatatcttaatgagtaagtcatcagtcataagccaattcaggaagaggttcaggttaaaatgtcaggagagtagtttcagttttggacaggtagagtttgagatacttgtaagacattgacttagaaatatgaattaagagatggttggaaatgaatactctaataattcatcttatttatctttaactaggaagttagcagtccacaaatttagcaaaactttagcaatgtgtcagagcactgatgagattattagtagaccaaaaggaaaagacaacaaataaataaatggagaaaatgtctgatagggaaagtttgaaagtaaacaaataaaataaggaggaaaatagtagtaagagaaagacagaaaagaagaatttatctacagtgaattctgacctacaaaaaatgacaagtttaagatggggaatagtaataattccccttaacatcaatcacatctaccatacattagcatggcctcatcatagtgagacctacaagtatccaaaaggaaaattttccaaaataataaccctctagggaaaaaatagcaaaaacctgggattcatcccactggttccactgattatatggcattgtggaatgaagttggaattggaagtagccagacagggatttaaatctcagctctgacaactcttggctgtgcaagattggtcaaattaaccactctgaatcttagttcccttctgtcaaaaagaaaataatatctactttcataattgttataaattcttaatataggccttagcatatagtaaacatttaaaattagctttattagtagcaataataaaaatcagtatacattcatctcaacacaatgccacctatttatgctctgctctggtcagaagaaagtgaattttccattggattttttttattattggaaatatatcatttcccagtattttttatctacttataaaatgatgtagatactttttcttattcattatccaggtatcttgaaactttgctggaatgccatgatgattttggttgtagaagtgtcaactatctccttgagtactacttttcaagtcaatgagctcttaggaaatagcattagaaatattcatataa

SEQ ID NO: 704701 - DNA, 2195 bp, Homo sapiens
atgaattagaatcatttatagtacatacataaacaaagaatgaaggaaagagaaaaaatggcactaagatgaatgaatgaatcctttaatgttgttaacagactgttctcataataaataaaattggagctaaataagatataggaataaaaatgtccataagcaccaaactataaccctaaattaaaaactgtctatgaaagcaatataatagcaggcacaaaaatttcatagaaaaaactatgtacaaatttaaatcttagaagattataagttatttgttaggaggtgataatttcaactctgctggccttttagcatcctataactactgacagtacaactaaaaatttaacttggaaaaccaaataagagtagtaagagcaattaaatttttttttaaatggcagggcctttcccaaatgttttccatacaccatcactgatcttcacacaaatcctgaaaaacgggtataataattggaaagtgttgcttttgttttaaaaacaaagaaaggacaascaggtattacacacttcctgatacaaagtatataccactgtgaagctttttttggcaaaaagaaaaaagaaaagaaaatcaaaattaattcatatcaagactagagatctaattactttttttttttttttttgagacggagtcttgctttattgcccaggctggagtgcagtggcacaatcctggctcactgcaacctccgcctcccaggttcaagtgattctcctgcctcagcctcccaagtagctgggattacaggtgcacagtaccacgcccagctaatttttgtatttttagtagagacggggtatcgtcatgttggccaggctggtctcgaactcctgaccttaggtgatccgcccacctcagcctcccaaagtgctggaattacaggcgtgagccactgcgcccagccataattacaattttaaatgacacacggtgatcaatttgcaaactccaggctgtggtaaactacaaaacaactaggcttctttaacaaactgcaaaggggggtaaaaacaggagaaacctatggcttaaaagatacttgagaggcatactaaccactgaggtgtatagaccttgtttgaatcctgatacgaataaatttttaaaaatttctcagaattatttgaacatttgctggatattttatgtcattaagaaattttcctgatattttacaggataatatttatataaagtttatatatgaaaaagagtaaacagaaaaatatacacataaagtaacacaatctctgaaggtctttttaaaaaagtgaggaaaaggaatatgtgatatttttaccaaatatttatttgacatgaccattacttatgtaataagtcaaagaatgttcaaaactaaatgtgaggttaattactggtgtgtgacacagaatataagtaatttgagggaagagcaatattcattatgcataaatggtaacactgtagatacatatgctcttaacaactgataattgatctatttgaactttaaaacgtctactctcaaattggggggaaaaaacttaagactacaacaaaattaactgcagatcaaatatgacaaatattttaactttgaattattggacagaggaactgaaaattgaatatttacctaatacatgaagaaataacttatctttgagggagtataaaaaataaaagaaaaatgtccccaaatgtaataacattttaaacatttacaaaaataaaaaaacaaagggaaaactacaaaggtaaaaactgtaatgtacaaagaacccattcaattatgtaagatattaagacttcatttatttcactgaactagtatttttgaatacctactacgtgccaaccattgtgctaggtgcttatccctgaagggagagttactacaagggagcacaggagagcctactggggtgctggaaatagtctatatcttcacttgaatagtggttacttggatatatacataggtaagagttgtggacttcagtgtaagttgtacatgaaaagttcatttgtgttgctttccacttctgctaactgttcttatacacactatttcaattttaattcacagaaccttgaaacaaatttctacatagagtattacatgtcgtcttatgacagacgttttaaacaatccaggaggagaaaacagatgtataca

SEQ ID NO: 704702 - DNA, 2195 bp, Homo sapiens
atgaattagaatcatttatagtacatacataaacaaagaatgaaggaaagagaaaaaatggcactaagatgaatgaatgaatcctttaatgttgttaacagactgttctcataataaataaaattggagctaaataagatataggaataaaaatgtccataagcaccaaactataaccctaaattaaaaactgtctatgaaagcaatataatagcaggcacaaaaatttcatagaaaaaactatgtacaaatttaaatcttagaagattataagttatttgttaggaggtgataatttcaactctgctggccttttagcatcctataactactgacagtacaactaaaaatttaacttggaaaaccaaataagagtagtaagagcaattaaatttttttttaaatggcagggcctttcccaaatgttttccatacaccatcactgatcttcacacaaatcctgaaaaacgggtataataattggaaagtgttgcttttgttttaaaaacaaagaaaggacaagcaggtattacacacttcctgatacaaagtatataccactgtgaagytttttttggcaaaaagaaaaaagaaaagaaaatcaaaattaattcatatcaagactagagatctaattactttttttttttttttttgagacggagtcttgctttattgcccaggctggagtgcagtggcacaatcctggctcactgcaacctccgcctcccaggttcaagtgattctcctgcctcagcctcccaagtagctgggattacaggtgcacagtaccacgcccagctaatttttgtatttttagtagagacggggtatcgtcatgttggccaggctggtctcgaactcctgaccttaggtgatccgcccacctcagcctcccaaagtgctggaattacaggcgtgagccactgcgcccagccataattacaattttaaatgacacacggtgatcaatttgcaaactccaggctgtggtaaactacaaaacaactaggcttctttaacaaactgcaaaggggggtaaaaacaggagaaacctatggcttaaaagatacttgagaggcatactaaccactgaggtgtatagaccttgtttgaatcctgatacgaataaatttttaaaaatttctcagaattatttgaacatttgctggatattttatgtcattaagaaattttcctgatattttacaggataatatttatataaagtttatatatgaaaaagagtaaacagaaaaatatacacataaagtaacacaatctctgaaggtctttttaaaaaagtgaggaaaaggaatatgtgatatttttaccaaatatttatttgacatgaccattacttatgtaataagtcaaagaatgttcaaaactaaatgtgaggttaattactggtgtgtgacacagaatataagtaatttgagggaagagcaatattcattatgcataaatggtaacactgtagatacatatgctcttaacaactgataattgatctatttgaactttaaaacgtctactctcaaattggggggaaaaaacttaagactacaacaaaattaactgcagatcaaatatgacaaatattttaactttgaattattggacagaggaactgaaaattgaatatttacctaatacatgaagaaataacttatctttgagggagtataaaaaataaaagaaaaatgtccccaaatgtaataacattttaaacatttacaaaaataaaaaaacaaagggaaaactacaaaggtaaaaactgtaatgtacaaagaacccattcaattatgtaagatattaagacttcatttatttcactgaactagtatttttgaatacctactacgtgccaaccattgtgctaggtgcttatccctgaagggagagttactacaagggagcacaggagagcctactggggtgctggaaatagtctatatcttcacttgaatagtggttacttggatatatacataggtaagagttgtggacttcagtgtaagttgtacatgaaaagttcatttgtgttgctttccacttctgctaactgttcttatacacactatttcaattttaattcacagaaccttgaaacaaatttctacatagagtattacatgtcgtcttatgacagacgttttaaacaatccaggaggagaaaacagatgtataca

SEQ ID NO: 704703 - DNA, 1362 bp, Homo sapiens
tatcaagagaaatggcactggactactggtggtcctcaacctcatgtgaaactttcaagtataattaaagtaacacatccacccagaataatttacattattgataaaagaatagaaaggattagataatttaggcttctttttagaatcattagaagactgagcaatagacaaaggccaatttagttgcaaaagttttaattttattttagctataatggggacactcttttagcaggctatgtaaattgctttaaattcaagccattggtgaggagttgctaaagttgcccgatttcttagtttgtttatatctgcatttagctgctatgcaatgtattaatacatgaagatctaataagatattaaacagctctaatgttcagggtgactcccaaattatttttgaaaaattaatataatgggtcatattagaaacctttcattttgggctgcaagtaactatccagacagtcttacaaggttcagtgcttagagagactgccgacaagagatcccatttaaagcggaggccatgcttaatgaacaacgaaatatggccccatggggtagggttgaaagggaaggtcctaggtctcttgtatgctcaaaataaggtctaagatggcttatggggtccaaaatctcagtatggcttcaatgcatcccttacaaattgtgggcaaaaattgcaaatggacatgttaagaaggtgatgaaatttatcaaaacaaattatttgaaagccaaggccaatagggagcttccagagcagcacctccagtcatcaggtcacagaacacaatcaacaccaattcccatgggttcactttcatgctgaaatcatgcctccccctctatgtgctatccgaggatcactgtgtttcctacagggagctctttcctgtaacctcccagactcatgagcttgtgctgagataacttttaaaattgaatacttactgagtatttattgaaagctggtttcttttaagtttgctacaaccaatacaaaaaatcaaatgggcatcaattccttgtagagcaatgtttactcttgttagaaaggaggtgccattagtaagataacataggtattattttactagaaataaaataattgtaataaatgacatgggtgtgtttcattgcaattaggtttaatcatgttttctcactgtaataaagaagcacctgagtcgacatggaaggcgtgattgagttttcaccattgccctaaaatagtgggtgtgtatctccattatcttcaagtcackttcaggttaaaaccatcccagagtatttggtgcagatttacatgttaactagttcctcagagagaggggatgtgagcagtcttaa

SEQ ID NO: 704704 - DNA, 1330 bp, Homo sapiens
tgcactccagcctgggcgagagagcgagactctstctcaaaaaaaaaagaaaaaaagaaaaaaagaaaaaacttcagaaagctggcttggggaagcatttccagaacgtgatcatagaatcctagcaactagggaaagatgagtcactgtgaggaggttgagtctgaagatacaaagcttcgaatttatcaccctgcattccacaaacaaccacagcatatgctttctccactgtttctcattttggtcactagagcacctgttctatggattgagcaagatgccagggagtgtcatctccctcttcctcatgaagcccccaccaccaccgcatccagtagtcaccgaatcgtgtacatcaagcctcctaaatatcttttaagtggacctatttccctcccactcccctatcaccactgtaaatgtcgccactgtagtggtctccttgcgtctgatcgctccttgctgcaatccattctccacgttgcagaagggatagtttgtaaaattcccatcaatgcataccagtgactgtggaatggacattagccagatccagcattttcagtcctttggctgctgcaaactttcttaaatcacactcctttcaacatgcagctccctctgcctggaatagccttcccctctgtctacctaggccttctcccttctgcgggtgtccagagaatggtcctcctttgtaaggtcttccttgaagtcccctgcttaccaccgtcctgctctgtgctccagatccttctctattttcccttccacagccctcctgccacttcactgtagtcatgttgcaactacccatcttctttggcacgaaggaagttctgacaggtttcacagccatgtctgtcttctccgtcactgtattctcagtacctattacagagtaaatgcttaaaaacataggatgaagaaaaagtgaatctacaactagggacaaatttacaatgaggcaaccccaaggatgcttatcagaactctgcagattcaacagtgaaaatggcaggcatgataaatcaatgacttaaaaagagaagggagtttacataatctgcaagcactgagcaattctggccaagcagagggtatgggtgggtacaaggtggtgctttctactactcaccaggacagcatcactacaaggggaaggcaggtgaccacagggggctgaagaaaagaggagcaggatgagaggaggaatttggaaagttcacttttacatttcttctatggtccgctaagtacccattgcctgacacttagtaggcatccaacataaaattattattattattattattattttgagaca

SEQ ID NO: 704705 - DNA, 1330 bp, Homo sapiens
tgcactccagcctgggcgagagagcgagactctctctcaaaaaaaaaaraaaaaaagaaaaaaagaaaaaacttcagaaagctggcttggggaagcatttccagaacgtgatcatagaatcctagcaactagggaaagatgagtcactgtgaggaggttgagtctgaagatacaaagcttcgaatttatcaccctgcattccacaaacaaccacagcatatgctttctccactgtttctcattttggtcactagagcacctgttctatggattgagcaagatgccagggagtgtcatctccctcttcctcatgaagcccccaccaccaccgcatccagtagtcaccgaatcgtgtacatcaagcctcctaaatatcttttaagtggacctatttccctcccactcccctatcaccactgtaaatgtcgccactgtagtggtctccttgcgtctgatcgctccttgctgcaatccattctccacgttgcagaagggatagtttgtaaaattcccatcaatgcataccagtgactgtggaatggacattagccagatccagcattttcagtcctttggctgctgcaaactttcttaaatcacactcctttcaacatgcagctccctctgcctggaatagccttcccctctgtctacctaggccttctcccttctgcgggtgtccagagaatggtcctcctttgtaaggtcttccttgaagtcccctgcttaccaccgtcctgctctgtgctccagatccttctctattttcccttccacagccctcctgccacttcactgtagtcatgttgcaactacccatcttctttggcacgaaggaagttctgacaggtttcacagccatgtctgtcttctccgtcactgtattctcagtacctattacagagtaaatgcttaaaaacataggatgaagaaaaagtgaatctacaactagggacaaatttacaatgaggcaaccccaaggatgcttatcagaactctgcagattcaacagtgaaaatggcaggcatgataaatcaatgacttaaaaagagaagggagtttacataatctgcaagcactgagcaattctggccaagcagagggtatgggtgggtacaaggtggtgctttctactactcaccaggacagcatcactacaaggggaaggcaggtgaccacagggggctgaagaaaagaggagcaggatgagaggaggaatttggaaagttcacttttacatttcttctatggtccgctaagtacccattgcctgacacttagtaggcatccaacataaaattattattattattattattattttgagaca

SEQ ID NO: 704706 - DNA, 1330 bp, Homo sapiens
tgcactccagcctgggcgagagagcgagactctctctcaaaaaaaaaagaaaaaaagaaaaaaagaaaaaacttcagaaagctggcttggggaagcatttccagaacgtgatcatagaatcctagcaactagggaaagatgagtcactgtgaggaggttgagtctgaagatacaaagcttcgaatttatcaccctgcattccacaaacaaccacagcatatgctttctccactgtttctcattttggtcactagagcacctgttctatggattgagcaagatgccagggagtgtcatctccctcttcctcatgaagcccccaccaccaccgcatccagtagtcaccgaatcgtgtacatcaagcctcctaaatatcttttaagtggacctatttccctcccactcccctatcaccactgtaaatgtcgccactgtagtggtctccttgcgtctgatcgctccttgctgcaatccattctccacgttgcagaagggatagtttgtaaaattcccatcaatgcataccagtgactgtggaatggacattagccagatccagcattttcagtcctttggctgctgcaaactttcttaaatcacactcctttcaacatgcagctccctctgcctggaatagccttcccctctgtctacctaggccttctcccttctgcgggtgtccagagaatggtcctcctttgtaaggtcttccttgaagtcccctgcttaccaccgtcctgctctgtgctccagatccttctctattttcccttccacagccctcctgccacttcactgtagtcatgttgcaactacccatcttctttggcacgaaggaagttctgacaggtttcacagccatgtctgtcttctcygtcactgtattctcagtacctattacagagtaaatgcttaaaaacataggatgaagaaaaagtgaatctacaactagggacaaatttacaatgaggcaaccccaaggatgcttatcagaactctgcagattcaacagtgaaaatggcaggcatgataaatcaatgacttaaaaagagaagggagtttacataatctgcaagcactgagcaattctggccaagcagagggtatgggtgggtacaaggtggtgctttctactactcaccaggacagcatcactacaaggggaaggcaggtgaccacagggggctgaagaaaagaggagcaggatgagaggaggaatttggaaagttcacttttacatttcttctatggtccgctaagtacccattgcctgacacttagtaggcatccaacataaaattattattattattattattattttgagaca

SEQ ID NO: 704707 - DNA, 1120 bp, Homo sapiens
ggtgttgattttattgctacaatttatatttacatatgtaatatttatattatatgctttctatatatttatatgtgtgtatgtatataattggcaccaacttagcattgctgtgcttaagtgcctgagatgtatctcaaatgaataggcctgaggagagaagcttgtgtcattagctctgaccctgcagcactaatccttatttacccctttctttcactcaccctgagcacataaatatttatttggtgaaagagcttacactttaacatcgcactgaaatagctcattccaaagaaagagctaattctaacctctcacaagtgcttgagcatttgcataagtgaaatttcactgtgtgagtttcacccaacaccacctctgctccagctcctgctactctactgctcataccatggaactccacaggtggagtagaagatggaggatgcacgatgcagtacacagcagcatcctcctcagagagagttttatttgcagtaaattcagtgtgcaataggcaaagcaacgaagagtcaaggtgaggcaggagagcagcagagggaagtggaagttggataaagagtgaactgagtaggagcagaagcaggttaaaaaggtgggtgagcctagaagaaaacctaggcaataccattcaggacataggcatgggcgaggacttcatgtctaaaacaccaaaagcaatggcaacaaaagccaaaatagacaactgagatctaattaaaacaaagactttctgcacagcaaaaaaaaaaaatatatatatatatatcatcagagtgaacagrcaacctacagaatgggagaaaacttttgcaatctactcatctgacaaagggctaatatccagaatctagaaagaactcaacaaacttacaagaaaaaaacaaacaaccccatcaaaaactgggcaaaggatatgaacagacacttctcaaaagaagacatttatgcagccaacagacacatgaaaaaatgctcatcatcacttgtcatcagagaaacacaaatcaaaaccacaatgagataccatctcacaccagttagaatggcaatcattaaaaagtcaggaaacaacaggtgccggagaggatgtgga

SEQ ID NO: 704708 - DNA, 1064 bp, Homo sapiens
tgctaattaccattaatattcaaaagaaaagatggcaataacaatgacttcaaagtttctagtcaagatccagaagactggtgatactgtctacagaaatagttaaggtaaaacaagaaaccagccgggtatggtggctcacgcctgtaatcctagcactttgggaggctgaggtgggcggatcacgaggtcaggagatcgagaccacggtgaaaccccgtctctactaaagatacaaaaaattagccaggtgcagtggcagcacctgtagtcccagctactcrggaggctgaggcaggagaatggcgtgaacctgggaggcggagcttgcagtgagccgagatcttgccacggcactccagcctgggcaaaagagcgagactccttctcaaaaaaagaaaaataaataaaattaaaaaaaaaaaacacaagaaaccaagcaggagggaagatggttaattttggcaggtacatagagtttaaataatgctaaatatccacatttaaatgtccagcataatgggaaatttcaaccttcaaactggattattttcaaaacttaaatttatttataggtgaactacattcttaccctgctaattagttggtgaaatactttaaatagaaggaagcaactaaattcacactttaaaagtccatggaaattttttctaaagcaccaatggggaggaaagtcaatatttttatttgttcatttgattgatagtaatgaatactggctttgctcagacaaggcaaagaaatttaggatttccaaagcagtagccaagtatgatttgtttatttcatccataatcttctacctgagtgtttctttctgaagaaaattacacttcttgctcttaacaccactataaagagtggagtgcatcacgttgcttccccttcagcaggtttaactttattttgtaattaacaatagctagtttgggaattatactgtgatatcacttggttttgaattttcattgagtctttttatgaaaaattacaaactcctcagagggactgatgtagtttgttgccatggataattgtctcta

SEQ ID NO: 704709 - DNA, 1064 bp, Homo sapiens
tgctaattaccattaatattcaaaagaaaagatggcaataacaatgacttcaaagtttctagtcaagatccagaagactggtgatactgtctacagaaatagttaaggtaaaacaagaaaccagccgggtatggtggctcacgcctgtaatcctagcactttgggaggctgaggtgggcggatcacgaggtcaggagatcgagaccacggtgaaaccccgtctctactaaagatacaaaaaattagccaggtgcagtggcagcacctgtagtcccagctactcaggaggctgaggcaggagaatggcgtgaacctgggaggcggagcttgcagtgagccgagatcttgccacggcactccagcctgggcaaaagagcgagactccttctcaaaaaaagaaaaataaataaaattwaaaaaaaaaaacacaagaaaccaagcaggagggaagatggttaattttggcaggtacatagagtttaaataatgctaaatatccacatttaaatgtccagcataatgggaaatttcaaccttcaaactggattattttcaaaacttaaatttatttataggtgaactacattcttaccctgctaattagttggtgaaatactttaaatagaaggaagcaactaaattcacactttaaaagtccatggaaattttttctaaagcaccaatggggaggaaagtcaatatttttatttgttcatttgattgatagtaatgaatactggctttgctcagacaaggcaaagaaatttaggatttccaaagcagtagccaagtatgatttgtttatttcatccataatcttctacctgagtgtttctttctgaagaaaattacacttcttgctcttaacaccactataaagagtggagtgcatcacgttgcttccccttcagcaggtttaactttattttgtaattaacaatagctagtttgggaattatactgtgatatcacttggttttgaattttcattgagtctttttatgaaaaattacaaactcctcagagggactgatgtagtttgttgccatggataattgtctcta

SEQ ID NO: 704710 - DNA, 1064 bp, Homo sapiens
tgctaattaccattaatattcaaaagaaaagatggcaataacaatgacttcaaagtttctagtcaagatccagaagactggtgatactgtctacagaaatagttaaggtaaaacaagaaaccagccgggtatggtggctcacgcctgtaatcctagcactttgggaggctgaggtgggcggatcacgaggtcaggagatcgagaccacggtgaaaccccgtctctactaaagatacaaaaaattagccaggtgcagtggcagcacctgtagtcccagctactcaggaggctgaggcaggagaatggcgtgaacctgggaggcggagcttgcagtgagccgagatcttgccacggcactccagcctgggcaaaagagcgagactccttctcaaaaaaagaaaaataaataaaattaaaaaaaaaaaacacaagaaaccaagcaggagggaagatggttaattttggcaggtacatagagtttaaataatgctaaatatccacatttaaatgtccagcataatgggaaatttcaaccttcaaactggattattttcaaaacttaaatttatttataggtgaactacattcttaccctgctaattagttggtgaaatactttaaatagaaggaagcaactaaattcacactttaaaagtccatggaaattttttctaaagcaccaatggggaggaaagtcaatatttttatttgttcatttgattgatagtaatgaatactggctttgctcagacaaggcaaagaaatttaggatttccaaagcagtagccaagtatgatttgtttatttcatccataatcttctacctgagtgtttctttctgaagaaaattacacttcttgctcttaacaccactataaagagtggagtgcatcacgttgcttccccttcagcaggtttaaytttattttgtaattaacaatagctagtttgggaattatactgtgatatcacttggttttgaattttcattgagtctttttatgaaaaattacaaactcctcagagggactgatgtagtttgttgccatggataattgtctcta

SEQ ID NO: 704711 - DNA, 846 bp, Homo sapiens
tataggcccacagtacaattgaaggtgatatttctgtggacacaattcggggtatttcataggatctaccatgaggagggacatggtgtggcaaaaagatgttttgtattttacctacacaacactttcatcaggtaatttccaagttatgatctactcatttttgcatcacattaccccacactgaataccattgtagaattataggatattttatcatatggtttattttgtattccattgagaagtgcatctcatgaagacatattttgtaattctcagaatgacttatgtgagagctcctaaataaaaatcttgataagggaatgtccttggactaaaagttctactgagtttctttcttgattagcttaaccactgataaccacctgtgaacacattttctcacactctgaaakattctgttaatgttactctaatactgtattaacttataattttttttccaacccactacttcctaagctatttttatagtagttattaaagtcactgcctatttatttgttcacagtgaacgcaatttattattaactttgctacatttaacaagacattattacacctgtttgacatataaaatatgaacctaaaatcaagcacaggtgtaacttgtctaaacatttgtattgtcattgaattttggaaatttaaagaattttaataggtcctttttttcctttgtcattctgtttctttcaagagtcatcaaatgactctatccttaagcatttcttcctgccaataactacatgttttccaatttgacttagttataaagaatttaatagtattggatattcctcaaatatagaaaatactctc

SEQ ID NO: 704712 - DNA, 846 bp, Homo sapiens
tataggcccacagtacaattgaaggtgatatttctgtggacacaattcggggtatttcataggatctaccatgaggagggacatggtgtggcaaaaagatgttttgtattttacctacacaacactttcatcaggtaatttccaagttatgatctactcatttttgcatcacattaccccacactgaataccattgtagaattataggatattttatcatatggtttattttgtattccattgagaagtgcatctcatgaagacatattttgtaattctcagaatgacttatgtgagagctcctaaataaaaatcttgataagggaatgtccttggactaaaagttctactgagtttctttcttgattagcttaaccactgataaccacctgtgaacacattttctcacactctgaaagattctgttaatgttactctaatactgtattaacttataattttttttccaacccactacttcctaagctatttttatagtagttattaaagtcactgcctatttatttgttcacagtgaacgcaatttattattaactttgctacatttaacaagacattattacacctgtttgacatataaaatatgaacctaaaatcaagcacagrtgtaacttgtctaaacatttgtattgtcattgaattttggaaatttaaagaattttaataggtcctttttttcctttgtcattctgtttctttcaagagtcatcaaatgactctatccttaagcatttcttcctgccaataactacatgttttccaatttgacttagttataaagaatttaatagtattggatattcctcaaatatagaaaatactctc

SEQ ID NO: 704713 - DNA, 846 bp, Homo sapiens
tataggcccacagtacaattgaaggtgatatttctgtggacacaattcggggtatttcataggatctaccatgaggagggacatggtgtggcaaaaagatgttttgtattttacctacacaacactttcatcaggtaatttccaagttatgatctactcatttttgcatcacattaccccacactgaataccattgtagaattataggatattttatcatatggtttattttgtattccattgagaagtgcatctcatgaagacatattttgtaattctcagaatgacttatgtgagagctcctaaataaaaatcttgataagggaatgtccttggactaaaagttctactgagtttctttcttgattagcttaaccactgataaccacctgtgaacacattttctcacactctgaaagattctgttaatgttactctaatactgtattaacttataattttttttccaacccactacttcctaagctatttttatagtagttattaaagtcactgcctatttatttgttcacagtgaacgcaatttattattaactttgctacatttaacaagacattattacacctgtttgacatataaaatatgaacctaaaatcaagcacaggtgtaacttgtctaaacatttgtattgtcattgaattttggaaatttaaakaattttaataggtcctttttttcctttgtcattctgtttctttcaagagtcatcaaatgactctatccttaagcatttcttcctgccaataactacatgttttccaatttgacttagttataaagaatttaatagtattggatattcctcaaatatagaaaatactctc

SEQ ID NO: 704714 - DNA, 1074 bp, Homo sapiens
tttttccttcctaaattgttctcaaagtcctactaaaattgttctagttaaaacgatcatggcttgttacttggatggcaaactcatcaatctaccagttcatcctacttccctctacttgcttcttcttactagacccaatacagcctggtcccgttataaactccattattgtattttcctgcttgcaaaaagagtatgttttctatcccagagacattggcaggcagctattcctaattaaatttctgaaacrctgttttgaaatattaattgtaaagtataccttttatgtatggcaagtgataatgaggtttacattcacagtactgttgtagctattttaaaatttttccttatataagtttaaataaacttaaaacatttcaagtgaatagtaatatagtcacttgaaatacatctattaagcttgagaatcattgtctaatgggataaatttaatgatccttggcatagtgaagatagcttttaatatttgatttttgtgtacggcccctaacaaatcgaaggaaggaggttatgatgccttcttctgacggacacatctcctgtgtacatgcacgtgctcacagaggcacaccgattctcctcttacctttcctgatgctcgcccactctgagtctgtgatcaagtaaccttttttcttgcttcagggatgacttcttactttgtgaaatttttaatctcaagagtcattcagtgttattgcccctgattataaatttgattaatcttttacattgttatttattaagcagaagaccagtatgataagttgtgtacattcttgattctgatgtaaatcaatgttattaaaatttaattctgtgaaatctgaatgttctaccacctctggtaatgtctacctaatatttttctgacatttagattaactgaatttctgagaaaataattcttacccaattattacctattttctgttatgttttgttgttggtggttttttgttttatttatttatttgagacaaggtctcactctgtcatccattcttgaatgcagtggtgcaatcacagctcattgcagccttg

SEQ ID NO: 704715 - DNA, 1074 bp, Homo sapiens
tttttccttcctaaattgttctcaaagtcctactaaaattgttctagttaaaacgatcatggcttgttacttggatggcaaactcatcaatctaccagttcatcctacttccctctacttgcttcttcttactagacccaatacagcctggtcccgttataaactccattattgtattttcctgcttgcaaaaagagtatgttttctatcccagagacattggcaggcagctattcctaattaaatttctgaaacgctgttttgaaatattaattgtaaagtataccttttatgtatggcaagtgataatgaggtttacattcacagtactgttgtagctattttaaaatttttccttatataagtttaaataaacttaaaacatttcaagtgaatagtaatatagtcacttgaaatacatctattaagcttgagaatcattgtctaatgggataaatttaatgatccttggcatagtgaagatagcttttaatatttgatttttgtgtacggcccctaacaaatcgaaggaaggaggttatgatgccttcttctgacggacacatctcctgtgtacatgcacgtgctcacagaggcacaccgattctcctcttacctttcctsatgctcgcccactctgagtctgtgatcaagtaaccttttttcttgcttcagggatgacttcttactttgtgaaatttttaatctcaagagtcattcagtgttattgcccctgattataaatttgattaatcttttacattgttatttattaagcagaagaccagtatgataagttgtgtacattcttgattctgatgtaaatcaatgttattaaaatttaattctgtgaaatctgaatgttctaccacctctggtaatgtctacctaatatttttctgacatttagattaactgaatttctgagaaaataattcttacccaattattacctattttctgttatgttttgttgttggtggttttttgttttatttatttatttgagacaaggtctcactctgtcatccattcttgaatgcagtggtgcaatcacagctcattgcagccttg

SEQ ID NO: 704716 - DNA, 1202 bp, Homo sapiens
tgtaaattccgtctgtgtagcatgcatgccatgtgtgcacacacatatattttaaatttgcagctgacaagcttcagagcattgacagccactccatggaggaagttggagaggtggaaaacaacccagtgagcaaagcaatcgctcgccacctgggcattgacatttctgcagaaggccgcctggccaagaaccggaaaggcatcgccattatcattcacgggacacccttgtcaggtaggcaacagttctgaggggaggttaagaccagcagtgccatgtcttctctgtaaactctgcggcttccagagtggcaacatcagctgtgtggtcatggcaaatactaatgactttatttgaggaactgcatagggtagtgaatatacattaatagctgtgtgcctttgggaaaattaactaaattgtctgtgctcagtttccctgtccgtaaagtggtattaacgctgtctattttatagggtagtcatgagaatttaatgagaacatttatataaaatgcttatctcaatacttggcacatagtaaatactcaaacgaaaagctgttgatgttatcattgttattactatgatgactgttggcattcacaattataaccatacctgcagtgtgaatcctcwttgaaaagaaacttccatcacatgctaaatattctcaaggaatattttcctaaccataaaccagtcaagggatgagcccttgataaagaaaggattttttaacgagaatcctttattacctccaaaattacatgtgctaactttaccataaacccaaaggagcagaatcacctacattgggaaaaaaaaaatcttgtttgtatagtaatttgcagttcacagagctccttcccatccatttgtctatctaaacttcgtaaccactcagaaaagagaatttgatttcccctaccttatgggaagctaaggttcagagaaattcaaggacatctgcccaaggtcacccagttagaaagcggcagagcagagggatattgggaggatgcctgccacctctcttagcttcagcttacttgacgaagggccatgaaatcttgttctgacccaattactatcattcatacagacaacatttatggagcatttttgatattctaatcactgagaggtccaggaatctaaaaatgtcacaattcattaccccttcctttgaagaacctt

SEQ ID NO: 704717 - DNA, 834 bp, Homo sapiens
gaacagcccacagggctgaacttgtgccaggtgatatctgattgtcacttcagtcttacgttsttctgacaccgtgaaaacagaaaccattgattcattttcttctggagcactatccttttcaccctcttttccaggatccagtatggtgttctttacccaaacgtttatggatgaactaaaactttgttaccatatagggtgttatcaaaactcatttccttgggttttgttctgtccatctggacagggaaataaagctttttagaattcttcaaaggcagtagaacatcccaattctgactccaaactcctttcagtaaggtaacctaaagatcacagtagaaatcagagctcatagaccccatatgtggctgcctgcactgccccagtgtgacaagactcaaatgatctggacaacagtgtacccctgtgaaagcacttacccagggagatggcgattggtcttcttgaagctctcataaagcatgagttttccaatgactgatatttcagtcatgttgcaaatgggaaaaaatgtgtaagtatattacataatgaagatgtggcacataagctcatttatttatgaatcacctctatccaggaaagcaccagttagaaatcctgatcttttgggtttttttgtttttgtttttgttttttttattattatactttaagttttagggtacatgtgcacaatgtgcaggttagttacatatgtatacatgtgacatgctggtgtgctgcacccactaactcgtcatctaacattaggtatatctcccagtgctatccctcccccctccccccaccccacaacagtcccca

SEQ ID NO: 704718 - DNA, 834 bp, Homo sapiens
gaacagcccacagggctgaacttgtgccaggtgatatctgattgtcacttcagtcttacgttcttctgacaccgtgaaaacagaaaccattgattcattttcttctggagcactatccttttcaccctcttttccaggatccagtatrgtgttctttacccaaacgtttatggatgaactaaaactttgttaccatatagggtgttatcaaaactcatttccttgggttttgttctgtccatctggacagggaaataaagctttttagaattcttcaaaggcagtagaacatcccaattctgactccaaactcctttcagtaaggtaacctaaagatcacagtagaaatcagagctcatagaccccatatgtggctgcctgcactgccccagtgtgacaagactcaaatgatctggacaacagtgtacccctgtgaaagcacttacccagggagatggcgattggtcttcttgaagctctcataaagcatgagttttccaatgactgatatttcagtcatgttgcaaatgggaaaaaatgtgtaagtatattacataatgaagatgtggcacataagctcatttatttatgaatcacctctatccaggaaagcaccagttagaaatcctgatcttttgggtttttttgtttttgtttttgttttttttattattatactttaagttttagggtacatgtgcacaatgtgcaggttagttacatatgtatacatgtgacatgctggtgtgctgcacccactaactcgtcatctaacattaggtatatctcccagtgctatccctcccccctccccccaccccacaacagtcccca

SEQ ID NO: 704719 - DNA, 646 bp, Homo sapiens
ctgaggcctccccagctatgtagaactgtgagtcaawtaaaacttttttcttcataaattactcattctcaggcagttctttataacagtgtgaaaaagactaatatactgcatgattccacttatatgaggtagttaaaatagttaaattaataaaatcaaagagtagaatggtggttgcgggggctggggagaaaggagaatgggcaacaggcataaagtttcagtgcagcaagataagttctagaaatctggtttacttatagtcaataatactgtattgtacacttaaaaatttgttaagttgtatatatattaccacaataaaataataatttaaacaattctacaaagactttattttttagtgatgaatttctaatggtcttatcactagactcaaaattaaagtgggcttatggatattgctttgttaattcggtggtgattgggactttcaaagatgttttatctatgtttcctgttaggaaatcgaggatggatcgtgattttaagctccttgttaattctgtcaataattagtggtcaaaatggaaaatattcatgaatggccagtacatggaatacagaaaaccccatgaaaagcctgaaagagaaaacaaatgaaaagcagagttctgtgaga

SEQ ID NO: 704720 - DNA, 498 bp, Homo sapiens
ggaacaccaacctggaaagagagtgagccacaaggaccaattggaagcctgtgggggatatcgggggcggggctgctggctgtggtacttttgcagctttggtgggctccggcttccttcactccagcccmccgcgtccgagagacttagcagggcgtcaaactggagagcggaaggatggaaccttttattctcaggtggagaggattaagctttgcggtgttagcagaaaatgatcgagctccagaaaatgatttggaggtcagattcgattttaaagtagtactaacaggccgggcgcggtgcctcacgcctgtaatcctagcactttgggaggccgaggtgggcggatcacctgaggttaggagttcgagaccagcctgaccaacatggtgaaaccccgtctctactaaaaatacaaatattagccgggcgtggtggcgggcgttagtaatcccaattacttgggaggctgaggcaggagaatcgcttgaaccc

SEQ ID NO: 704721 - DNA, 686 bp, Homo sapiens
ttatagtcaggcatgtcacctacatttggaacttaagattttcaactcctaaattcaggtgtcatttgcaagtagatattagtagaacagatcatattcattctcttcatggtaataatggtataattggctaatttattttgattgagatggagacactatttaggctttatagtattagctggtgttcatgtggtcagcttttgacatgtcctgcccctcagcctatgtatgttacaattgtttttgtatccctcattttctacataggataaaacaagctggtatgctagtgtaaagggggaggcattamtagccttgtgtagaaagtccttagttccaattaaaacaatttaaattataaaattgtgcacagagagaccagagagctgataattgatctttattatacagaaatgtgaaggccataagcattaaatgagaaggagtttggcagtgaacattatgcagattcaaactgaaggtatcctcgtcttactgagatataaaaataaacactaagagttgcaagaaagaactcaattcaacttctatctcccaatcaagctataactttccacaggaaaacctggtttcaattcatgccgaattgttcaaagaaaagaaaaagctaaatcagttagagacaacacatggactggcttttgtcctattagagagccaga

SEQ ID NO: 704722 - DNA, 642 bp, Homo sapiens
tacaaccttgtatcttcaaaatttttttttgttcataatcaatattggggggtagattagatattaaacaatacaatcactaattttcttaaggtaaaaccgactatatgataatattagttcaaaccaataatggcctttttataatgataaatattcaataaacaaaatatatttccactatactagctaattccctgagaatatggtgccacttaggattgattcatgtcaccaacaaattgcacctctacaaaaattgtgttaacttgtccagccatggtaagaagaagtcaatgttgttgggcccatgtataactttggccctttcctccgatatctcttggttcaygagccctttatacaaatgaatatggcaataaaaaaggataattaacaccttccgcatagctgatggctgtcttgggcatttacacaggacacagttatcatactcctggaacatgtaagtggaccatttacttaacctttacccaaagctcatcattaaaactccagtattactcttgccaatccacttaaaatataattaaattattatctccaattggtatagattcttacctctagccatctcttctttctgataaagttagcagtgagatatatcattaacgtctc

SEQ ID NO: 704723 - DNA, 469 bp, Homo sapiens
ttaaatttggctgaatcccgagaccactgtgaatttgctgatgcttttccaactcagctgagtgattttaaggctttccaaaacttatatggttattttttatatgctgatagatcacatgtagatatagaatgtgtatttaaagctgaattccacccacacttactaaggtctgcccattccmgaacattcatctttgatgttcttccatttcatattttaaaactggtaatgcctgtcccactcttgaaagctcaagttttcagttttccatttccagattgctactgtagcactacagtaactcttttaaccaaccatgacactgaataacttatatagtgaacaaaaagggggaatgactaattcatgccaggagaaaaagtccagtgtaccactcaacatggaaataatgtgttcatggactggaacaggaaatactatgactactattctacttcgtgtgcat

SEQ ID NO: 704724 - DNA, 2119 bp, Homo sapiens
gaacatatttacatggggcttttatttaaaggcaaacgatacggtgcagcaagtgaaagagagtgcgggcatggactgggagtctgaaagacatcccaggttgaaagctacccagggctccaagtattcacagacacagagtgtgcattctgtctccagtgtcaaccaccaagattctgtgctaggaatcatgctttcaggagggcttcgaggagaaattctcaacaagccttttatgtctccttgtccatgtaatcaagctaggtttgtcaaaccaattaggccagttgtaacccatcagtgaaaaactgaccctgtaggttaccaagaggcatttcctgactttaaatcatacatgataaacgtcattgcagttatcttcaccaagagtaaaaaatccagatatccaggttaaaagacaaagctttttctgttcagctataaatctgcacatatttttactaaaaaaaaagaatatttaaagcatcatattcataataacaataacagaagccaacccaaatatatctattaagagaagaaatagcaaataaattgtgatctatttctacatggaacactatggaacaatgaataaatatgcattattgttacataaaataacatagatcaatatggcaaataatgtactgatagtccctttatataaagttcaacacccaggcaaaaccaatctcttgtgtgagaaattaggatatcagttgcctttggggtattaaaaaagagtaatgggccaggcacagtaactcatgcctgtaatcccagcactttaggaggctgaggtgggcaaactgcttgaggccaggagttcaaggccagcctggccaacatggcaaaaccctgtctctactaaaattacaaaaattagctgggcatggtggtgagtgcctgtaatcctagctacttgggaggctgaggcataagaattgcttgaacccaggktgtagaggttgcagtgagctgagatcatgccactgcactccagcctgagcaacagaatgagactgtctcaaatttaaaaaagagtaaggattgatagtgaatataaaacgaggtgagagttgctggttatgttttatttcctctcttagctgatagttaaatggctgtgtcaacaatgtaaaaattcatcaagcttaaaatttgttcttagatgtgcatatgcaatatttcaataaaagtgattttaaaatactttatatagggttgcacacatacacacacacatgtgcacacacatactcgacatttatacctgcttttggagtcttctcaacaaatccatttaacttaacactgagtgggtagtgacattacagcatgtgtttctttattctctaccttttaaagttttcttctattatttctgtgagtatttgttttcatttttcatcttgtatctcttggtgactcatttagatggatatcacaacttatgaattcaaattccatttcacttaatgtttccctatttttcatctttttacatatttttaaatttattttatgaaaatagctgaggttgatcctcaaattcaatttgaaggcaaaggatgttcatgcataaagtactaggcagttatttttaaaaatgagacagatttcagtcttgtacatgtgctataatataaaaaaatcacattatcttttttttattttttattttttgagacagagtctcgctctgtcaccaggctggagtgcagcggcgcaatctcagctcacttcaacctctgcctccagggttcaagcaattcccctgcctcagcctcccaagtagctgggactacaggcacacaccaccatgcccggctagttttttgtattttagtagagatggggtttcaccatgttggccagggtggtcttgatctcctgaccttgtgatccacctgccttggcctcccaaagtgctgggattacaggtgtgagccactgcacctggcccatatttttaaattaaaaaatagtacaatttatgtagtacaagacctttaaaaatatctctccatgtgtatgtggtctgtgtgtcttaaaaatgagtgcaggcaaatgtatttctagaaacgtactttattagttgggtgcattgggttgc

SEQ ID NO: 704725 - DNA, 1043 bp, Homo sapiens
cgaaggatcttcttgaaaaagccaaaaacgaaaccagaaaacaatgatctcttcgggtatcacatcaaatgagatacaaaggtgtactaggcaatcttagagatctggcaacttattttatatataaggcatctgtgaccaagagacgttatgaattaaatgtacaaatgtattatgtataaatgtattaaatgcaagcttcatataatgacaccaatgtctctaagttgctcagagatcttgactggctrtgccctggccagctcctttcctgatagtctgattctgccttcatatataggcagctcctgatcatccatgccagtgaatgagaaaacaagcatggaatatataaactttaacattaaaaaatgttttattttgtaataaaatcaaatttcccattgaaaccttcaaaaactttgcagaatgaggttttgatatatgtgtacaagtagtaccttcttagtgcaagaaaacatcattatttctgtctgcctgcctttttgtttttaaaaatgaagactatcattgaaacaagtttgtcttcagtatgaggacatgttgacggagaggaaaggtaggaaagggttagggatagaagccaggttattttatgccaacaaagtctgctctaaaaagccttattgtttcactacctattaatatgagaactctggattcattttcccttatctcatgtttatagtgttttaagcttactttgtatatgtttactgggttaatgagtcacagcttttcaggatgaactcctattctactagagagatactcaattgaaacacacttttagattgtgttcttgcaagcccactctcagctgtcaaagttaacacccaataaaaatactctacaaagcaaagaaatacacttgcaaataactgagtgctgactgtaagcccaatccaacttttccatttttcaaaattaaccatagttgatggcttgctgtgtctctctatcttgaacgttgtggtggagatctttcaaaatacatgaagtcctgaaattggaaaaagaat

SEQ ID NO: 704726 - DNA, 645 bp, Homo sapiens
tgaagtctttctacttttttgatataggtttctgtttgctataaactttcctcttagaatcacttttgctctatcccataggtwttgatatgttgtatttccactttcatttgtctcaaagaattttatatttcatttttaatttatttattgacacatttattgttcaggagcatgttatttaatctttatgaatttgtacagtttccaacattccttctgttattgatttttggttttattccattgtggtcagaacagatacttgacataattccaatgtttaaagaatttgagctgggtgtggcagctcatgcttgtaatcccagcccagtaattcaggactgccatgagccataatcatgccactgtgctccagcctggacaacagagtgagacctcatctcaaacgaaataaaacaaaacaaacgaacaaaaaaaaccaaatgtaataggacttattttgtgactgaacatctgatctgtcttggagtatgttccattgtgctgttaagaaaaatgtgcattctgcagctactggatggaatgttctttgaaatttgggctgggtgtggtggttcatgcttgtaatcccaacagtttgggatgccaagttaggagaatcacttgaggtcagaagcttga

SEQ ID NO: 704727 - DNA, 645 bp, Homo sapiens
tgaagtctttctacttttttgatataggtttctgtttgctataaactttcctcttagaatcacttttgctctatcccataggtattgatatgttgtatttccactttcatttgtctcaaagaattttatatttcatttttaatttatttattgacacatttattgttcaggagcatgttatttaayctttatgaatttgtacagtttccaacattccttctgttattgatttttggttttattccattgtggtcagaacagatacttgacataattccaatgtttaaagaatttgagctgggtgtggcagctcatgcttgtaatcccagcccagtaattcaggactgccatgagccataatcatgccactgtgctccagcctggacaacagagtgagacctcatctcaaacgaaataaaacaaaacaaacgaacaaaaaaaaccaaatgtaataggacttattttgtgactgaacatctgatctgtcttggagtatgttccattgtgctgttaagaaaaatgtgcattctgcagctactggatggaatgttctttgaaatttgggctgggtgtggtggttcatgcttgtaatcccaacagtttgggatgccaagttaggagaatcacttgaggtcagaagcttga

SEQ ID NO: 704728 - DNA, 852 bp, Homo sapiens
ttgggaaccctgctatgtagaaataactggatatgttaaattatttttaacatatcacaatgttatttaatatgttaaattatttttaacatatcaccaaaccacaacactagaaaaggtaggtaaaacagtcatatttcaaaatttttgaacagataactgttgttacatttcaatttaaagctaacttgaatggggccccacggaaaatggggattcttataaatgaaaatttctaatattttttagagaagttttaaggcattttttaaaggagcagctggctataaagatgttaaggattacctrctgattatgactccaaatgacctgctatattttaaactctcagtttctttaagttttagatatgaattagtaaacatctatgatgtgtcaggaacttcatatatgctgacagaggtgaatattatggtttcattatacaggccaggaaacagaagcccacagagtttaagcaatctgttcaaggttatagctctataacctggaaactacagttcaaaaaaccagcatcagaggccaacttagtattctacaaaacaaaccctactgaaaattaccttctatatagttgctgccttctccttcataccccatcaccctcctgttgctttcaaactatcaagcacacctcactactataccctataatgggaaagtaggctgttctgctgtgttctttttcaaattccactcggtaagggttttgaaatatagttcgaagagaaattacccatgaactaaaaaacccaaaaaacataataggtcatatgttccagttatggataacatgcagtaaactgataccaacctgtctctcccactaaa

SEQ ID NO: 704729 - DNA, 852 bp, Homo sapiens
ttgggaaccctgctatgtagaaataactggatatgttaaattatttttaacatatcacaatgttatttaatatgttaaattatttttaacatatcaccaaaccacaacactagaaaaggtaggtaaaacagtcatatttcaaaatttttgaacagataactgttgttacatttcaatttaaagctaacttgaatggggccccacggaaaatggggattcttataaatgaaaatttctaatattttttagagaagttttaaggcattttttaaaggagcagctggctataaagatgttaaggattacctaytgattatgactccaaatgacctgctatattttaaactctcagtttctttaagttttagatatgaattagtaaacatctatgatgtgtcaggaacttcatatatgctgacagaggtgaatattatggtttcattatacaggccaggaaacagaagcccacagagtttaagcaatctgttcaaggttatagctctataacctggaaactacagttcaaaaaaccagcatcagaggccaacttagtattctacaaaacaaaccctactgaaaattaccttctatatagttgctgccttctccttcataccccatcaccctcctgttgctttcaaactatcaagcacacctcactactataccctataatgggaaagtaggctgttctgctgtgttctttttcaaattccactcggtaagggttttgaaatatagttcgaagagaaattacccatgaactaaaaaacccaaaaaacataataggtcatatgttccagttatggataacatgcagtaaactgataccaacctgtctctcccactaaa

SEQ ID NO: 704730 - DNA, 852 bp, Homo sapiens
ttgggaaccctgctatgtagaaataactggatatgttaaattatttttaacatatcacaatgttatttaatatgttaaattatttttaacatatcaccaaaccacaacactagaaaaggtaggtaaaacagtcatatttcaaaatttttgaacagataactgttgttacatttcaatttaaagctaacttgaatggggccccacggaaaatggggattcttataaatgaaaatttctaatattttttagagaagttttaaggcattttttaaaggagcagctggctataaagatgttaaggattacctactgattatgactccaaatgacctgctatattttaaactctcagtttctttaagttttagatatgaattagtaaacatctatgatgtgtcaggaacttcatatatgctgacagaggtgaatattatggtttcattatacaggccaggaaacagaagcccacagagtttaagcaatctgttcaaggttatagctctataacctggaaactacagttcaaaaaaccagcatcagaggccaacttagtattctacaaaacaaaccctactgaaaattaccttctatatagttgctgccttctccttcataccccatcaccctcctgttgctttcaaactatcaagcacacctcactactataccctataatgggaaagtaggctgttctgctgtgttctttttcaaattccactcggtaagggttttgaaatatagttygaagagaaattacccatgaactaaaaaacccaaaaaacataataggtcatatgttccagttatggataacatgcagtaaactgataccaacctgtctctcccactaaa

SEQ ID NO: 704731 - DNA, 708 bp, Homo sapiens
tgacagatagcaggcccagagctacaccaaggctttctaccaacctcacagtgtgaactcccaggaaaacatgtcttatcaacctgaattatgaattaatttgatatagcattgtttgatattttcatcgaattgcttgaaagggttatgtcttctttggttgaatcagaaacagggtaaagcccaatatttatttttaaagttacatcagtgcgattctgttttaggaaactttggaagttagtttgacaaatgatttttgatcaagtattagtttccaacctcacaaatgaaataactcttgctctgtacttgcaagccatatactacattagaaatagtcacattgtttttactctgtagtgggcataaagaagaatgtaacaacctttcctaaaataaaattttaaaaactgtttaatttgctgttcaatttaatgagatgtacctaagatgcctaactccaagttgttattattatcttttttataagataacctttttctcaattttttgctctttgcaagagctaagtacaatctgaataaacaatattaaataacaacagaaaaccattaaytttttccatgagacatttcaggaatgcaagaactcattttcgatcatttgccaacgtaaggctatctgatccttggaagctttctctgttaattgaatggcttgtacaactatctacctctttcctca

SEQ ID NO: 704732 - DNA, 1964 bp, Homo sapiens
gttggtacttatgagatccagtcctggcaacatggagaggattgtcatctgtctgatggtcatcttcttggggacactggtccacaaatcaagctcccaaggtcaagatcgccacatgattagaatgcgtcaacttatagatattgttgatcagctgaaaaattatgtgaatgacttggtaagactatatttgtcacaacaaaatctaaatcatacttttcaattaatataaaaggagggtttggcttataaaaataactcagaacaaattttcttttgctctaggtccctgaatttctgccagctccagaagatgtagaggtaagaccagttgaatttatttctgaaaatacattggacataagtttttaaatccaataagaaagacattagcatgattatataggagtatactgaattttaatgaacttagcggtctaataattgatgaaatatttatttatattttggttaaattcattgatttaccaaaaaccaactaaaaaatgctatattatattcctcataaactatgtttatcttcaagaatctctaagagtactcctaagtagtattgctgagacagaataacaaaactagaaacgaaatctatactctgatcagtttctgaacaatgcacagctagttactctttaagagcccttgggcatgaaagcttttgagccttctttgttatcctaccgaagaaacatagatacatacagtaggaagcagaattaaccttttaataacaaacttaaaaaagaaagaaagaaagaattagattacagggacagcatggagaaatggtggtgtggaaatcaaagctgtccttcagaatataattcacatataccttggcctcagtgagtcttgtctttggccttccgtgaggtcttttgaaagaaccattttcaacaattcatcccgtctcttaagccatttaaatccattagagttccaggaagaagaggcctggcatgtagttcaagagtgctgtccgctgatctttttctccagtaacttctacgatctgatcttctggtctggtaccctgagagtataaatgcaattggggaaatgttttcattgtcacagacctttaattgcataaattagaataactaaaagtgctaccagtaattaggacactacaaagggggagacttaagaagatacattgcaaagaaaacaattatcgtaaatgactatgtgtaaaagtttagaaagtgaatgagtcacaactattgcttttctctaaaattcactctctagctctgaacccaaacactctcatttactaggtccttttctaataagcagcatctaaaatgaaagtagcacattcagcttattggaaagacttttccaataactgaaaatacttcttaatcaatgtgcctaattatcaaaacatacatttctagcatctcatkcaccttgtttaactgttatggttagagttctttccagagtttcctggctgtagtctataacttgcaaaataagaaataagaaagagattccaccttctaacctgagttggtccagtgggtacttcctttacgtgtgttgttaatgaaagatattttttatcttacatcataatgaaaggattttgtctccgtgatactgtatctatctgataatctgatcaagcaatgctggctatgatataagtgagtaatagtgtaacttggatctttaagctatactagtaggcaaactcaggaagaaagaaatcgttcaaggtcacattagcattatatcaagctagcttcaaagtagggtctgtaagagattttaaaagatttaaaagtttaatgaaaataaaactatctaatgttgcatgcatatagtaattatctaagatctctaattggcctagccaggcatctttctttttctctttttctttccgtctaatcatataaccagtggttctcaaccggtggtgatttttg

SEQ ID NO: 704733 - DNA, 1024 bp, Homo sapiens
ttgatgttgtagacagatgcttaaaaataatttttaaaaatgaattatgaagcaatgaaagaaaccaaaagatagataagcatatataaatacttaaaaaccagttgcaggtgaaaatatcatgaacaaaattaaaaggtgaaggggagtttgctttattccttaaaaaatgttataccttatggaggttttaaaacatggccagattctttgtttctcctctgtgttctctcccattgaatctgggagagcttatgaactgaccaattgagcacagtggagcaggcattatgtaacttctgcagcaggatcacaaaaggccgtgaggctgaccttttttgctggaacattgttttttggagccctgagtctccaagtgagaagtctggctacctagagaccactacgcaggagaagccatttgtaggcactcctgttgacaatgccagcaaatctcagccttccttttatcactgccagggtactaaacatgtgagtaaaaccatgttgggctcttcaattaaccagttgccagatgagtaagtcatgagagcagaaaaagcttctagacctacctcaattcctgactactaaaattgtaatataaaatgtttgttgttttatgctgctaaactctgatgtggtttattatgcagcaaagatagctggagcataccctcttgtatttattatatttttacaacagaaagttggaaaactgaatgtggaatacactctgggaaaagttgtttgcaagaattaaaaaacagtcttagtatccttccaatataaagagctcttacaaatcaccaagaaaaaaatactaacaccatataggaaaatagccaattaaatttacaaaagaagatattaaaaagctaataaacatattagaaagccttcaatctcattagtartgaaaggaaatgcaaattaatctatgaaattaaaatttcagttatcaaatcagccaagatgaaaatatatttaatgttggttgggttaagtgagagtataaatggca

SEQ ID NO: 704734 - DNA, 989 bp, Homo sapiens
taaatttgccaatgccgattgttgagacaggaaataaaggattgatttggtagcttttggaagatggtaaggactcctgcatacagccagtcctgactctgcccctcctgggtcactcagtctattttccctggatccgcatgctggyctgaaagtcaatgcagtctgccaaagtggtatactgttcccatgaaataatccaactgtggtatggagaaatctttttttcttagaccaagttatttttacaaaaatacttttgcgaagaaatgagaggaaactaaaaccctacacaatcctagaagtggattactgtctagagtgcatgttttttattccatcttataaagcctaactcattttagggtggctagtgcagttaaggtgcagacatctcttggttgtttttctggtgcttttacttgcatgctttcctgtttccaaatctgcatccatattgggggttacccacagagagctgttgtctcctctctgaagaacatctccatcttttggtcactacttgagtagagatgagtgatgcttaatgaaatatcattttattacaacggtcaaaaattatggattcatttcttattagattatatgctctgaatgttcaccaccccccaattcacatgttgaaacttaattgcccatgtgatagtattaagaggtggagtctttaggaagtgattaaatcatgaaggcagagccctcatgaatggatttgtgcccttatataaaaggtgtgaaggagctgtctctctcccttttcctcttccaccctttgccatatgaagatacagcaagaggtgcgatcttggaagcagagaggacttcaccagataccaaatttgcaggtgcctcaatcttgaatttcctagtctctgtaactatgaaaaataagtttctgttgtttataaattacccagtctcaggtattttgttatagcagcaaaaatggactaacacattaggtacaagca

SEQ ID NO: 704735 - DNA, 989 bp, Homo sapiens
taaatttgccaatgccgattgttgagacaggaaataaaggattgatttggtagcttttggaagatggtaaggactcctgcatacagccagtcctgactctgcccctcctgggtcactcagtctattttccctggatccgcatgctggtctgaaagtcaatgcagtctgccaaagtggtatactgttcccatgaaataatccaactgtggtatggagaaatctttttttcttagaccaagttatttttacaaaaatacttttgcgaagaaatgagaggaaactaaaaccctacacaatcctagaagtggattactgtctagagtgcatgttttttattccatcttataaagcctaactcattttagggtggctagtgcagttaaggtgcagacatctcttggttgtttttctggtgcttttacttgcatgctttcctgtttccaaatctgcatccatattgggggttacccacagagagctgttgtctcctctctgaagaacatctccatcttttggtcactacttgagtagagatgagtgatgcttaatgaaatatyattttattacaacggtcaaaaattatggattcatttcttattagattatatgctctgaatgttcaccaccccccaattcacatgttgaaacttaattgcccatgtgatagtattaagaggtggagtctttaggaagtgattaaatcatgaaggcagagccctcatgaatggatttgtgcccttatataaaaggtgtgaaggagctgtctctctcccttttcctcttccaccctttgccatatgaagatacagcaagaggtgcgatcttggaagcagagaggacttcaccagataccaaatttgcaggtgcctcaatcttgaatttcctagtctctgtaactatgaaaaataagtttctgttgtttataaattacccagtctcaggtattttgttatagcagcaaaaatggactaacacattaggtacaagca

SEQ ID NO: 704736 - DNA, 626 bp, Homo sapiens
cacccagataatactttattttttgcagagacaaggtctcactatgttgcccaggctggttggtctacaactcccaagctcaagcgatcctcccaccttggcctcccaaagtgttaggatyacatacgtcagccaccgcgcctggcctgggcacaacattcttgagccacagatagcaaaggaggatttgttctagttccacttgacgtggaaagtgagggtgttttcgtctgacgccgagggatgttacggaaccagtgctcacggtgccttgctgccccctgctggaagctcttggcatgagctgtttggagatctgactcccgagattccgacccaatgtataattttaaaggttatccagcgagctgcaagtgaccacaaagataatctattccaaacgcttcatttcacaacccacccccagatgggtcattttgtaattttaagatatttttatcaaaatgggcctttggccgagcatggtgtctcacgcctgtaatctcaacactttgggagaccaaggtgggaggattgccaaagcccaggagttcgagaccagcctgggcaacacaatgagaccctggctctacaaaaaagaaaaaaaaaaaaccagggaattctca

SEQ ID NO: 704737 - DNA, 2142 bp, Homo sapiens
tgactgattccagctcagatattaactaaatctgggaaggacagtggagagccaaaactaagttaggaagaaatataaatatgtccagaaactaggcaatcttgtatgagcaatgtcagtgtattcaaaaaagtcactaaaagcaataaataagtgacaaaccttatcatctaaactatagaagttttgatagtgaaaaagagttctattaataactatcaggacaacataaactgagctgttccagaaaataatttgtaagatcactcttgttaggtagagagagggtgggctacagagaaatacacatcaaaataagtgtgtataactgagaaacagttatgaatgaggaaacaatggtgtgacaagaaagttaagatgaaatgctagtacagtcacaaggtcacagaagtccacaggtgaagagagtcaattgagctgctcagagacagaggaagaattgactggaagctaaaatgcttaaccttcaagacaccttccaagattttagcaatttgttcacatgattctatatctcataaagtaaggaaaagtggtcgggcatggtggttcatgcctgtaatctcagcactttgggaagtggagatgggaggattgcttgagcccaggagttcaaggccaagagctatgattgtaccactgcactccagcctgggtgacagactgagactctgtttcaaaaaaaacaataaaaaagaaagaaagagtaagaaatgtctgtattcttttacttaaagatgctccactaagttgtaggagcataaggctccacaacagctgtatgcattcggcttgcaaagctgattcttctacgtggatgccactgggctcctagacttcaatgccagtcttagaccactagaaacaaaaggttttcagaaataccaacattactcctttaaattcttaaatttttctcaggccacaattatcagaagtgggctgagcagtcagcgttagagaactcacacacgctgcaccaaactagccatggaaatgtcactgactgagtggtccatggaagaagttatgccctgaactcaaaagagagggttggaggagctctagatgagtatgcctaatgtcccaatatccaagcgattctgctggtcttctctgtggatgaagccagatactatccatcagttttgaaaagtctcacttaactgtcttaggacaggtattccccagtacctaagggtcagctcaggagcttcctcccagtggtgccgagcaaactctcccttttacccacaccccttgaaccacaaagaggctctgaagactgaagagcaggagaagaggaagaagagttggaattttctagaaaaggtcttgggatactccagaatcaaatgccagcctgtgctgaagcaaaaaaaaaaaaaaaaaagacccgtaatctgactcactttcttaaactgagccagtggagggaaaaggggagatgacaatttctccctcagaacaatgaacctctgagagctgagtgggaggaattagtgacaataacatgatgtctgtcaacttttgaaaaattggaatcaggaaatccaaaagtaaagttgaaagaagacaaattaggtatatcaagatttgacacattactgaacacctgctaatgaaaaaagaagtatttacttttaattttttattgtctttatgcataatacttttaaaaatcacataacatttgcataaaagcataaagagtattttttaaaactttgcttctaacatggaaaagaataaaatagccgtatgaagctcatcctctaaaagagacagtagcttgctcttgagtcttagttttttcgttttctacagctttcctaaataattcagatagaggatccttaacatgccaattgtgagagctgttgctgttctgttggaagttttaagaaatgattgtagtaaagccagagatgtagcarggaagcaaaagtgcagatgattttccaatttgagtatctttctcaagggattgaaattcaatttgtcaggataatagactgagtcattttctgtggtcaacagatgtgacaaagccacatagccacatggcttcttaaatgtgactggacatttaataatgctaatgccagtgatcacttagag

SEQ ID NO: 704738 - DNA, 1081 bp, Homo sapiens
tagtcaatggatatttgttcagttatgttaacctgaattaattgtatctccagaaaaagtgtttgggtggaaccagtaatgttttagaaaataccactttgctttctaaagcacaaawgcaaagaagtgcaaagcctgtcttctacaaagttttttttaataatatatatttttcagtcaacgacagaaccaattactagaaataaataaactgggacttttagaaatgcgagaatatgaggaatatgtaccactcagtcaattgtcttcctgtgtggcggcttgccagacaatcactggagacatctggaggcagagaacaaacacttctgcccacttctctgctcaaacttgagtcatctgctatttgtacttagagaggtaaagagcaaaactatctcaaggcagacactagcttcaggcatttatctgtccaaagctgagaacccactgtttcgtctccaccagtgcctcacaccccactttgggaggctaaatattgtatatgttttcttttccattcatcctcttcaccttgtttcacctgcttggcctcaatctttcccatgggaaatgaatgaatgaatgaatgaaaaatataattgaagatcaacatcttatttctagcctctcttatttcaacctatagaatagagggtagagatagacagcaggggatggaacagatgtgcctcacttttttctcttgccttgcagttgagaattgggttgtcaagttgaagaaaaagaaattgtgtctcctttctgattaatggttcagtgttcttccatactgctttcccaaaaagatgggtagagaacaaccctccaaataggtcttcttcctaacagtacactctgaaccaaaacatagactactaagaaataaatttgtattattataaatcttagttaagagattgaaatagatttatttagtttctaatacagaatataaggaccaatagctacaaaacaattcaggtaaatataattaaggaaaagattttgagtgagaagtaggaaggtccttagcttttaggacaaaataccatcaatctgtcctcctgctaatgatgac

SEQ ID NO: 704739 - DNA, 1081 bp, Homo sapiens
tagtcaatggatatttgttcagttatgttaacctgaattaattgtatctccagaaaaagtgtttgggtggaaccagtaatgttttagaaaataccactttgctttctaaagcacaaaagcaaagaagtgcaaagcctgtcttctacaaagttttttttaataatatatatttttcagtcaaygacagaaccaattactagaaataaataaactgggacttttagaaatgcgagaatatgaggaatatgtaccactcagtcaattgtcttcctgtgtggcggcttgccagacaatcactggagacatctggaggcagagaacaaacacttctgcccacttctctgctcaaacttgagtcatctgctatttgtacttagagaggtaaagagcaaaactatctcaaggcagacactagcttcaggcatttatctgtccaaagctgagaacccactgtttcgtctccaccagtgcctcacaccccactttgggaggctaaatattgtatatgttttcttttccattcatcctcttcaccttgtttcacctgcttggcctcaatctttcccatgggaaatgaatgaatgaatgaatgaaaaatataattgaagatcaacatcttatttctagcctctcttatttcaacctatagaatagagggtagagatagacagcaggggatggaacagatgtgcctcacttttttctcttgccttgcagttgagaattgggttgtcaagttgaagaaaaagaaattgtgtctcctttctgattaatggttcagtgttcttccatactgctttcccaaaaagatgggtagagaacaaccctccaaataggtcttcttcctaacagtacactctgaaccaaaacatagactactaagaaataaatttgtattattataaatcttagttaagagattgaaatagatttatttagtttctaatacagaatataaggaccaatagctacaaaacaattcaggtaaatataattaaggaaaagattttgagtgagaagtaggaaggtccttagcttttaggacaaaataccatcaatctgtcctcctgctaatgatgac

SEQ ID NO: 704740 - DNA, 1081 bp, Homo sapiens
tagtcaatggatatttgttcagttatgttaacctgaattaattgtatctccagaaaaagtgtttgggtggaaccagtaatgttttagaaaataccactttgctttctaaagcacaaaagcaaagaagtgcaaagcctgtcttctacaaagttttttttaataatatatatttttcagtcaacgacagaaccaattactagaaataaataaactgggacttttagaaatgcragaatatgaggaatatgtaccactcagtcaattgtcttcctgtgtggcggcttgccagacaatcactggagacatctggaggcagagaacaaacacttctgcccacttctctgctcaaacttgagtcatctgctatttgtacttagagaggtaaagagcaaaactatctcaaggcagacactagcttcaggcatttatctgtccaaagctgagaacccactgtttcgtctccaccagtgcctcacaccccactttgggaggctaaatattgtatatgttttcttttccattcatcctcttcaccttgtttcacctgcttggcctcaatctttcccatgggaaatgaatgaatgaatgaatgaaaaatataattgaagatcaacatcttatttctagcctctcttatttcaacctatagaatagagggtagagatagacagcaggggatggaacagatgtgcctcacttttttctcttgccttgcagttgagaattgggttgtcaagttgaagaaaaagaaattgtgtctcctttctgattaatggttcagtgttcttccatactgctttcccaaaaagatgggtagagaacaaccctccaaataggtcttcttcctaacagtacactctgaaccaaaacatagactactaagaaataaatttgtattattataaatcttagttaagagattgaaatagatttatttagtttctaatacagaatataaggaccaatagctacaaaacaattcaggtaaatataattaaggaaaagattttgagtgagaagtaggaaggtccttagcttttaggacaaaataccatcaatctgtcctcctgctaatgatgac

SEQ ID NO: 704741 - DNA, 1081 bp, Homo sapiens
tagtcaatggatatttgttcagttatgttaacctgaattaattgtatctccagaaaaagtgtttgggtggaaccagtaatgttttagaaaataccactttgctttctaaagcacaaaagcaaagaagtgcaaagcctgtcttctacaaagttttttttaataatatatatttttcagtcaacgacagaaccaattactagaaataaataaactgggacttttagaaatgcgagaatatgaggaatatgtaccactcagtcaattgtcttcctgtgtggcggcttgccagacaatcactggagacatctggaggcagagaacaaacacttctgcccacttctctgctcaaacttgagtcatctgctatttgtacttagagaggtaaagagcaaaactatctcaaggcagacactagcttcaggcatttatctgtccaaagctgagaacccactgtttcktctccaccagtgcctcacaccccactttgggaggctaaatattgtatatgttttcttttccattcatcctcttcaccttgtttcacctgcttggcctcaatctttcccatgggaaatgaatgaatgaatgaatgaaaaatataattgaagatcaacatcttatttctagcctctcttatttcaacctatagaatagagggtagagatagacagcaggggatggaacagatgtgcctcacttttttctcttgccttgcagttgagaattgggttgtcaagttgaagaaaaagaaattgtgtctcctttctgattaatggttcagtgttcttccatactgctttcccaaaaagatgggtagagaacaaccctccaaataggtcttcttcctaacagtacactctgaaccaaaacatagactactaagaaataaatttgtattattataaatcttagttaagagattgaaatagatttatttagtttctaatacagaatataaggaccaatagctacaaaacaattcaggtaaatataattaaggaaaagattttgagtgagaagtaggaaggtccttagcttttaggacaaaataccatcaatctgtcctcctgctaatgatgac

SEQ ID NO: 704742 - DNA, 601 bp, Homo sapiens
aaggaacccaacaattttataggcacaaaagtgtgtgggtcacaagaatatcttgttcaaaatgtcaccagatgaaatgatggagatttgtttcttttaatagttttaactagggaataacacagtaaaatatatgaagcgtacttctgtaaatcgtgcagcttggataaatttgagcacacatacacagctgtgaaaacaccacatgaatcaaaatacaraacatgtccagcactctcaagctccctcttgatttcgtttcttccagtcactgactctagtctccataggagttaaccagtatttcgacctctaactctcagcagatggattttgcctgctcctgacctcatacaaatggctttatacaattgttgctcattcatggatggcttcttttgatcagcatgatgtcttagaattgtgtccatccatggtttaatctttcttatttataatgttccattgtttatgaataaaccactttttttttattctccttttgatggggaaattttatttcattgtttttttcctttgctgcggcattagggattgaagcctctgtgagccttcttatacgtgtcctttgcagactttt

SEQ ID NO: 704743 - DNA, 601 bp, Homo sapiens
aaggaacccaacaattttataggcacaaaagtgtgtgggtcacaagaatatcttgttcaaaatgtcaccagatgaaatgatggagatttgtttcttttaatagttttaactagggaataacacagtaaaatatatgaagcgtacttctgtaaatcgtgcagcttggataaatttgagcacacatacacagctgtgaaaacaccacatgaatcaaaatacagaacatgtccagcactctcaagctccctcttgatttcgtttcttccagtcactgactctagtctccataggagttaaccastatttcgacctctaactctcagcagatggattttgcctgctcctgacctcatacaaatggctttatacaattgttgctcattcatggatggcttcttttgatcagcatgatgtcttagaattgtgtccatccatggtttaatctttcttatttataatgttccattgtttatgaataaaccactttttttttattctccttttgatggggaaattttatttcattgtttttttcctttgctgcggcattagggattgaagcctctgtgagccttcttatacgtgtcctttgcagactttt

SEQ ID NO: 704744 - DNA, 626 bp, Homo sapiens
tttcacactgtgcacatattaatgatattcagagaactcaaccagacacacacacacacacacacacacacacacagagagagagagagagagagagagaaagacttttacataagaggctaataataaaggaaacttccacctggtcctgggtgtttaccagccacccatcttaggctactcatcctacatcctttcactttcctcagtcaaaatacttaagataatggttcctgttctggagacgtacacattgctctagagtatagtaaatatggaactgcacatgtttgaatctaaatcccagacctgtcawttactagctgtgtgtcttgggtgactgacgcccttgtactctcagagactcacattcttcttttacaaaatgaggttataaatatccacctaatagtagtgtggcaggaacaatgtgatatagcaacaagtcaaagcacagacttgggagctagactgccttggttcaaattttagctctgctaccactagttgtgaaaccatggccaagttatttaacctttgtgtcacttgatgtccctctatttaatgggagatcataatagttgccactttacagggttttaggaggattatgcaggttagtgagc

SEQ ID NO: 704745 - DNA, 585 bp, Homo sapiens
tcatttgcaggataatgtactctaccccttgtctgagaagtgatgaagaggtggaatggaaaaaaaacccgaacaaaaacatttctgtatcctctatgttatttaaatttttttcttcttgttaaaatccctatgagacatgtgttttctcactttgtcattaaacccacattgaaaattgagaaacaaatcttgttccataaaaaaaaagtagtaaatgaacataatagaagtaagtttgttgattttccaagtaactgaccagggcttccacaggctcacatattagaaggttcggtttttaaaatggttttctatgtctaactgttttgtagrtgcttttacctagtattatttccagagacacatattgtagatacgtaggcagttttcaaaaaaagttactatttgggaaactggaagtcacgggtggtcctctgaccgcttacatgaactgatgcatgtgattgtatggtactgaaagacagagggtattgtgtaattccgtactactgcatatgctatttttagacccgcctattactctgaggttctctataataatgacacatctacgcttcatca

SEQ ID NO: 704746 - DNA, 1068 bp, Homo sapiens
taaactcagctgtgaaacaatcaataggaatatgatgaaactgatccttttgttcaatctaatataatgatttggttgccagatgaagttcagcaccatgggatttatcaatcactatgtgtcattgtctacttccatatgtgctggttttctaaactaaggcrtgcttttacagttaagcttataaagttagtgcttattttttaagatgaccatggactcagaagaggagtacatggtttagaatcccggtaattccactcattaattgagggcccttggataattgatgaaaaaggaataatccttaatagttttttagggattaaatgaatatctattcataaaattatttgagggacatacgctacatatgtgcagtgaacaaacattagttaaatatgcacttggaattgagcaccatatttattaagtaatattttattttgatacctgaataaagaaaattattaaaagacatgttaaattggattaggttgcttttatgaaataatcacacttttgttcattttaaatatttacaaataccaaaagaaagcaatattgtaaaattatactactgtgtaatattgtttttactcaaaagtacttcagagcaggagtccaatatatcagatttagcaatgtcatcaataattatctaaaacatcaagttataggcctatcaaatgttattacacttcttgacactttctttaatggtcgattatatgtggcacacaattttggtcattactttgttcagaggaggtaaagcaaaatggattctgatgctgctattttactccagcagctctcagcagtcatctaccttgtcactttctaaaccaattggcagatgattacaaaagaatgggctatcttttcagtttcatagcatcattagctacaagcctcactcattactatcaggaaattgacagagcgaagagcccttttatgtaatctctaaggaattctagagaggatgtttatgtcagtggaagacaactctttgtgtttcaccaaaaaaaaatattatttttaatctgtactgtgtgtgacaca

SEQ ID NO: 704747 - DNA, 1068 bp, Homo sapiens
taaactcagctgtgaaacaatcaataggaatatgatgaaactgatccttttgttcaatctaatataatgatttggttgccagatgaagttcagcaccatgggatttatcaatcactatgtgtcattgtctacttccatatgtgctggttttctaaactaaggcatgcttttacagttaagcttataaagttagtgcttattttttaagatgaccatggactcagaagaggagtacatggtttagaatcccggtaattccactcattaattgagggcccttggatmattgatgaaaaaggaataatccttaatagttttttagggattaaatgaatatctattcataaaattatttgagggacatacgctacatatgtgcagtgaacaaacattagttaaatatgcacttggaattgagcaccatatttattaagtaatattttattttgatacctgaataaagaaaattattaaaagacatgttaaattggattaggttgcttttatgaaataatcacacttttgttcattttaaatatttacaaataccaaaagaaagcaatattgtaaaattatactactgtgtaatattgtttttactcaaaagtacttcagagcaggagtccaatatatcagatttagcaatgtcatcaataattatctaaaacatcaagttataggcctatcaaatgttattacacttcttgacactttctttaatggtcgattatatgtggcacacaattttggtcattactttgttcagaggaggtaaagcaaaatggattctgatgctgctattttactccagcagctctcagcagtcatctaccttgtcactttctaaaccaattggcagatgattacaaaagaatgggctatcttttcagtttcatagcatcattagctacaagcctcactcattactatcaggaaattgacagagcgaagagcccttttatgtaatctctaaggaattctagagaggatgtttatgtcagtggaagacaactctttgtgtttcaccaaaaaaaaatattatttttaatctgtactgtgtgtgacaca

SEQ ID NO: 704748 - DNA, 1068 bp, Homo sapiens
taaactcagctgtgaaacaatcaataggaatatgatgaaactgatccttttgttcaatctaatataatgatttggttgccagatgaagttcagcaccatgggatttatcaatcactatgtgtcattgtctacttccatatgtgctggttttctaaactaaggcatgcttttacagttaagcttataaagttagtgcttattttttaagatgaccatggactcagaagaggagtacatggtttagaatcccggtaattccactcattaattgagggcccttggataattgatgaaaaaggaataatccttaatagttttttagggattaaatgaatatctattcataaaattatttgagggacatacrctacatatgtgcagtgaacaaacattagttaaatatgcacttggaattgagcaccatatttattaagtaatattttattttgatacctgaataaagaaaattattaaaagacatgttaaattggattaggttgcttttatgaaataatcacacttttgttcattttaaatatttacaaataccaaaagaaagcaatattgtaaaattatactactgtgtaatattgtttttactcaaaagtacttcagagcaggagtccaatatatcagatttagcaatgtcatcaataattatctaaaacatcaagttataggcctatcaaatgttattacacttcttgacactttctttaatggtcgattatatgtggcacacaattttggtcattactttgttcagaggaggtaaagcaaaatggattctgatgctgctattttactccagcagctctcagcagtcatctaccttgtcactttctaaaccaattggcagatgattacaaaagaatgggctatcttttcagtttcatagcatcattagctacaagcctcactcattactatcaggaaattgacagagcgaagagcccttttatgtaatctctaaggaattctagagaggatgtttatgtcagtggaagacaactctttgtgtttcaccaaaaaaaaatattatttttaatctgtactgtgtgtgacaca

SEQ ID NO: 704749 - DNA, 1068 bp, Homo sapiens
taaactcagctgtgaaacaatcaataggaatatgatgaaactgatccttttgttcaatctaatataatgatttggttgccagatgaagttcagcaccatgggatttatcaatcactatgtgtcattgtctacttccatatgtgctggttttctaaactaaggcatgcttttacagttaagcttataaagttagtgcttattttttaagatgaccatggactcagaagaggagtacatggtttagaatcccggtaattccactcattaattgagggcccttggataattgatgaaaaaggaataatccttaatagttttttagggattaaatgaatatctattcataaaattatttgagggacatacgctacatatgtgcagtgaacaaacattagttaaatatgcacttggaattgagcaccrtatttattaagtaatattttattttgatacctgaataaagaaaattattaaaagacatgttaaattggattaggttgcttttatgaaataatcacacttttgttcattttaaatatttacaaataccaaaagaaagcaatattgtaaaattatactactgtgtaatattgtttttactcaaaagtacttcagagcaggagtccaatatatcagatttagcaatgtcatcaataattatctaaaacatcaagttataggcctatcaaatgttattacacttcttgacactttctttaatggtcgattatatgtggcacacaattttggtcattactttgttcagaggaggtaaagcaaaatggattctgatgctgctattttactccagcagctctcagcagtcatctaccttgtcactttctaaaccaattggcagatgattacaaaagaatgggctatcttttcagtttcatagcatcattagctacaagcctcactcattactatcaggaaattgacagagcgaagagcccttttatgtaatctctaaggaattctagagaggatgtttatgtcagtggaagacaactctttgtgtttcaccaaaaaaaaatattatttttaatctgtactgtgtgtgacaca

SEQ ID NO: 704750 - DNA, 1068 bp, Homo sapiens
taaactcagctgtgaaacaatcaataggaatatgatgaaactgatccttttgttcaatctaatataatgatttggttgccagatgaagttcagcaccatgggatttatcaatcactatgtgtcattgtctacttccatatgtgctggttttctaaactaaggcatgcttttacagttaagcttataaagttagtgcttattttttaagatgaccatggactcagaagaggagtacatggtttagaatcccggtaattccactcattaattgagggcccttggataattgatgaaaaaggaataatccttaatagttttttagggattaaatgaatatctattcataaaattatttgagggacatacgctacatatgtgcagtgaacaaacattagttaaatatgcacttggaattgagcaccatatttattaagtaatattttattttgatacctgaataaagaaaattattaaaagacatgttaaattggattaggttgcttttatgaaataatcacacttttgttcattttaaatatttacaaataccaaaagaaagcaatattgtaaaattatactactgtgtaatattgtttttactcaaaagtacttcagagcaggagtccaatatatcagatttagcaatgtcatcaataattatctaaaacatcaagttataggcctatcaaatgttattacacttcttgacactttctttaatggtcgattatatgtggcacacaattttggtcattactttgttcagaggaggtaaagcaaaatggattctgatgctgctattttactccagcagctctcagcagtcatctaccttgtcactttctaaaccaattggcagatgattacaaaagaatgggctatcttttcagtttcatagcatcattagctacaagcctcactcattactatcaggaaattgacagagcgaagagcccttttatgtaatctctaaggaattctagaraggatgtttatgtcagtggaagacaactctttgtgtttcaccaaaaaaaaatattatttttaatctgtactgtgtgtgacaca

SEQ ID NO: 704751 - DNA, 950 bp, Homo sapiens
gctaaagcttaaagtggaagtctgtgtaaaatattctttagtatgcaataaacatgctccacaaaatccagtttctaatgtcaagattttctagaatctcagraacctcccttcctcctcttcccccttccctggcaacattcttttccccattgtaaatttcttatcctgactatactatgtcttatttgtcacttacttttaattccagcttatcaaaaactgaatatttagtgtttttcagccataaaccagtaattggaattgcatgtgctacaagagcaaacatgtcccccaactttatgtttttctctcaatctcaaattgataagattaggatgatgctattttagacccagaactcaagcaaatggttactgtttagaaataccttgaagtgttgcatttactgtagagattatcgtagcagtaagtctacttagaatttgtgttttttttttcagttttttatcctctggtcatggaatgtattgatatatgtgcctagattctcaggtttatcatcatgtcaacattgtctgttaacaggctgtgtagaaaaatatccatctgggtaaaagtgacaatatcaagggttggagtctatggcttttttttttttttttttttttttttgtagcgatggggtctcattatgttgtccaggctgaaatggaacccctggcctcaagtgatcctcctgccttagactcccgagtagctgggactacagttacacaccaccatgctcagcttatggctcagttttatggtggagcaattaggctgttgcctcagtgaagcaatcattttcttgctcagttaaaagataaattttaaattttctatgtcacatctgatggaatttcgggttaattttataattctcctcacatgatttttatttgcattgaaatatatttttaaagtaatattaaataattttaaat

SEQ ID NO: 704752 - DNA, 950 bp, Homo sapiens
gctaaagcttaaagtggaagtctgtgtaaaatattctttagtatgcaataaacatgctccacaaaatccagtttctaatgtcaagattttctagaatctcaggaacctcccttcctcctcttcccccttccctggcaacattcttttccccattgtaaatttcttatcctgactatactatgtcttatttgtcacttacttttaattccagcttatcaaaaactgaatatttagtgtttttcagccataaaccagtaattggaattgcatgtgctacaagagcaaacatgtcccccaactttatgtttttctctcaatctcaaattgataagattaggatgatgctattttagacccagaactcaagcaaatggttactgtttagaaataccttgaagtgttgcatttactgtagagattatcgtagcagtaagtctacttagaatttgtgwtttttttttcagttttttatcctctggtcatggaatgtattgatatatgtgcctagattctcaggtttatcatcatgtcaacattgtctgttaacaggctgtgtagaaaaatatccatctgggtaaaagtgacaatatcaagggttggagtctatggcttttttttttttttttttttttttttgtagcgatggggtctcattatgttgtccaggctgaaatggaacccctggcctcaagtgatcctcctgccttagactcccgagtagctgggactacagttacacaccaccatgctcagcttatggctcagttttatggtggagcaattaggctgttgcctcagtgaagcaatcattttcttgctcagttaaaagataaattttaaattttctatgtcacatctgatggaatttcgggttaattttataattctcctcacatgatttttatttgcattgaaatatatttttaaagtaatattaaataattttaaat

SEQ ID NO: 704753 - DNA, 588 bp, Homo sapiens
agtgacccgattttccaggtaccgtctgtcacccctttctttgactaggaaagggaactccctgaccccttgcacttcccgagtgaggcaatgcctcaccctgctttggctagcgcacagtgcactgcacccactgtcctgcgcccactgtctggcactccctagtgagatgaacctggtacctcagatggaaatgcagaaatcacccgtcttcttcrtcactcaggctgggagctgtagaccggagctgttcctatttggccatcttggctccatcttgtcccctcttgaacaccgcaacctatgtgcaagatggaagctaaggaaagaacagaattacaacagtgaagtgaagtcttcctagtgtcttagcacaattattacttcatgcattttgcaaatgggcataattttttttttgagatggagtctcactctgtcgcccagactggagtgcagtggtgtgatctcagctcaacctccgcctcccaggttcaagggattctcctgcctcatcttcctgagtagctgggactacaggtacgtgccaccacgcccagctaattttttgtatttttagtagagatg

SEQ ID NO: 704754 - DNA, 659 bp, Homo sapiens
ttaaaatctttagagctagaattttgttttgttttctatatctttgaacaattgtgtaggacaagaataaggttttgttccaagtttttattttcttgtaaaattctctggctctgggatttgcttggaggtagcaagttgctttcaattgtcacttgaagtttttgaatggttattgatcaactctattttctaattttgtgccaggtttggcaattgttccaattactatagccgtgtaaccaattacccccaaacaggggtgaaaaataattatttttccctcaaagattccgtgggtaaagagttcagacaggattatggtgggatggcttgtccctgaatgatgatgctccttagctggaagaattgaagactaggggctgaaattagccaaaggctcgtttattcacatatttgactatagatgccagctttcagctaaggcctctgttcttttccctgcgggcctctccatctggtttttccatgtattcttcctaaatcagctagtttgacttccaacatratggtggttttctcagagcaagagaaagacccattcgtgaattcccatagctatgtatagccacattctactcttcagatcaggcacatacctgcccaggttcaaaggagtggaaatagactttgcttcc

SEQ ID NO: 704755 - DNA, 499 bp, Homo sapiens
aaagtgcccgggatacgttgagcactcagtacatcaatgagaaaaacaggactgctgagatccatccaccaactgagatgacacgttctggctcccagctagtggggcaagggtcacttcatgcatttggagaacattaagaagctgagattgtccctggatactatttctccatttcactcctttcctaatctcgctgaagccatcagcagtggtttccccttttgtgaggaytcacaacccaggctgatagagctggaagggcacctagagagacctcccagcccagcctcctcctctggcaggtggcatattagctgtttggctctttgcactttacaaagccttctaacagtcctggggctgagagacatcaaaagggtactcttaagttatgaaagacgatcagagcaaagtgagggatctctaaaggcttctgtccacaagaagatggcattaagtctaggaatttctctctttactttgctgtgcttcaaaa

SEQ ID NO: 704756 - DNA, 603 bp, Homo sapiens
gactagacccaggtctcccgactcccagtttagctctttctttttttctttttctttttttttttgagatggaggctcgctctgtcgcccaggatggagtgcagtggctcgatttcggctcactgcaagctccgcctcccaggttcacgccattctccctgcctcagcctcccgagtagctgggactacaggcgcctgccaccacgcctggctaattttttgtatttttggtagagacggggtttcactatattagccaggatgtctcgatctcctgacctcgtgatccacccgcctcggtctcccaaagtgctgggattacaggtgtgagccaccgcacccggccccagtttagctctttctacyacagcacaggtggtctgagactggacctgtgtcctcatcactgatatctagggtaataaagttggtagcctatacaacgtgctcagcaatggcagattgccgtttaggatgctggtcttccgaaagagttaaaacaaatctatcttttttagttttcaaaatacaatttgcttatattagagaattaggcctaataatgtcttttgcctagctgtagatttttaaatatatatatat

SEQ ID NO: 704757 - DNA, 603 bp, Homo sapiens
gactagacccaggtctcccgactcccagtttagctctttctttttttctttttctttttttttttgagatggaggctcgctctgtcgcccaggatggagtgcagtggctcgatttcggctcactgcaagctccgcctcccaggttcacgccattctccctgcctcagcctcccgagtagctgggactacaggcgcctgccaccacgcctggctaattttttgtatttttggtagagacggggtttcactatattagccaggatgtctcgatctcctgacctcgtgatccacccgcctcggtctcccaaagtgctgggattacaggtgtgagccaccgcacccggccccagtttagctctttctactacagcacaggtggtctgagactggacctgtgtcctcatcactgatatctagggtaatawagttggtagcctatacaacgtgctcagcaatggcagattgccgtttaggatgctggtcttccgaaagagttaaaacaaatctatcttttttagttttcaaaatacaatttgcttatattagagaattaggcctaataatgtcttttgcctagctgtagatttttaaatatatatatat

SEQ ID NO: 704758 - DNA, 569 bp, Homo sapiens
aaaaaaaaaaaaaaaaratcatgaaattgaggtgttttgttgaaatacttatggatgatatgatgtctgggatttatttcaaaataataatatgggggagtgataaaagtatagataaaataagattagccttgtgtcgataattatttaagtttggtgatgggtatgtggagatttaatacactattcgacttttttccataatatagattttaaaaattaatgtatttatgtaaattagatagtatcttgtaaacaagtgaaaggcaagcaataaactgggcaaaatatgcaatatgcgtatttcaatatgcagctaacagaaaaaaatgtcataagtgggtaattcataaaagaagaaatacaggccaggtgcagtgtctcacgcctgtaatcccagcactttgggaggctgaggtgggctgatcacttgaggtcaggagtttgagacaagcctggccaacatggcaaaacccaatctctactaaaaatagaaaaattagctaggcgcggtggcacacacctatgatcccagctactcaggaggctgaggcaggagaatcccttga

SEQ ID NO: 704759 - DNA, 1726 bp, Homo sapiens
cattggctcccggggacgcccatccgcgctgcggcggtggtcgggaggttcccgtgcggcgctaggctctcccgcgagcgcgggcgtcggaagcggcggaggtggcagtgtctgccctgggatggccttccctgcacgcgcgcgtttgtatctaaatcgcaggggaccgtctcttcctcagcttgccggcgcgaggagccagagcctcgagttagggccacacgggggaatttggggcgggttgacttttcccgcaacatattttgtcagagaccttggagaaagtcctactgctggcgccttttagtttcctcagatgataacattcccaactccgctcgaagcgtccagtcttaatcccctccagcagaatggtgctgactaactcagatgtctgagatccgcagctgtgtcaataatagggctttctggcaaacttgtgaacgtaggctcgaaattgtttttctggacgcttgaatatcagtatattcagttgaaaacatgtgattttgttgccagtttatcagttcctacctggcctcccgaggtcagtccttcaggactgacgctgcaactccaactcccatgtttcttttaaatcacaaaggaaaatatcttttaaaaatcaggatacactgattaattatgttagtaactaattggcatttgttgaatcaaaaagttttggaagcgttaaatagttttagcctctaattttacaataaagtgaagctcaaagttgggaatttgaccggatgagggctacaagcctatcctttcctcctccctcttcatctttcccaacctgtcaccctggctcgtttatgtctctgtatagttgtaggctttcatcattatacagagaaaataacaaagtaagtagtgtcttctaaacatctagccattaattccaccaatccattccattttcattcaagaaataccagagatgctgagtaaagattaattagctgcctggttccacagatacatgggaacaaatccagaatagtagtagctcaaatccaaatatagtaacaaatagaagttatatattttaaacgaaaatagtagattttcccatgatctcttgaaagaaaaataaaattatatttttaaagttttgttgagtagacttgcattgtagttttacggaattatttttagtgttacaatctttaaaagttttccccttagattgtttatcagccagtctctctctcccgaagagttctttagtttttgaggaagttgatttggaggcagttcttacaatgagttaagggttcccagttgtgttacagtttctttttccttgatatctcatttctactctgccaacaagaacaccatgcaccccagctctaaagaaggaagactttcaaggtaagtgaccttcctgattgaactgagttagattttaaatgaagaaaggttgtggcaactgttaagaatcaggagtaagtgaggagtgtaaacaatgtataagaaagaaaaaaaaaaaggcctggcgctgtggctcacgcctgtaatcccagcaatttgggaggccgtggcagstggatcacctgaggtcaggagttcaagaccagcctgcccaacatggcgaaacccagtctctactaacaatacaaaaattagccgggcgtggtggcgtgcctgtagtcccagctactcaggcggctgaggcaggagactcagttgaagccgggaggcccaggtgcag

SEQ ID NO: 704760 - DNA, 600 bp, Homo sapiens
tatattggttcaataagtaccaaagtggaagaacattccagacagaagaacagcctgtgcaaaggccctaaaaagggaagagcagaaaagaaaccaattttggctagagtgcagtgagcaagaaggacagcagcagagcaagatgcctgggtgttaagcaagggctagatgatgtagagccttgtttgctttgattctgagtcatgttttttaccacagaatagaggaatgaaagaagagtaggtgcatcttgccatttcagagttttgagctcagcatttttatgatgggcaagcactgttccaaagagttagggttaatatatatatataagattctggctcaaatawataacctaagtaataacaatagagctgagctttagaaagattacactggaatacattaggttaggaaggtacattggagcaaatttggttaaatgaggtagaatgagttagatcagtctggctgctcagtagaggacaggatgtgggtgaagggtgggcagtggaaatggaactgcatggaggagacctttgcaactcatctggatgggaagcagaggaggtacagactaggatcctggctaagaagggg

SEQ ID NO: 704761 - DNA, 627 bp, Homo sapiens
aaggggctacagaagtcagtatcatagtgcactgagggaagctrtagccactatgaggccatgtaaaaagaaatgtctaattcagggggtgaagcagttgggagaggggcatttcagacaaaggcccctggaggagatggattctgagctgagtgtctagggaaagcaggatttagttaggtgaagaaggtatagggaagacctttcagtcagggaaaacacagtctacaaagcagggatgcaagagagaacatttgaaacacttgtcgttgttaaatgcaatgacatttcagatatgccattttcactcagaggaaaataagcaaaattgagatgccaagtttggaaaattgatatcccatttcacatctgaattattgagaaatccttaaacacaaaatattcgttcctctgctgtttttgaaaactgaatgtttgaacattacctcttctgctgaaagtaaacactttatagtgacccaaagttttccttgattttcctaaatatactctattagaaagaaaatatagattttcattgcatcaggaaattcatatgatcgatttgttgcattttttggaatgagcaatacacaatgaaagaagattttgcttttgtctggagcc

SEQ ID NO: 704762 - DNA, 627 bp, Homo sapiens
aaggggctacagaagtcagtatcatagtgcactgagggaagctatagccactatgaggccatgtaaaaagaaatgtctaattcagggggtgaagcagttgggagaggggcatttcagacaaaggcccctggaggagatggattctgagctgagtgtctagggaaagcaggatttagttaggtgaagaaggtatagggaagrcctttcagtcagggaaaacacagtctacaaagcagggatgcaagagagaacatttgaaacacttgtcgttgttaaatgcaatgacatttcagatatgccattttcactcagaggaaaataagcaaaattgagatgccaagtttggaaaattgatatcccatttcacatctgaattattgagaaatccttaaacacaaaatattcgttcctctgctgtttttgaaaactgaatgtttgaacattacctcttctgctgaaagtaaacactttatagtgacccaaagttttccttgattttcctaaatatactctattagaaagaaaatatagattttcattgcatcaggaaattcatatgatcgatttgttgcattttttggaatgagcaatacacaatgaaagaagattttgcttttgtctggagcc

SEQ ID NO: 704763 - DNA, 1764 bp, Homo sapiens
tggagttgcaggagagctgaaggtggagcgcctgtccaagagccggcaggctcatcatccaagaagaactaatgtttcagtttgagtctaaaggcaagaaaaagctgatgtcccagtttcaaaggaagcaaggcaggaggaattctgtcttacacaggggagggttggtgtttttgttctattcagaccttccactgactggatgaacccatccacattagggagggcagtctgctttcctccgcctattgtttttagtgatgatttcattccagaacacgtgcacggaaacacttagaatgtttgaccaaatatctgggcacctgtagcccagacaagttaactcataaaattaaccatcacaccaagtgaaagtaaaaagagtacttattagaaacttaaacctctcatgcatrtgaagaacataagagtttagacagcagttgtggagagaattagtggggaccatagagagagctactcatgggttaatctgctgtgagaaacaccagctccaagggaaaggatctgttcacctctcacctcaaccctaatgagagagcttcaaccgagagcttggtaggtgtccttgctattggagtgacacagtggattgaagtctgattcccacagggaaaattcaaaaagcagagtggggctggccagctgttccaagcaggaggaaggaaggggaggcagcatatttcagttgcctgactcccaactttggttgacacaaagcatgcaagagtgtttgctgtaactagatttgggctacatgtgaactcctttattacagggtcacccataggggcaaacaggcctcagcatgacaatgcttaaaatacagcattcctagagtcagagaaaagtatatcacctgcatcaagggaaatgtagatgagtgctctacatctacatgtactctttagaagtcccagtgttgagacttctaaagagaaccacaatttcagcaaccaagaagaagaaggcttttaacttcagccatgtcctgagagtatgaaatcaacttttgaatataccagtcaagtaggatatttccagcccacatatcacttcctccactacatttaaaacaattagaaaccacacttttcaacttgagagaagagcttgtccaaaatgaaaagtctgaccacatccacttccccaactgcaagctttccaccagtcggccttagttaggaaaagaagaatagctgtaatctgagtgcagttggacattttacctgtaatatgaaactagacaaatccaagagatgtctaagaggcataactgaaggcttttgatgaacatattttatgtaggtagtgaggaagacagggttttgaatattatgcttgggtttctccttgtgtaattctccccagctatatatatttgatgatcctatgactttgtattacctaagattaattacaaaggtcagtggtatggtggagttttcaccaagagcagagtaaaaactagctccaaagaacaaagcattaagggaccatggagagaaaaaaaaatcactctgtatctaatagttgtgcttatttgtgtaccagatacttacacaatggtattcaaatggttgatcaatgagggggaaggggtatgatccctaaagcaacatcttagaaacttgggctaggtgagtgaaaatttacatttcagtagctcaaaatgcctttttagaaagattgtgattctctcaagatgagaatctctcctatgaaggatgggcagccgttacg

SEQ ID NO: 704764 - DNA, 1764 bp, Homo sapiens
tggagttgcaggagagctgaaggtggagcgcctgtccaagagccggcaggctcatcatccaagaagaactaatgtttcagtttgagtctaaaggcaagaaaaagctgatgtcccagtttcaaaggaagcaaggcaggaggaattctgtcttacacaggggagggttggtgtttttgttctattcagaccttccactgactggatgaacccatccacattagggagggcagtctgctttcctccgcctattgtttttagtgatgatttcattccagaacacgtgcacggaaacacttagaatgtttgaccaaatatctgggcacctgtagcccagacaagttaactcataaaattaaccatcacaccaagtgaaagtaaaaagagtacttattagaaacttaaacctctcatgcatgtgaagaacataagagtttagacagcagttgtggagagaattagtggggaccatagagagagctactcatgggttaatctgctgtgagaaacaccagctccaagggaaaggatctgttcacctctcacctcaaccctaatgagagagcttcaaccgagagcttggtaggtgtccttgctattggagtgacacagtggattgaagtctgattcccacagggaaaattcaaaaagcagagtggggctggccagctgttccaagcaggaggaaggaaggggaggcagcatatttcagttgcctgactcccaactttggttgacacaaagcatgcaagagtgtttgctgtaactagatttgggctacatgtgaactcctttattacagggtcacccataggggcaaacaggcctcagcaygacaatgcttaaaatacagcattcctagagtcagagaaaagtatatcacctgcatcaagggaaatgtagatgagtgctctacatctacatgtactctttagaagtcccagtgttgagacttctaaagagaaccacaatttcagcaaccaagaagaagaaggcttttaacttcagccatgtcctgagagtatgaaatcaacttttgaatataccagtcaagtaggatatttccagcccacatatcacttcctccactacatttaaaacaattagaaaccacacttttcaacttgagagaagagcttgtccaaaatgaaaagtctgaccacatccacttccccaactgcaagctttccaccagtcggccttagttaggaaaagaagaatagctgtaatctgagtgcagttggacattttacctgtaatatgaaactagacaaatccaagagatgtctaagaggcataactgaaggcttttgatgaacatattttatgtaggtagtgaggaagacagggttttgaatattatgcttgggtttctccttgtgtaattctccccagctatatatatttgatgatcctatgactttgtattacctaagattaattacaaaggtcagtggtatggtggagttttcaccaagagcagagtaaaaactagctccaaagaacaaagcattaagggaccatggagagaaaaaaaaatcactctgtatctaatagttgtgcttatttgtgtaccagatacttacacaatggtattcaaatggttgatcaatgagggggaaggggtatgatccctaaagcaacatcttagaaacttgggctaggtgagtgaaaatttacatttcagtagctcaaaatgcctttttagaaagattgtgattctctcaagatgagaatctctcctatgaaggatgggcagccgttacg

SEQ ID NO: 704765 - DNA, 696 bp, Homo sapiens
  misc_feature 2, 3, 4, 5, 6, 7, 8, 9, 10, 11, 12, 13, 14, 15, 16, 17, 18,19, 20, 21, 22, 23, 24, 25, 26, 27, 28, 29, 30, 31, 32,33, 34, 35, 36, 37, 38, 39, 40, 41, 42, 43, 44, 45, 46,47, 48, 49, 50, 51, 52, 53, 54, 55, 56, 57, 58, 59, 60,61: n = A,T,C or G
  misc_feature 62, 63, 64, 65, 66, 67, 68, 69, 70, 71, 72, 73, 74, 75, 76,77, 78, 79, 80, 81, 82, 83, 84, 85, 86, 87, 88, 89, 90,91, 92, 93, 94, 95, 96, 97, 98, 99, 100, 101: n = A,T,C or G
annnnnnnnnnnnnnnnnnnnnnnnnnnnnnnnnnnnnnnnnnnnnnnnnnnnnnnnnnnnnnnnnnnnnnnnnnnnnnnnnnnnnnnnnnnnnnnnnnnnggtagtattggtttttctagaaaattgcccatttaatctggctcttaaaataaattgttctgaatttgggccctttattaaggtttttaaacctgtactttgttactggttattacctgtatttttttcttaagattttcttatgactgtctctctttatcttgagcygtcttgccaaaaacatgcttaaatttattagcttttcagaaaaacagttgtcatatttgttatttctcatcattatgtttaaatctatttctgttattacattatctaccttttctctacattcttggcacttgcctcattgtttgttacatttttgtggttattaaaatcggtattcattcacaaaggttagatatcagcattaaaaagaagtataaactaaaaacatttctcctacttttacacctgtctgctcaatttctatgcagagattttacataattatctttatgcacacacacacacaattattgcccttcttttgttacttaatatcagatatgttatattttagaaatttacctataccactacattacgagattaaaacaaatttttaaagctggttagtatttcattttatatt

SEQ ID NO: 704766 - DNA, 650 bp, Homo sapiens
tgttttacattgaatatgtatcttgtcactgacgttaacttattctatcttactcaaggttgtaggtaacagatggtgacaatatactattgggtgacaatggaataacatgtgtagtgattccttttgtcagtggccttaaacttcaaacaatttggagaatatttttcctacaaattgcatttttatttttttctttttgtaactacaggtaactatgatggttataaaaaagattatacaagtataatggagctatatgtttctgaattctgaacaactatttacaaaattttatcctacatttttttgttgttgaacatgtgactrgtctgcaaaacacatacagacctttagttttgatttacatggatttaaatatacagatgtgtcacttaaaataaactttaggtgtaacagatttatggagaaagtaatatatttgtgtatagctgtgtacctactttgagaagaaaagaaaaatattacaataaaaaagataatgttacaagtattgataattaaccagccaaccagaaacttcaaagattttgaaagcaaacctattttctctgctttatattgaattcatttatctaaaatattattgctcctggcttagaatcttatgcagatttttgttttctgtt

SEQ ID NO: 704767 - DNA, 650 bp, Homo sapiens
tgttttacattgaatatgtatcttgtcactgacgttaacttattctatcttactcaaggttgtaggtaacagatggtgacaatatactattgggtgacaatggaataacatgtgtagtgattccttttgtcagtggccttaaacttcaaacaatttggagaatatttttcctacaaattgcatttttatttttttctttttgtaactacaggtaactatgatggttataaaaaagattatacaagtataatggagctatatgtttctgaattctgaacaactatttacaaaattttatcctacatttttttgttgttgaacatgtgactagtctgcaaaacacatacagacctttagttttgatttacatggatttaaatatacagatgtgtcacttaaaataaactttaggtgtaacagatttatggagaaagtaatatatttgtgtatagctgtgtaccyactttgagaagaaaagaaaaatattacaataaaaaagataatgttacaagtattgataattaaccagccaaccagaaacttcaaagattttgaaagcaaacctattttctctgctttatattgaattcatttatctaaaatattattgctcctggcttagaatcttatgcagatttttgttttctgtt

SEQ ID NO: 704768 - DNA, 650 bp, Homo sapiens
tgttttacattgaatatgtatcttgtcactgacgttaacttattctatcttactcaaggttgtaggtaacagatggtgacaatatactattgggtgacaatggaataacatgtgtagtgattccttttgtcagtggccttaaacttcaaacaatttggagaatatttttcctacaaattgcatttttatttttttctttttgtaactacaggtaactatgatggttataaaaaagattatacaagtataatggagctatatgtttctgaattctgaacaactatttacaaaattttatcctacatttttttgttgttgaacatgtgactagtctgcaaaacacatacagacctttagttttgatttacatggatttaaatatacagatgtgtcacttaaaataaactttaggtgtaacagatttatggagaaagtaatatatttgtgtatagctgtgtacctactttgagaagaaaagaaaaatattacaataaaaaagataatgttacaagtattgataattaaccagccaaccagaaacttcaaagattttgaaagcaaacctattttctctgctttatattgaattcatttmtctaaaatattattgctcctggcttagaatcttatgcagatttttgttttctgtt

SEQ ID NO: 704769 - DNA, 530 bp, Homo sapiens
  misc_feature 2, 3, 4, 5, 6, 7, 8, 9, 10, 11, 12, 13, 14, 15, 16, 17, 18,19, 20, 21, 22, 23, 24, 25, 26, 27, 28, 29, 30, 31, 32,33, 34, 35, 36, 37, 38, 39, 40, 41, 42, 43, 44, 45, 46,47, 48, 49, 50, 51, 52, 53, 54, 55, 56, 57, 58, 59, 60,61: n = A,T,C or G
  misc_feature 62, 63, 64, 65, 66, 67, 68, 69, 70, 71, 72, 73, 74, 75, 76,77, 78, 79, 80, 81, 82, 83, 84, 85, 86, 87, 88, 89, 90,91, 92, 93, 94, 95, 96, 97, 98, 99, 100, 101: n = A,T,C or G
gnnnnnnnnnnnnnnnnnnnnnnnnnnnnnnnnnnnnnnnnnnnnnnnnnnnnnnnnnnnnnnnnnnnnnnnnnnnnnnnnnnnnnnnnnnnnnnnnnnnnattcatggaaaatatcttaacctactaaaaacaattttattccattaaaataaattaagttcaaacattatctcaaaaagccttttaaactccactgcattttattattttaatgtgtaactggtaaaacaattgacttctaagattcaaaatgcttctcttctcctacaatgcwgaatcatgttaccctgaacacctacctcatgaatcacttacaacattgttataaggggcctctccacttagattttctttatgcatcttacattcaagtgtccttagtgttccatggaaaagtgtattaatggtgcccacttaatagagaaagatgtctcagagctctgatgcagaaaccattaaccacgtgctttcacatgagcactagaaatgatgatataacatcaagacatttgtgagtttaacttacat

SEQ ID NO: 704770 - DNA, 530 bp, Homo sapiens
  misc_feature 2, 3, 4, 5, 6, 7, 8, 9, 10, 11, 12, 13, 14, 15, 16, 17, 18,19, 20, 21, 22, 23, 24, 25, 26, 27, 28, 29, 30, 31, 32,33, 34, 35, 36, 37, 38, 39, 40, 41, 42, 43, 44, 45, 46,47, 48, 49, 50, 51, 52, 53, 54, 55, 56, 57, 58, 59, 60,61: n = A,T,C or G
  misc_feature 62, 63, 64, 65, 66, 67, 68, 69, 70, 71, 72, 73, 74, 75, 76,77, 78, 79, 80, 81, 82, 83, 84, 85, 86, 87, 88, 89, 90,91, 92, 93, 94, 95, 96, 97, 98, 99, 100, 101: n = A,T,C or G
gnnnnnnnnnnnnnnnnnnnnnnnnnnnnnnnnnnnnnnnnnnnnnnnnnnnnnnnnnnnnnnnnnnnnnnnnnnnnnnnnnnnnnnnnnnnnnnnnnnnnattcatggaaaatatcttaacctactaaaaacaattttattccattaaaataaattaagttcaaacattatctcaaaaagccttttaaactccactgcattttattattttaatgtgtaactggtaaaacaattgacttctaagattcaaaatgcttctcttctcctacaatgctgaatcatgttaccctgaacacctacctcatgaatcacttacaacattgttataaggggcctctccacttagattttctttatgcrtcttacattcaagtgtccttagtgttccatggaaaagtgtattaatggtgcccacttaatagagaaagatgtctcagagctctgatgcagaaaccattaaccacgtgctttcacatgagcactagaaatgatgatataacatcaagacatttgtgagtttaacttacat

SEQ ID NO: 704771 - DNA, 593 bp, Homo sapiens
aaagcagaagacagaaaaatgctatgaagggctgtcaatctaaaataatcaaaaggctcaaaattcagttttagagtttattcaagttaaaagcaagaaacagtcatccgggagacaaagactccaggtgtggtggcacatgcctgtagtcccagctactcatgaggctgaggcaggagaatcacttgaacccagaggatggaggttgcagtgagcccagatcacaccagtgcactccagcctggatgacaggaaagaaagaaagaaaagaaagraaagaaagaaagaaagaaagaaagaaagaaagaaagaaagaaagaaagaaagaaagaaagaaagaaagaaagagagagagagacagagagagagggagggagggagacagggaggaagggaaacttaacaaaattttccaagtccccgtctcatctctgtcacatttgttcacgtgatgacaccacttgtagctatcctaagacctcagagtgattacagggaagtcacttcaatttctaccccatatttcaaacgtatctgctatatatttttttcaataggcctcatctacctcactaagaaagacaccattatca

SEQ ID NO: 704772 - DNA, 603 bp, Homo sapiens
atcatgcagtggactgtgtttggtctgtaagccttagtttgcttattcctgcaccagagaaaggaacatttatgttcacagaagtatctgtgtatgaagtatatagcaattttattcataatcaccaagagtggaaacaacccattatccttcaaaagatgaaggaataaacaaaccaaggtacatccatagaatggaatattactccctaataaaaaggaagtaactcttgatatgcagaacaacttggatgaatctcaaagacattttcaatggcattatactgagtcaaagaagcctgtctcaaagcttatatactgtatgatgtcatttatgattctcaagaagtcaagttacagtgaaagagagcacatcagtattgccagtgttggtgtgatggaaaaaaggaataacatgcaaggttttatggtgatgraactgctctgtatcctcattatagctgtgctacatgaacttgttaaaatttctagaacagtatatcgagaagagatcaactttacattttctcttttaatttaaaaatctcagcattttttaccctgttctaaataaaatttttcaaagctgtatgctgggtctggg

SEQ ID NO: 704773 - DNA, 667 bp, Homo sapiens
tgaatctgttttttaaaactaattccctggaaaacaaaaatataactgttattttaccatacggtccattataaatagaaattataatttaaaataattatcctacctacacactagcaacttaaaattgtcttatctccctttaaagaaatttccagatggatgacagagtcctcraagtgaacaagatttgtatatgtgcagggaattgtgaatggttatgattcagactatctcaagtcaaaaatatgaaaggatagttttgatcaatgaaacaggaaagttggcaggggttaagtcatgaaggatgttaaaggccaacttaagaaatttagatatacactgaagagagtagagacacaaagattttaggcaaagaaatcagggttatgttttagaaagtttactatgcacttccagtcaaaataactaagtaagacttgtctttctgaaaccaaatcaaaacagaaagaacaagaaacagtaaatgtcatctataaaaacagaaaaattgcccaactgcaaaccttaatctatgaaattctgccagttgtagtgaacataggctaagtaaggaagttgagaacaaacctgtgctaaagagggactgaccacaaagatttccaaaaggtagtgttcttactagaatttctttgttaagatcaac

SEQ ID NO: 704774 - DNA, 622 bp, Homo sapiens
tttttracatctcagtagggaaggcattagtaaaatagtttctcttgagggaaagccttattaagaatagaatactctggtgtatttcaaactggacactttttccttattccttctggaaacataagggaatttttctctgatttcactatgacaacctagcagaactccaggaagtaaaaattacaaaatgtggcctcccacacccccatctgcagagtcattaactcacagacttgtccacatcaggcctccagcaatttgtcaattacagtttaagttttcctactccagcactacctcagcagtcagatacttcctcactgtctactgtctttgatccatttgtgtttaatttcattgagagtcctcgcataatatgcaagttatttgcgttagggaatttaggtcagtttatctcatgtctgtgtgttacctcgacaaagacactaaaacactgcttagatgactaggcaagaaatcaaagaacagttcctcagagttgaccccatgttagccctgagccagaagagtgcatggcctgctcagtacaaaatccagaaagactaggatatgtgcgcttggtgatagtaggaacgggtgttacggaaaggagggagga

SEQ ID NO: 704775 - DNA, 622 bp, Homo sapiens
tttttgacatctcagtagggaaggcattagtaaaatagtttctcttgagggaaagccttattaagaatagaatactctggtgtatytcaaactggacactttttccttattccttctggaaacataagggaatttttctctgatttcactatgacaacctagcagaactccaggaagtaaaaattacaaaatgtggcctcccacacccccatctgcagagtcattaactcacagacttgtccacatcaggcctccagcaatttgtcaattacagtttaagttttcctactccagcactacctcagcagtcagatacttcctcactgtctactgtctttgatccatttgtgtttaatttcattgagagtcctcgcataatatgcaagttatttgcgttagggaatttaggtcagtttatctcatgtctgtgtgttacctcgacaaagacactaaaacactgcttagatgactaggcaagaaatcaaagaacagttcctcagagttgaccccatgttagccctgagccagaagagtgcatggcctgctcagtacaaaatccagaaagactaggatatgtgcgcttggtgatagtaggaacgggtgttacggaaaggagggagga

SEQ ID NO: 704776 - DNA, 1727 bp, Homo sapiens
tgctgcagtatttcagaatttccaggagtagttatgaaattagctcaccatagtgggctagtcagaaaagcactttttaaaattcctgtatcctttctggagaaaaagtagtaactcatatcagcaaatgtcttggctgtggcttctatatcttaaagttctttgtaaatcaacactcaggactcaatattaagtatatgacacctaagagacctttctgggcttaattgagctctaacatcatttgtgtacattttggggtcaggaaaaaatatttcagactctgatttcagatatattccatggaaaaacaaacattatttgaagtgcacagtgtcttttagttagtgctttttgttcaatggcctattcagggtgttttttcttttttaaggttttgatgggttttatttaacaggacctaaaacaatgttgtcatggggacaaaaatctctttttaaattgcttattgaaacattagtcatgtgagttcacaaagatatgataaaaattttatcacaatactgtttagttagaaaagcactggactgtgtctcccccagattcccagtgcacattccctttgacatgttgacatttctgaaacccagcagctgaacttgctttgacaattggccaagcagatggtgctctcaaccttagtcccagcacctgtttccctagattccatccagcctgtaaactcagttccaatgtcacctgccacattccagatgggaccaggttgtatgttctcgaacttctttgttctctagtctctaaccctctgaatctcccaagggacactgtgtggtctcaccacttcattgccccttctatgagcattgtggggtagagcagagagtggtcatcctcaggggccatcccaatgctagtttcttgagatgccagattccaggctgtgaggtcaactagatgcctgtagaatactggagtgacatggagcagctgctgctgttggggaaagcggattcctacctcatggtccactcccacacaccccagcaaagcagtggccacatgcagagggtgtcctgatcgattgttagttcacagacatccatgtcctttgagaaaaggagatgacagtcctttggcaagaatcttcgacctacccctcatccaggaagggtgcctatgggggtgttcagctaagagaacaagatcgaggagattcccttcccctgcggtgcctctgcccagcctcacctactccactcaatttctttacaaggaattgcaggaragcctggaagtatagacaatgtagccttaggaaattccattcaggtggtgctattcctgcagaagttctttattgtttttactgtgctgctggtactttattcatcacctccgccaatccctggtgggagtacttgcttgcactcctagcacactcaggcagtggatagctcacttaacctttgttgaaagaatactaggtcaggcgcggtggctcacgcctgtagtctcagcactttgggaggcccatgcaggtggatcacctgaggtcaggagttcaagaccagcctggccaaaatggcgaaactccttgtctactgaaaatacaaaaaaatagctggccgtggtggtgggcacctgtaatcccagctacttgggaggctgcaggagaatcacttgaacccgggaggtggaggttgcagtgagccaagatctcaccatgcactccagcctgggtgaca

SEQ ID NO: 704777 - DNA, 1727 bp, Homo sapiens
tgctgcagtatttcagaatttccaggagtagttatgaaattagctcaccatagtgggctagtcagaaaagcactttttaaaattcctgtatcctttctggagaaaaagtagtaactcatatcagcaaatgtcttggctgtggcttctatatcttaaagttctttgtaaatcaacactcaggactcaatattaagtatatgacacctaagagacctttctgggcttaattgagctctaacatcatttgtgtacattttggggtcaggaaaaaatatttcagactctgatttcagatatattccatggaaaaacaaacattatttgaagtgcacagtgtcttttagttagtgctttttgttcaatggcctattcagggtgttttttcttttttaaggttttgatgggttttatttaacaggacctaaaacaatgttgtcatggggacaaaaatctctttttaaattgcttattgaaacattagtcatgtgagttcacaaagatatgataaaaattttatcacaatactgtttagttagaaaagcactggactgtgtctcccccagattcccagtgcacattccctttgacatgttgacatttctgaaacccagcagctgaacttgctttgacaattggccaagcagatggtgctctcaaccttagtcccagcacctgtttccctagattccatccagcctgtaaactcagttccaatgtcacctgccacattccagatgggaccaggttgtatgttctcgaacttctttgttctctagtctctaaccctctgaatctcccaagggacactgtgtggtctcaccacttcattgccccttctatgagcattgtggggtagagcagagagtggtcatcctcaggggccatcccaatgctagtttcttgagatgccagattccaggctgtgaggtcaactagatgcctgtagaatactggagtgacatggagcagctgctgctgttggggaaagcggattcctacctcatggtccactcccacacaccccagcaaagcagtggccacatgcagagggtgtcctgatcgattgttagttcacagacatccatgtcctttgagaaaaggagatgacagtcctttggcaagaatcttcgacctacccctcatccaggaagggtgcctatgggggtgttcagctaagagaacaagatcgaggagattcccttcccctgcggtgcctctgcccagcctcacctactccactcaatttctttacaaggaattgcaggaaagcctggaagtatagacaatgtagccttaggaaattccattcaggtggtgctattcctgcagaagttctttattgtttttactgtgctgctggtactttattcatcacctccgccaatccctggtgggagtacttgcttgcactcctagcacactcaggcagtggatagctcacttaacctttgttgaaagaatactaggtcaggcrcggtggctcacgcctgtagtctcagcactttgggaggcccatgcaggtggatcacctgaggtcaggagttcaagaccagcctggccaaaatggcgaaactccttgtctactgaaaatacaaaaaaatagctggccgtggtggtgggcacctgtaatcccagctacttgggaggctgcaggagaatcacttgaacccgggaggtggaggttgcagtgagccaagatctcaccatgcactccagcctgggtgaca

SEQ ID NO: 704778 - DNA, 1727 bp, Homo sapiens
tgctgcagtatttcagaatttccaggagtagttatgaaattagctcaccatagtgggctagtcagaaaagcactttttaaaattcctgtatcctttctggagaaaaagtagtaactcatatcagcaaatgtcttggctgtggcttctatatcttaaagttctttgtaaatcaacactcaggactcaatattaagtatatgacacctaagagacctttctgggcttaattgagctctaacatcatttgtgtacattttggggtcaggaaaaaatatttcagactctgatttcagatatattccatggaaaaacaaacattatttgaagtgcacagtgtcttttagttagtgctttttgttcaatggcctattcagggtgttttttcttttttaaggttttgatgggttttatttaacaggacctaaaacaatgttgtcatggggacaaaaatctctttttaaattgcttattgaaacattagtcatgtgagttcacaaagatatgataaaaattttatcacaatactgtttagttagaaaagcactggactgtgtctcccccagattcccagtgcacattccctttgacatgttgacatttctgaaacccagcagctgaacttgctttgacaattggccaagcagatggtgctctcaaccttagtcccagcacctgtttccctagattccatccagcctgtaaactcagttccaatgtcacctgccacattccagatgggaccaggttgtatgttctcgaacttctttgttctctagtctctaaccctctgaatctcccaagggacactgtgtggtctcaccacttcattgccccttctatgagcattgtggggtagagcagagagtggtcatcctcaggggccatcccaatgctagtttcttgagatgccagattccaggctgtgaggtcaactagatgcctgtagaatactggagtgacatggagcagctgctgctgttggggaaagcggattcctacctcatggtccactcccacacaccccagcaaagcagtggccacatgcagagggtgtcctgatcgattgttagttcacagacatccatgtcctttgagaaaaggagatgacagtcctttggcaagaatcttcgacctacccctcatccaggaagggtgcctatgggggtgttcagctaagagaacaagatcgaggagattcccttcccctgcggtgcctctgcccagcctcacctactccactcaatttctttacaaggaattgcaggaaagcctggaagtatagacaatgtagccttaggaaattccattcaggtggtgctattcctgcagaagttctttattgtttttactgtgctgctggtactttattcatcacctccgccaatccctggtgggagtacttgcttgcactcctagcacactcaggcagtggatagctcacttaacctttgttgaaagaatactaggtcaggcgcggtggctcacgcctgtagtctcagcactttgggaggcccatgcaggtggatcacctgaggtcaggagttcaagaccagcctggccaaaatggcgaaactccttgtctactgaaaatacaaaaaaatagctggccgtggtggtgggcacctgtaatcccagctactygggaggctgcaggagaatcacttgaacccgggaggtggaggttgcagtgagccaagatctcaccatgcactccagcctgggtgaca

SEQ ID NO: 704779 - DNA, 1202 bp, Homo sapiens
tgggcctccttgcaccctccatggtctctggcccacctcattgtccccattatagctctgcagcttctttcctttcctcctgcttctttcattcccggtctccctacatcacagtagggggttgacccatggaaaatctggtcataggaatctccaggaaggcagtgtcccaattaggggaaagagactgccttcactttaacacaagcccaggaaaaagttggcacattctgcgacaacgttctggttttctagtttgctcctagtttactgtccctgctacctcttctccaacttgtaaggaaatagcttcataaaattggttggagcatgacaaaattttatgctgactacttccccccaacacacatcttttctttttctttttttttctctactaagggtgtcacatcttggtcgtagggcccatctcctaactttccatgaatgtaggctgccactcaattggtttcaaggttcagggtctgggtaagtggaggtttgactggttagatgtttattcaatacatttgatcctactcaagtgcaaggagagtatacatctttaggtgtacaggtctggagttaggtgagcaggaaatggacagtttccagactatcctgagttcaaatcccagtctctccacttaccatcctaatgagcaattacttaaattttctggatgtgcattcccttattagaaacagagcatgaggcctggtgtggtggctcatgcctgtaatctcagcactttgggaggccgagatgagcagatcacttgaggccaggagttcgagaccagcctggccaacatggtgaaaccccatccctactaaacatacaaaaaaattagctgggcgtggtggtgggggcctgtaatcccagctactcgggaggctgaggcaggagaattgcttgaactcaggagtcagaggttgcagtgagctgagaacacrccattgtcatctagcctgggtgataagagcgagactccatctcaaaaaaaaaaaaagagaaacagagcatgaatgtcagtacagatatacctcagagacattgcagatttggttctagaccactgcaataaagtgaatatcgcaataacatgagtcataatttttttgtttcccagtgtgtataaaagttatatttacactgtactacagcctattaagtgtgcaacagcattatgtctaaaaaa

SEQ ID NO: 704780 - DNA, 639 bp, Homo sapiens
cagaggtccatgtgccttccactgatctgatgccatgcttgctcactcactcactcactcactcactcactcatcagaaaaagattccagctctgatgctgcattcaccaagaccccctaaccctgatgtggtttcccaagaagttcttcctcctgggaaaagaccgtgcccataaacagcaggctgcacagcaggaaagtgactatcttggcctccctgcatgaagccaagtcaccctgcctacctctggtggcagcagccagcttttcacmggcttgatccctcctggatacaccagccagcaaagtgacggatggtcagccctgcacgccacagtcccctgccttcagcctgcagcaaggagctacccattccggcaaagcccatccccagaggctctcttcacattccaagagaagaaacttaactgtaggaaggaaaagtaacaaggcaagtctctcctgtaactgtgagcattatggctgagctggttctcctcaggcaatgcacaataagtccttatatttatagagcactcgacagtgctcagaatgctttcacaaatgttatttccttttggtgaaatctcctgctactttgggtatcttttctctcagatgctttgttttcacatgtca

SEQ ID NO: 704781 - DNA, 639 bp, Homo sapiens
cagaggtccatgtgccttccactgatctgatgccatgcttgctcactcactcactcactcactcactcactcatcagaaaaagattccagctctgatgctgcattcaccaagaccccctaaccctgatgtggtttcccaagaagttcttcctcctgggaaaagaccgtgcccataaacagcaggctgcacagcaggaaagtgactatcttggcctccctgcatgaagccaagtcaccctgcctacctctggtggcagcagccagcttttcaccggcttgatccctcctggatacaccagccagcaaartgacggatggtcagccctgcacgccacagtcccctgccttcagcctgcagcaaggagctacccattccggcaaagcccatccccagaggctctcttcacattccaagagaagaaacttaactgtaggaaggaaaagtaacaaggcaagtctctcctgtaactgtgagcattatggctgagctggttctcctcaggcaatgcacaataagtccttatatttatagagcactcgacagtgctcagaatgctttcacaaatgttatttccttttggtgaaatctcctgctactttgggtatcttttctctcagatgctttgttttcacatgtca

SEQ ID NO: 704782 - DNA, 2860 bp, Homo sapiens
tgtgataaaagtaggaagaataaaaggctcatattttttcatttattctttttcatttagtctttagaatatcttcctgattttgtctttgttcatgattgctcttaagaaatgagttcttctccatgtattttttccacctagcttttaaaaacttctatttattgagctatcatttacaaacagcaaaatgcataaatcttaagtatacagcccaatgaattttttacatatgtatataccatgttaaccactgcccagattaggatataaaacattttcatcacccaagtgagttcccttgtgcacctttctagtcaataaccctcagccccactgaaatagctagtattctgatttctattttgatggattagttttgcctgtccttgaaattcatataaatggattcatacacagtggattcttttgtgtctggctcctttcacttaatgcaacatttcttagattcaactgtgttgtacgggaatcagtagttcattgcttgctcttgctgaatgcagagatatatgagagtttgtttatccattcacctgttgatggacatttcggttgtctccaggcctgggctgttatgaataaagctgtgttgaatattcctgtacaggtctttttgttgacatatgtacttgcttcttttgagtgtattcacaaaagctgaattgcttggtcatagggtaggtgtgtgtttaactgtctatgcattttttttattaacactgtctgagagttgccatattaaacagcaattatcttttctaagtatatcgggttgagctctgcagtaggaaaaaagtggagtctctgggcattctcatagtaatctcccaaactcagcattcaggctgttattaaatagaagaactagcaatttttcagcagttacctgtgcacacacagagggtgggtgcctttttcacatcctccgcaggtgctggggaaatcctgcccctctaccatcagggagattctctggagaccaggtgacattccaaacctcagacttcctagcaggaaatgcatcaaaacccaaatcctaacacgacaaaatctttggcaaggccaacataacatcccattcagtcactcaagcttccacaaattttgataacttatcaggactacgactgccctgggtgcagcactgagcagtagacttcggcctggagaagtctcagtcattttaaaacccatctccctctgctcagatgatcatcttccctctgatttacaggggctgacctgcaggtgttgaaaaggggctcttcatttaaccagacagcaataatctcaggaagtatatttccacagctacatcgtccttctcccattctcaccaccaaagccagccagcaactcactccctccagaggtgactctgtaatgtgccttgggctatatctgggtcagtgataggaaacccttataattctacccccaaaaaggcaagagaaaaatgatcacagggatcaaggagagtgtctccttatactaatctttttgcctgataagaggtgacccatatccagaactggagatttatatatgcattttgacataaatctgcatctgtaattatgagtcataatgatctttataggctgcactaaattggtgaagaagagttactgttattgacaaagcattgacctgaacattagtggtggaagagctaattatattttttcctgaggagtgggacttcttttctagttatgaatcacttagaatcgaggcctttattaaataccttttcacatctgaatataaacagaactgagcctcccaagcacatcctttatcttcacataattacagatgtataaaaatttcaaaacacattctagaggcttttttttagtgtttcaaagacagtgatgagggttttgcaaggtgactgaagaggctgatatatattttgtgaaagcaagctgtctgcaggatacactcccatgtctgaaagactgagacctatttttagctgggcatgctgggattcacgtgtggagccaccattagcgttaatagagctctgtgcggctgactactgtgtgcaggcagcccagaaaatgtactctttagagcaatggaatcttcaagcgagctttaaatcatagccttatcatacttgcatgttattggcaagcctgcctaaaaatagaatctcattactttaattctacagtattcttaggtgagccgacctttattattaataacagcatttcacayacacacatatatatatatatatatatatatagcactgtctgcttaagagaacttcacaaattatacacataaaactttcctagcttaatgtaacaagctatgggtaaagggggcaggaggtaggtggtaagtagtggctcccactctccatccagggtggaggactgagaaaatgtcactaggtggctctaaacaaagccactctttgaagttgagccatttgcccaacaagcattttaattctgtgaaagtatgttgtatttttcattgataatttgtaaggccctggggacagtcacagcaaccctgagaataataggctgcttctatgatatattttttgtttatctattcaggtcttagctgagtcttggaaacaagagccacaataaaaatgcatgccttttccactctccaaaccacgagcttgctctgaggagcctttctctaagcttatgaacccaaactcagctatcgagaatagaaggaggatggaacattatcagccatctatgcacttacaccaattacttaccaaggttgtgtgaatggttagtagagttagtagctgtggtttccggataaatgtagagtggatatgtaaata

SEQ ID NO: 704783 - DNA, 2860 bp, Homo sapiens
tgtgataaaagtaggaagaataaaaggctcatattttttcatttattctttttcatttagtctttagaatatcttcctgattttgtctttgttcatgattgctcttaagaaatgagttcttctccatgtattttttccacctagcttttaaaaacttctatttattgagctatcatttacaaacagcaaaatgcataaatcttaagtatacagcccaatgaattttttacatatgtatataccatgttaaccactgcccagattaggatataaaacattttcatcacccaagtgagttcccttgtgcacctttctagtcaataaccctcagccccactgaaatagctagtattctgatttctattttgatggattagttttgcctgtccttgaaattcatataaatggattcatacacagtggattcttttgtgtctggctcctttcacttaatgcaacatttcttagattcaactgtgttgtacgggaatcagtagttcattgcttgctcttgctgaatgcagagatatatgagagtttgtttatccattcacctgttgatggacatttcggttgtctccaggcctgggctgttatgaataaagctgtgttgaatattcctgtacaggtctttttgttgacatatgtacttgcttcttttgagtgtattcacaaaagctgaattgcttggtcatagggtaggtgtgtgtttaactgtctatgcattttttttattaacactgtctgagagttgccatattaaacagcaattatcttttctaagtatatcgggttgagctctgcagtaggaaaaaagtggagtctctgggcattctcatagtaatctcccaaactcagcattcaggctgttattaaatagaagaactagcaatttttcagcagttacctgtgcacacacagagggtgggtgcctttttcacatcctccgcaggtgctggggaaatcctgcccctctaccatcagggagattctctggagaccaggtgacattccaaacctcagacttcctagcaggaaatgcatcaaaacccaaatcctaacacgacaaaatctttggcaaggccaacataacatcccattcagtcactcaagcttccacaaattttgataacttatcaggactacgactgccctgggtgcagcactgagcagtagacttcggcctggagaagtctcagtcattttaaaacccatctccctctgctcagatgatcatcttccctctgatttacaggggctgacctgcaggtgttgaaaaggggctcttcatttaaccagacagcaataatctcaggaagtatatttccacagctacatcgtccttctcccattctcaccaccaaagccagccagcaactcactccctccagaggtgactctgtaatgtgccttgggctatatctgggtcagtgataggaaacccttataattctacccccaaaaaggcaagagaaaaatgatcacagggatcaaggagagtgtctccttatactaatctttttgcctgataagaggtgacccatatccagaactggagatttatatatgcattttgacataaatctgcatctgtaattatgagtcataatgatctttataggctgcactaaattggtgaagaagagttactgttattgacaaagcattgacctgaacattagtggtggaagagctaattatattttttcctgaggagtgggacttcttttctagttatgaatcacttagaatcgaggcctttattaaataccttttcacatctgaatataaacagaactgagcctcccaagcacatcctttatcttcacataattacagatgtataaaaatttcaaaacacattctagaggcttttttttagtgtttcaaagacagtgatgagggttttgcaaggtgactgaagaggctgatatatattttgtgaaagcaagctgtctgcaggatacactcccatgtctgaaagactgagacctatttttagctgggcatgctgggattcacgtgtggagccaccattagcgttaatagagctctgtgcggctgactactgtgtgcaggcagcccagaaaatgtactctttagagcaatggaatcttcaagcgagctttaaatcatagccttatcatacttgcatgttattggcaagcctgcctaaaaatagaatctcattactttaattctacagtattcttaggtgagccgacctttattattaataacagcatttcacacayacacatatatatatatatatatatatatagcactgtctgcttaagagaacttcacaaattatacacataaaactttcctagcttaatgtaacaagctatgggtaaagggggcaggaggtaggtggtaagtagtggctcccactctccatccagggtggaggactgagaaaatgtcactaggtggctctaaacaaagccactctttgaagttgagccatttgcccaacaagcattttaattctgtgaaagtatgttgtatttttcattgataatttgtaaggccctggggacagtcacagcaaccctgagaataataggctgcttctatgatatattttttgtttatctattcaggtcttagctgagtcttggaaacaagagccacaataaaaatgcatgccttttccactctccaaaccacgagcttgctctgaggagcctttctctaagcttatgaacccaaactcagctatcgagaatagaaggaggatggaacattatcagccatctatgcacttacaccaattacttaccaaggttgtgtgaatggttagtagagttagtagctgtggtttccggataaatgtagagtggatatgtaaata

SEQ ID NO: 704784 - DNA, 2860 bp, Homo sapiens
tgtgataaaagtaggaagaataaaaggctcatattttttcatttattctttttcatttagtctttagaatatcttcctgattttgtctttgttcatgattgctcttaagaaatgagttcttctccatgtattttttccacctagcttttaaaaacttctatttattgagctatcatttacaaacagcaaaatgcataaatcttaagtatacagcccaatgaattttttacatatgtatataccatgttaaccactgcccagattaggatataaaacattttcatcacccaagtgagttcccttgtgcacctttctagtcaataaccctcagccccactgaaatagctagtattctgatttctattttgatggattagttttgcctgtccttgaaattcatataaatggattcatacacagtggattcttttgtgtctggctcctttcacttaatgcaacatttcttagattcaactgtgttgtacgggaatcagtagttcattgcttgctcttgctgaatgcagagatatatgagagtttgtttatccattcacctgttgatggacatttcggttgtctccaggcctgggctgttatgaataaagctgtgttgaatattcctgtacaggtctttttgttgacatatgtacttgcttcttttgagtgtattcacaaaagctgaattgcttggtcatagggtaggtgtgtgtttaactgtctatgcattttttttattaacactgtctgagagttgccatattaaacagcaattatcttttctaagtatatcgggttgagctctgcagtaggaaaaaagtggagtctctgggcattctcatagtaatctcccaaactcagcattcaggctgttattaaatagaagaactagcaatttttcagcagttacctgtgcacacacagagggtgggtgcctttttcacatcctccgcaggtgctggggaaatcctgcccctctaccatcagggagattctctggagaccaggtgacattccaaacctcagacttcctagcaggaaatgcatcaaaacccaaatcctaacacgacaaaatctttggcaaggccaacataacatcccattcagtcactcaagcttccacaaattttgataacttatcaggactacgactgccctgggtgcagcactgagcagtagacttcggcctggagaagtctcagtcattttaaaacccatctccctctgctcagatgatcatcttccctctgatttacaggggctgacctgcaggtgttgaaaaggggctcttcatttaaccagacagcaataatctcaggaagtatatttccacagctacatcgtccttctcccattctcaccaccaaagccagccagcaactcactccctccagaggtgactctgtaatgtgccttgggctatatctgggtcagtgataggaaacccttataattctacccccaaaaaggcaagagaaaaatgatcacagggatcaaggagagtgtctccttatactaatctttttgcctgataagaggtgacccatatccagaactggagatttatatatgcattttgacataaatctgcatctgtaattatgagtcataatgatctttataggctgcactaaattggtgaagaagagttactgttattgacaaagcattgacctgaacattagtggtggaagagctaattatattttttcctgaggagtgggacttcttttctagttatgaatcacttagaatcgaggcctttattaaataccttttcacatctgaatataaacagaactgagcctcccaagcacatcctttatcttcacataattacagatgtataaaaatttcaaaacacattctagaggcttttttttagtgtttcaaagacagtgatgagggttttgcaaggtgactgaagaggctgatatatattttgtgaaagcaagctgtctgcaggatacactcccatgtctgaaagactgagacctatttttagctgggcatgctgggattcacgtgtggagccaccattagcgttaatagagctctgtgcggctgactactgtgtgcaggcagcccagaaaatgtactctttagagcaatggaatcttcaagcgagctttaaatcatagccttatcatacttgcatgttattggcaagcctgcctaaaaatagaatctcattactttaattctacagtattcttaggtgagccgacctttattattaataacagcatttcacacacayacatatatatatatatatatatatatagcactgtctgcttaagagaacttcacaaattatacacataaaactttcctagcttaatgtaacaagctatgggtaaagggggcaggaggtaggtggtaagtagtggctcccactctccatccagggtggaggactgagaaaatgtcactaggtggctctaaacaaagccactctttgaagttgagccatttgcccaacaagcattttaattctgtgaaagtatgttgtatttttcattgataatttgtaaggccctggggacagtcacagcaaccctgagaataataggctgcttctatgatatattttttgtttatctattcaggtcttagctgagtcttggaaacaagagccacaataaaaatgcatgccttttccactctccaaaccacgagcttgctctgaggagcctttctctaagcttatgaacccaaactcagctatcgagaatagaaggaggatggaacattatcagccatctatgcacttacaccaattacttaccaaggttgtgtgaatggttagtagagttagtagctgtggtttccggataaatgtagagtggatatgtaaata

SEQ ID NO: 704785 - DNA, 2860 bp, Homo sapiens
tgtgataaaagtaggaagaataaaaggctcatattttttcatttattctttttcatttagtctttagaatatcttcctgattttgtctttgttcatgattgctcttaagaaatgagttcttctccatgtattttttccacctagcttttaaaaacttctatttattgagctatcatttacaaacagcaaaatgcataaatcttaagtatacagcccaatgaattttttacatatgtatataccatgttaaccactgcccagattaggatataaaacattttcatcacccaagtgagttcccttgtgcacctttctagtcaataaccctcagccccactgaaatagctagtattctgatttctattttgatggattagttttgcctgtccttgaaattcatataaatggattcatacacagtggattcttttgtgtctggctcctttcacttaatgcaacatttcttagattcaactgtgttgtacgggaatcagtagttcattgcttgctcttgctgaatgcagagatatatgagagtttgtttatccattcacctgttgatggacatttcggttgtctccaggcctgggctgttatgaataaagctgtgttgaatattcctgtacaggtctttttgttgacatatgtacttgcttcttttgagtgtattcacaaaagctgaattgcttggtcatagggtaggtgtgtgtttaactgtctatgcattttttttattaacactgtctgagagttgccatattaaacagcaattatcttttctaagtatatcgggttgagctctgcagtaggaaaaaagtggagtctctgggcattctcatagtaatctcccaaactcagcattcaggctgttattaaatagaagaactagcaatttttcagcagttacctgtgcacacacagagggtgggtgcctttttcacatcctccgcaggtgctggggaaatcctgcccctctaccatcagggagattctctggagaccaggtgacattccaaacctcagacttcctagcaggaaatgcatcaaaacccaaatcctaacacgacaaaatctttggcaaggccaacataacatcccattcagtcactcaagcttccacaaattttgataacttatcaggactacgactgccctgggtgcagcactgagcagtagacttcggcctggagaagtctcagtcattttaaaacccatctccctctgctcagatgatcatcttccctctgatttacaggggctgacctgcaggtgttgaaaaggggctcttcatttaaccagacagcaataatctcaggaagtatatttccacagctacatcgtccttctcccattctcaccaccaaagccagccagcaactcactccctccagaggtgactctgtaatgtgccttgggctatatctgggtcagtgataggaaacccttataattctacccccaaaaaggcaagagaaaaatgatcacagggatcaaggagagtgtctccttatactaatctttttgcctgataagaggtgacccatatccagaactggagatttatatatgcattttgacataaatctgcatctgtaattatgagtcataatgatctttataggctgcactaaattggtgaagaagagttactgttattgacaaagcattgacctgaacattagtggtggaagagctaattatattttttcctgaggagtgggacttcttttctagttatgaatcacttagaatcgaggcctttattaaataccttttcacatctgaatataaacagaactgagcctcccaagcacatcctttatcttcacataattacagatgtataaaaatttcaaaacacattctagaggcttttttttagtgtttcaaagacagtgatgagggttttgcaaggtgactgaagaggctgatatatattttgtgaaagcaagctgtctgcaggatacactcccatgtctgaaagactgagacctatttttagctgggcatgctgggattcacgtgtggagccaccattagcgttaatagagctctgtgcggctgactactgtgtgcaggcagcccagaaaatgtactctttagagcaatggaatcttcaagcgagctttaaatcatagccttatcatacttgcatgttattggcaagcctgcctaaaaatagaatctcattactttaattctacagtattcttaggtgagccgacctttattattaataacagcatttcacacacacayatatatatatatatatatatatatagcactgtctgcttaagagaacttcacaaattatacacataaaactttcctagcttaatgtaacaagctatgggtaaagggggcaggaggtaggtggtaagtagtggctcccactctccatccagggtggaggactgagaaaatgtcactaggtggctctaaacaaagccactctttgaagttgagccatttgcccaacaagcattttaattctgtgaaagtatgttgtatttttcattgataatttgtaaggccctggggacagtcacagcaaccctgagaataataggctgcttctatgatatattttttgtttatctattcaggtcttagctgagtcttggaaacaagagccacaataaaaatgcatgccttttccactctccaaaccacgagcttgctctgaggagcctttctctaagcttatgaacccaaactcagctatcgagaatagaaggaggatggaacattatcagccatctatgcacttacaccaattacttaccaaggttgtgtgaatggttagtagagttagtagctgtggtttccggataaatgtagagtggatatgtaaata

SEQ ID NO: 704786 - DNA, 658 bp, Homo sapiens
atctgagcctgggaagtacaggctgcagtgagtcatgatcatgccactgtactccagcctgggcaactggagtgacattgtctcaaagaaaaacaaaaacaaaaacaaaacaagctcacaataatcatctcccacctggatggctacaacagccttttcagggctctctctgccatagtcatcatcggtgaagtcggctgcctaagccatctattttggcaagtaatgttagcgcctactcaatgtccattctcctcttccttcttccgtactgacagaactgcgggtttggggtggcagggtgcctcgctgcatactacttactctccaagtctcccctgcagctaggggtggccatgtgacccagttctagagatctggggacagctcttgcctggtaacagaggaaagaagctgctgcctagcccttttggccttgaactatggcagctatattactgacacattaaaaaaaatagcacacaatagcatccaacaaatcrtagcttatcttcttaccctactagtgctcaatcactaacccaagtatcatcaggcaatagagcctaacagccacacatccccatcttttataaaactctaaaacatatgagtcattaggcaaatactagtgtccttctggggtgttgttacccca

SEQ ID NO: 704787 - DNA, 1373 bp, Homo sapiens
gtcactycttcacttttgatttccaaatctcacatgagttcttctttggctaactataacctggaaccacacagggaaggagattctgggaaatgtagttgtaagactaaccaagttgatatagtacaacccagaaccacagggaacaaaaaccccagaaggcaatgaattcagtgtgctcaagagacatacagaaaaaaggtgatgctgaggctcaacaaaggaggggagggtagagggagcatgattagataagcaggcagatcccagcttatgttaggccagctcatggtatgttttgacttaatgctaagctgcaggattttaagcaaggtggcagcattctgtaagttattttttaaaaagattattctagttgtcatggaagttagggaagcaagagaaatgttgagaagaagagccaacagggaaaacagcaggctactgaggtagctcaggaaagagacaatgatggcctggactaggattataaaatacagatattgagaactggtcaggaagccttttagtctcatttctccaacatgttttttcagtgctggaaacatttctctctctatgagatgtaggatccatctgctgcaaggaagatgcagcagaggtaagtggttagggaggatctgggacaaacattgaggactttctctgcaccaagacctatgctgaacctgctcctcacaacaatctggaatgaggaaaatgatgcacggggaggttaaatattatactttaaccagggtcacacagttaataagtagtgggcccctgattctaaccaggatatctcagaatccaggatcttagctccttccagagtcctgttgcctctcaggtgaaggcccttgtgagaattcatgtctaccattagcagctgttatctgcccgaatattacacctgtctggcctctaaagtgtacatcaagtgtacaggctgatgctcttcgttccactctcaaccttcttagagactccacgctgcgtaatgcctccagcccaagtttcctggacccttaaataattcattcagtgtttaggtctccatcataactacttgaggctttacaatatttaaacatatacaattttagggatagaaaagaagacgtgttggcttcctggggacacacctcattggaatagtgttactcttgaggattaggaaatacattgaattctacataatgctttttttttttttttttgacagagtctcactctgtcacccaggctggagtgcagtggcatgatcttgcctcactgcaacctccacctcccgagttcaagtgattctcctgcctcagcctcccaagtaactgggactataggcgcatgccaccatgcccagctaattt

SEQ ID NO: 704788 - DNA, 646 bp, Homo sapiens
tacacgttctttttaataatgataataatccaaaagatattagagaaatatagcataattggcatatactttttaaaagtttgatgtaacaaaaggtatcatgaataaaagtgtgagttaaacaataggttagtagctatacttaaaatttatgcaacaaaaaatagcacatattgttaaaagagcaccatcaaactaattggtcacctcttgagaaaaacaagtcattatcttgaaaaactggtaaataacttaacagactcaaacatttatcttactttcctatgtgaattgaactactgaggsgagtatctcgttattttagctaacaaagcataatgacagaagtagactatcacttgtttacaatctccagtgaatctaggcattgagaatcaatggttgctaacattaaaaaggagataaaagagacagtatatgcctcctgatgaaagaatgagaccccacttataatcttgccaaaaggaacaagtagctgaagtcagatttctgtattcagttgccaatttgtagaatatgcagaaaagaaaataacaatttgaactacatcttaagtaagtagtcagcatagatggaacagattttctggaaagtgagaagatcggatggcctgggttcttcaata

SEQ ID NO: 704789 - DNA, 646 bp, Homo sapiens
tacacgttctttttaataatgataataatccaaaagatattagagaaatatagcataattggcatatactttttaaaagtttgatgtaacaaaaggtatcatgaataaaagtgtgagttaaacaataggttagtagctatacttaaaatttatgcaacaaaaaatagcacatattgttaaaagagcaccatcaaactaattggtcacctcttgagaaaaacaagtcattatcttgaaaaactggtaaataacttaacagactcaaacatttatcttactttcctatgtgaattgaactactgaggcgagtatctcrttattttagctaacaaagcataatgacagaagtagactatcacttgtttacaatctccagtgaatctaggcattgagaatcaatggttgctaacattaaaaaggagataaaagagacagtatatgcctcctgatgaaagaatgagaccccacttataatcttgccaaaaggaacaagtagctgaagtcagatttctgtattcagttgccaatttgtagaatatgcagaaaagaaaataacaatttgaactacatcttaagtaagtagtcagcatagatggaacagattttctggaaagtgagaagatcggatggcctgggttcttcaata

SEQ ID NO: 704790 - DNA, 596 bp, Homo sapiens
cagccaaattgaaattattaaaaaaaaaaaaaaagagagagagagagaaggccagcaatgttgaaagggcagttctgttcttccctggacmactggtcactgataaacatcaggaaaaaacaaagggggatgagatgttattcagatttttcaaattactggtctatgccatgggtataaaagtaaggcagcttaattcagtgtaacagcatacattaatctgaaggcacacagacctttgcccttcagaataaagttatcttctcagagttatattggttaaacacacacaaaatacattcctaaaaataacacaattttctgtaaaaatatggctgaacagctttgggaaagctaaaatataaccttggcaacttagatatggtctcagatatatgcttactaaaatatgagtctaactaaaaagacaaagtctcattaagtacgttatatcccaaaggaagggaaatggtaaacacgtgaaacctgactaggtggagaaggtggtgttaaaaacaagagtcaagaatatgtcagtgttgatcagtatccaggaagaaagccactgggcccaggtgacaagaccgttctattca

SEQ ID NO: 704791 - DNA, 596 bp, Homo sapiens
cagccaaattgaaattattaaaaaaaaaaaaaaagagagagagagagaaggccagcaatgttgaaagggcagttctgttcttccctggacaactggtcactgataaacatcaggaaaaaacaaagggggatgagatgttattcagatttttcaaattactggtctatgccatgggtataaaagtaaggcagcttaattcagtgtaacagcatacattaatctgaaggcacacagacctttgcccttcagaataaagttatcttctcagagttatattggttaaacacacacaaaatacattcctaaaaataacacaattttctgtaaaaatatggctgaacagctttgggaaagctaaaatayaaccttggcaacttagatatggtctcagatatatgcttactaaaatatgagtctaactaaaaagacaaagtctcattaagtacgttatatcccaaaggaagggaaatggtaaacacgtgaaacctgactaggtggagaaggtggtgttaaaaacaagagtcaagaatatgtcagtgttgatcagtatccaggaagaaagccactgggcccaggtgacaagaccgttctattca

SEQ ID NO: 704792 - DNA, 651 bp, Homo sapiens
gccatggccatgcctgggagagaagatggaggtctggaggtctccggaaaccaagagacaggtttccaggagagcaggctgtcaaatgcccagtaccttaccagcattaccctgtccccggttcctctttggcctttgaggatctctgctgagggcatccgagggcacccctccatgtaggcaccgagaagggaaaacttcatgatctgtctccctgatgccaggcacagagcctggctgtcagaaccagtcctcataggcctttgtgcaggggactttcatcacttacagacgaggaggaggctccgagaggttcaggaggcccgggctgcacaggtgatacatgctcagggtggggtgcaacctcatggcagagcctgtgccctttcggaacttcactccagtgccctgttccataccctcagcaatggagacaacatcctctcagctgctctgggctcttcctgcttctccagccctgagggccactctgctctgtgaccgtggggcctgccctggcactcctgggccacccaaccattcacttttgagtgcaggcgatagcttgtctgtcttggtggtgagttttkgcaggacaccacctgtgtctaacatgttgttttaaaatgtgttttaatagctcaaattatg

SEQ ID NO: 704793 - DNA, 1173 bp, Homo sapiens
ggctttcaagtctaccatagatctaataattcccatcttcctcaccagctagcgtatcagctacccactggcaaaaggattctgtgtaagtaccaagtaggtcttgtccaaacccagaggtgtgggggtttatgtgtgagtctctaatttcagagccatatacaaataactttaataatttgctattttaggccatctgtctatctgttctggagtatattaaaagtcaaaaaatcaaatttgatcaacaaaatacattcatgtttaaaaagaagtgtccccctccaaaacggtgaaatagtgtaaactcaaatattaccaaaacattgttgattcataaataagaatgtcatttaatattatactttacatgtcttggttgagggaaataatcaaaaccaatattagcatacatgtcttagttcatttttacattgctgtaaaggaatacctgaagctgggtaatttataaagaaaagagctttatttagttcacagttccgcaggttttacaagaagcacgggcagcttccactcctggtggaaggcatagagaaaccaggttttacagagattacatggtgtgagaggaggaaaagagagaggagaggtttctggcattttttttcttttttaaagaaagaacaaccagcacttgtggwatctaatagaataagaagttgctcacccccaagggagggcattaatctgcccacatgccccaaacacctttcatcaggccccgtctccaacactaaggatcaaatttcagcatgaggtttagaaaggacaaatattcaaattgtagcagtacaactgtggcagaatgctttttccaccacatccccttcctgcagcatgacaccattgtggaagacagtgtggcaattcctcaaggatctagagccagaaataccatttgacccaacaatcccattactaggtatacacccaaaggattataattctactataaagacataagcacatatatgttttttgcagcactgtttacaatatcaaagacttggaaccaacccaaatgcccatcagtgttagatgggattaagaaaatgtggcatgtatacaccagggaatactatgcagccataaaaaaggatgaattcatgtcctttgcagggacacgggtgaagctggaaaccatcattatca

SEQ ID NO: 704794 - DNA, 1577 bp, Homo sapiens
acttcctgatatcctgtggcctagcatttcttaaaatgatctataggggrataattttttttaattttcaattttcatgaactgatgcatttgtgaaacacagtaaacatgaattactagacaaagaaggcctataaaaaataagcctaattttttattagcttcaacagacagaaaataattctactgaatttctataaaggtttctataagtctattctcattgcatatggttaaactgtatgcgacccatgctttgggtagcactgcaaaaaaaaacaaaaacaaaaacaaaaacaaaaacaaaaacaaaacgtgatatgccagtgctcaaatacatgttttgtgtttgggtcagtattcttctactttacatcatcgtcttttcaatctaaatgttctgagccccaatttatatatatatgaaatgcacatattaactcgactcttgtggaattcacaggattttaaatacatttagaagatatacagtggaactttgaaagctataaagagcaaaaatatattaatagttttggcctgaaaattttatcttgaaacagatataagctgatataagcaatgttactaaagaacacttagacttcacacactacactgtcctggtaaattatctcaagtaaactgtttgcaaaatacaccccttgtgagagatatttgattatctatatgttgagtttttagctacatataggatgatctgtgtcaagtttgcctggggaattcctggtctatgtctgttgtctcaactaattattgtgcatctttttcctcttaaaactcttagtttgggcaaagaaattatatggtcatccagtcagatgatagatgctgcaaaaatttatgttattagtaacagaatgggtgctttgatggcttttagccattgattttagaagtaatcagatgcctacaataatttccctactgaaatagtatcaggttgaaaacagacaaaaaaatgatctgtgctttatgaaattaaagccagattttaaaaataaatatttagacaatggagattaataaagaggatagagaaagagactaagacttcaaaagagtaaagaggtgaaatctcaaagaacttgtggtgagtgaattgcctttgatcagttcaaaaatctacgtttggttgtttttgtctattttcttccatttcatttccacttaatattcaggtgaacccaacttgtctcagctttgaaaaaaaggaagaaaaatatattttggggcccttccatgcttgaaaagaaggtgaaaagggagagctggtacccaccaggggaaccaggtgatgtcccgtcatgcagaggaaattcagggagaggactcctaggagaaagccagcctgagtagggtgagtcaaagcttccactaacccgggggctctggcatttaccacctcttgccagatgatgtgatgacctctgaattgtctcctggcttcttccattcttctccctttgaatccatctgctacaaaatcatcacatggatctatcaggttatgacaatcttctacttaaagcctctcagtgactcccatattttcc

SEQ ID NO: 704795 - DNA, 1577 bp, Homo sapiens
acttcctgatatcctgtggcctagcatttcttaaaatgatctatagggggataattttttttaattttcaattttcatgaactgatgcatttgtgaaacacagtaaacatgaattactagacaaagaaggcctataaaaaataagcctaattttttattagcttcaacagacagaaaataattctaytgaatttctataaaggtttctataagtctattctcattgcatatggttaaactgtatgcgacccatgctttgggtagcactgcaaaaaaaaacaaaaacaaaaacaaaaacaaaaacaaaaacaaaacgtgatatgccagtgctcaaatacatgttttgtgtttgggtcagtattcttctactttacatcatcgtcttttcaatctaaatgttctgagccccaatttatatatatatgaaatgcacatattaactcgactcttgtggaattcacaggattttaaatacatttagaagatatacagtggaactttgaaagctataaagagcaaaaatatattaatagttttggcctgaaaattttatcttgaaacagatataagctgatataagcaatgttactaaagaacacttagacttcacacactacactgtcctggtaaattatctcaagtaaactgtttgcaaaatacaccccttgtgagagatatttgattatctatatgttgagtttttagctacatataggatgatctgtgtcaagtttgcctggggaattcctggtctatgtctgttgtctcaactaattattgtgcatctttttcctcttaaaactcttagtttgggcaaagaaattatatggtcatccagtcagatgatagatgctgcaaaaatttatgttattagtaacagaatgggtgctttgatggcttttagccattgattttagaagtaatcagatgcctacaataatttccctactgaaatagtatcaggttgaaaacagacaaaaaaatgatctgtgctttatgaaattaaagccagattttaaaaataaatatttagacaatggagattaataaagaggatagagaaagagactaagacttcaaaagagtaaagaggtgaaatctcaaagaacttgtggtgagtgaattgcctttgatcagttcaaaaatctacgtttggttgtttttgtctattttcttccatttcatttccacttaatattcaggtgaacccaacttgtctcagctttgaaaaaaaggaagaaaaatatattttggggcccttccatgcttgaaaagaaggtgaaaagggagagctggtacccaccaggggaaccaggtgatgtcccgtcatgcagaggaaattcagggagaggactcctaggagaaagccagcctgagtagggtgagtcaaagcttccactaacccgggggctctggcatttaccacctcttgccagatgatgtgatgacctctgaattgtctcctggcttcttccattcttctccctttgaatccatctgctacaaaatcatcacatggatctatcaggttatgacaatcttctacttaaagcctctcagtgactcccatattttcc

SEQ ID NO: 704796 - DNA, 1577 bp, Homo sapiens
acttcctgatatcctgtggcctagcatttcttaaaatgatctatagggggataattttttttaattttcaattttcatgaactgatgcatttgtgaaacacagtaaacatgaattactagacaaagaaggcctataaaaaataagcctaattttttattagcttcaacagacagaaaataattctactgaatttctataaaggtttctataagtctattctcattgcatatggttaaactgtatgcgacccatgctttgggtagcactgcaaaaaaaaacaaaaacaaaaacaaaaacaaaaacaaaaacaaaacgtgatatgccagtgctcaaatacatgttttgtgtttgggtcagtattcttctactttacatcatcgtcttttcaatctaaatgttctgagccccaatttatatatatatgaaatgcacatattaactckactcttgtggaattcacaggattttaaatacatttagaagatatacagtggaactttgaaagctataaagagcaaaaatatattaatagttttggcctgaaaattttatcttgaaacagatataagctgatataagcaatgttactaaagaacacttagacttcacacactacactgtcctggtaaattatctcaagtaaactgtttgcaaaatacaccccttgtgagagatatttgattatctatatgttgagtttttagctacatataggatgatctgtgtcaagtttgcctggggaattcctggtctatgtctgttgtctcaactaattattgtgcatctttttcctcttaaaactcttagtttgggcaaagaaattatatggtcatccagtcagatgatagatgctgcaaaaatttatgttattagtaacagaatgggtgctttgatggcttttagccattgattttagaagtaatcagatgcctacaataatttccctactgaaatagtatcaggttgaaaacagacaaaaaaatgatctgtgctttatgaaattaaagccagattttaaaaataaatatttagacaatggagattaataaagaggatagagaaagagactaagacttcaaaagagtaaagaggtgaaatctcaaagaacttgtggtgagtgaattgcctttgatcagttcaaaaatctacgtttggttgtttttgtctattttcttccatttcatttccacttaatattcaggtgaacccaacttgtctcagctttgaaaaaaaggaagaaaaatatattttggggcccttccatgcttgaaaagaaggtgaaaagggagagctggtacccaccaggggaaccaggtgatgtcccgtcatgcagaggaaattcagggagaggactcctaggagaaagccagcctgagtagggtgagtcaaagcttccactaacccgggggctctggcatttaccacctcttgccagatgatgtgatgacctctgaattgtctcctggcttcttccattcttctccctttgaatccatctgctacaaaatcatcacatggatctatcaggttatgacaatcttctacttaaagcctctcagtgactcccatattttcc

SEQ ID NO: 704797 - DNA, 1577 bp, Homo sapiens
acttcctgatatcctgtggcctagcatttcttaaaatgatctatagggggataattttttttaattttcaattttcatgaactgatgcatttgtgaaacacagtaaacatgaattactagacaaagaaggcctataaaaaataagcctaattttttattagcttcaacagacagaaaataattctactgaatttctataaaggtttctataagtctattctcattgcatatggttaaactgtatgcgacccatgctttgggtagcactgcaaaaaaaaacaaaaacaaaaacaaaaacaaaaacaaaaacaaaacgtgatatgccagtgctcaaatacatgttttgtgtttgggtcagtattcttctactttacatcatcgtcttttcaatctaaatgttctgagccccaatttatatatatatgaaatgcacatattaactcgactcttgtggaattcacaggattttaaatacatttagaagatatacagtggaactttgaaagctataaagagcaaaaatatattaatagttttggcctgaaaattttatcttgaaacagatataagctgatataagcaatgttactaaagaacacttagacttcacacrctacactgtcctggtaaattatctcaagtaaactgtttgcaaaatacaccccttgtgagagatatttgattatctatatgttgagtttttagctacatataggatgatctgtgtcaagtttgcctggggaattcctggtctatgtctgttgtctcaactaattattgtgcatctttttcctcttaaaactcttagtttgggcaaagaaattatatggtcatccagtcagatgatagatgctgcaaaaatttatgttattagtaacagaatgggtgctttgatggcttttagccattgattttagaagtaatcagatgcctacaataatttccctactgaaatagtatcaggttgaaaacagacaaaaaaatgatctgtgctttatgaaattaaagccagattttaaaaataaatatttagacaatggagattaataaagaggatagagaaagagactaagacttcaaaagagtaaagaggtgaaatctcaaagaacttgtggtgagtgaattgcctttgatcagttcaaaaatctacgtttggttgtttttgtctattttcttccatttcatttccacttaatattcaggtgaacccaacttgtctcagctttgaaaaaaaggaagaaaaatatattttggggcccttccatgcttgaaaagaaggtgaaaagggagagctggtacccaccaggggaaccaggtgatgtcccgtcatgcagaggaaattcagggagaggactcctaggagaaagccagcctgagtagggtgagtcaaagcttccactaacccgggggctctggcatttaccacctcttgccagatgatgtgatgacctctgaattgtctcctggcttcttccattcttctccctttgaatccatctgctacaaaatcatcacatggatctatcaggttatgacaatcttctacttaaagcctctcagtgactcccatattttcc

SEQ ID NO: 704798 - DNA, 1577 bp, Homo sapiens
acttcctgatatcctgtggcctagcatttcttaaaatgatctatagggggataattttttttaattttcaattttcatgaactgatgcatttgtgaaacacagtaaacatgaattactagacaaagaaggcctataaaaaataagcctaattttttattagcttcaacagacagaaaataattctactgaatttctataaaggtttctataagtctattctcattgcatatggttaaactgtatgcgacccatgctttgggtagcactgcaaaaaaaaacaaaaacaaaaacaaaaacaaaaacaaaaacaaaacgtgatatgccagtgctcaaatacatgttttgtgtttgggtcagtattcttctactttacatcatcgtcttttcaatctaaatgttctgagccccaatttatatatatatgaaatgcacatattaactcgactcttgtggaattcacaggattttaaatacatttagaagatatacagtggaactttgaaagctataaagagcaaaaatatattaatagttttggcctgaaaattttatcttgaaacagatataagctgatataagcaatgttactaaagaacacttagacttcacacactacactgtcctggtaaattatctcaagtaaactgtttgcaaaatacaccccttgtgagagatatttgattatctatatgttgagtttttagctacatataggatgatctgtgtcaagtttgcctggggaattcctggtctatgtctgttgtctcaactaattattgtgcatctttttcctcttaaaactcttagtttgggcaaagaaattatatggtcatccagtcagatgatagatgctgcaaaaatttatgttattagtaacagaatgggtgctttgatggcttttagccattgattttagaagtaatcagatgcctacaataatttccctactgaaatagtatcaggttgaaaacagacaaaaaaatgatctgtgctttatgaaattaaagccagattttaaaaataaatatttagacaatggagattaataaagaggatagagaaagagactaagacttcaaaagagtaaagaggtgaaatctcaaagaacttgtggtgagtgaattgcctttgrtcagttcaaaaatctacgtttggttgtttttgtctattttcttccatttcatttccacttaatattcaggtgaacccaacttgtctcagctttgaaaaaaaggaagaaaaatatattttggggcccttccatgcttgaaaagaaggtgaaaagggagagctggtacccaccaggggaaccaggtgatgtcccgtcatgcagaggaaattcagggagaggactcctaggagaaagccagcctgagtagggtgagtcaaagcttccactaacccgggggctctggcatttaccacctcttgccagatgatgtgatgacctctgaattgtctcctggcttcttccattcttctccctttgaatccatctgctacaaaatcatcacatggatctatcaggttatgacaatcttctacttaaagcctctcagtgactcccatattttcc

SEQ ID NO: 704799 - DNA, 1577 bp, Homo sapiens
acttcctgatatcctgtggcctagcatttcttaaaatgatctatagggggataattttttttaattttcaattttcatgaactgatgcatttgtgaaacacagtaaacatgaattactagacaaagaaggcctataaaaaataagcctaattttttattagcttcaacagacagaaaataattctactgaatttctataaaggtttctataagtctattctcattgcatatggttaaactgtatgcgacccatgctttgggtagcactgcaaaaaaaaacaaaaacaaaaacaaaaacaaaaacaaaaacaaaacgtgatatgccagtgctcaaatacatgttttgtgtttgggtcagtattcttctactttacatcatcgtcttttcaatctaaatgttctgagccccaatttatatatatatgaaatgcacatattaactcgactcttgtggaattcacaggattttaaatacatttagaagatatacagtggaactttgaaagctataaagagcaaaaatatattaatagttttggcctgaaaattttatcttgaaacagatataagctgatataagcaatgttactaaagaacacttagacttcacacactacactgtcctggtaaattatctcaagtaaactgtttgcaaaatacaccccttgtgagagatatttgattatctatatgttgagtttttagctacatataggatgatctgtgtcaagtttgcctggggaattcctggtctatgtctgttgtctcaactaattattgtgcatctttttcctcttaaaactcttagtttgggcaaagaaattatatggtcatccagtcagatgatagatgctgcaaaaatttatgttattagtaacagaatgggtgctttgatggcttttagccattgattttagaagtaatcagatgcctacaataatttccctactgaaatagtatcaggttgaaaacagacaaaaaaatgatctgtgctttatgaaattaaagccagattttaaaaataaatatttagacaatggagattaataaagaggatagagaaagagactaagacttcaaaagagtaaagaggtgaaatctcaaagaacttgtggtgagtgaattgcctttgatcagttcaaaaatctacgtttggttgtttttgtctattttcttccatttcatttccacttaatattcaggtgaacccaacttgtctcagctttgaaaaaaaggaagaaaaatatattttggggcccttccatgcttgaaaagaaggtgaaaagggagagctggtacccaccaggggaaccaggtgatgtcccrtcatgcagaggaaattcagggagaggactcctaggagaaagccagcctgagtagggtgagtcaaagcttccactaacccgggggctctggcatttaccacctcttgccagatgatgtgatgacctctgaattgtctcctggcttcttccattcttctccctttgaatccatctgctacaaaatcatcacatggatctatcaggttatgacaatcttctacttaaagcctctcagtgactcccatattttcc

SEQ ID NO: 704800 - DNA, 1577 bp, Homo sapiens
acttcctgatatcctgtggcctagcatttcttaaaatgatctatagggggataattttttttaattttcaattttcatgaactgatgcatttgtgaaacacagtaaacatgaattactagacaaagaaggcctataaaaaataagcctaattttttattagcttcaacagacagaaaataattctactgaatttctataaaggtttctataagtctattctcattgcatatggttaaactgtatgcgacccatgctttgggtagcactgcaaaaaaaaacaaaaacaaaaacaaaaacaaaaacaaaaacaaaacgtgatatgccagtgctcaaatacatgttttgtgtttgggtcagtattcttctactttacatcatcgtcttttcaatctaaatgttctgagccccaatttatatatatatgaaatgcacatattaactcgactcttgtggaattcacaggattttaaatacatttagaagatatacagtggaactttgaaagctataaagagcaaaaatatattaatagttttggcctgaaaattttatcttgaaacagatataagctgatataagcaatgttactaaagaacacttagacttcacacactacactgtcctggtaaattatctcaagtaaactgtttgcaaaatacaccccttgtgagagatatttgattatctatatgttgagtttttagctacatataggatgatctgtgtcaagtttgcctggggaattcctggtctatgtctgttgtctcaactaattattgtgcatctttttcctcttaaaactcttagtttgggcaaagaaattatatggtcatccagtcagatgatagatgctgcaaaaatttatgttattagtaacagaatgggtgctttgatggcttttagccattgattttagaagtaatcagatgcctacaataatttccctactgaaatagtatcaggttgaaaacagacaaaaaaatgatctgtgctttatgaaattaaagccagattttaaaaataaatatttagacaatggagattaataaagaggatagagaaagagactaagacttcaaaagagtaaagaggtgaaatctcaaagaacttgtggtgagtgaattgcctttgatcagttcaaaaatctacgtttggttgtttttgtctattttcttccatttcatttccacttaatattcaggtgaacccaacttgtctcagctttgaaaaaaaggaagaaaaatatattttggggcccttccatgcttgaaaagaaggtgaaaagggagagctggtacccaccaggggaaccaggtgatgtcccgtcatgcagaggaaattcagggagaggactcctaggagaaagccarcctgagtagggtgagtcaaagcttccactaacccgggggctctggcatttaccacctcttgccagatgatgtgatgacctctgaattgtctcctggcttcttccattcttctccctttgaatccatctgctacaaaatcatcacatggatctatcaggttatgacaatcttctacttaaagcctctcagtgactcccatattttcc

SEQ ID NO: 704801 - DNA, 1577 bp, Homo sapiens
acttcctgatatcctgtggcctagcatttcttaaaatgatctatagggggataattttttttaattttcaattttcatgaactgatgcatttgtgaaacacagtaaacatgaattactagacaaagaaggcctataaaaaataagcctaattttttattagcttcaacagacagaaaataattctactgaatttctataaaggtttctataagtctattctcattgcatatggttaaactgtatgcgacccatgctttgggtagcactgcaaaaaaaaacaaaaacaaaaacaaaaacaaaaacaaaaacaaaacgtgatatgccagtgctcaaatacatgttttgtgtttgggtcagtattcttctactttacatcatcgtcttttcaatctaaatgttctgagccccaatttatatatatatgaaatgcacatattaactcgactcttgtggaattcacaggattttaaatacatttagaagatatacagtggaactttgaaagctataaagagcaaaaatatattaatagttttggcctgaaaattttatcttgaaacagatataagctgatataagcaatgttactaaagaacacttagacttcacacactacactgtcctggtaaattatctcaagtaaactgtttgcaaaatacaccccttgtgagagatatttgattatctatatgttgagtttttagctacatataggatgatctgtgtcaagtttgcctggggaattcctggtctatgtctgttgtctcaactaattattgtgcatctttttcctcttaaaactcttagtttgggcaaagaaattatatggtcatccagtcagatgatagatgctgcaaaaatttatgttattagtaacagaatgggtgctttgatggcttttagccattgattttagaagtaatcagatgcctacaataatttccctactgaaatagtatcaggttgaaaacagacaaaaaaatgatctgtgctttatgaaattaaagccagattttaaaaataaatatttagacaatggagattaataaagaggatagagaaagagactaagacttcaaaagagtaaagaggtgaaatctcaaagaacttgtggtgagtgaattgcctttgatcagttcaaaaatctacgtttggttgtttttgtctattttcttccatttcatttccacttaatattcaggtgaacccaacttgtctcagctttgaaaaaaaggaagaaaaatatattttggggcccttccatgcttgaaaagaaggtgaaaagggagagctggtacccaccaggggaaccaggtgatgtcccgtcatgcagaggaaattcagggagaggactcctaggagaaagccagcctgagtagggtgagtcaaagcttccactaacccgggggctctggcatttaccacctcttgccagatgatgtratgacctctgaattgtctcctggcttcttccattcttctccctttgaatccatctgctacaaaatcatcacatggatctatcaggttatgacaatcttctacttaaagcctctcagtgactcccatattttcc

SEQ ID NO: 704802 - DNA, 858 bp, Homo sapiens
tcaaaaaaaaaagaatcagtagtatatttattcttttttggtgatctctttaacagtggtgtaattattctggaggctcttttccaccctcacttcctcctttctttcactttgattcaccaaccttgccaggttactcatgattgtaaagaaatgcaatggcagagatagttgtttcctccagtttatataaccatttgcctctccttggctaataccagctggacaaaacttgttttttgggaggagtggggtgatttattcatacttctcccccttggattttgttatgtrtgcttttcatttcactaccaattttcccgtaagatcactgtaaatagtggctggcctggctcctggtaagctccttttttgcctgtttgctactgtatctgcagtgctgtgagcggtgcctagtccacagtgactgcttaacagtccctccccgactcagtgggtgggccttcttacctgtcagcccctccactctgtctcctcagctctcatgcccagcacaacccgcatccatccctacttccaggctgggctcacactgttttccccaccaaacctgattccctcctcttctctgtctaaccaaattccacccatatgactgcacttgagttccgtgtcctccatgatggcttctgagatgacgctcatccacaaagcctaggagtttgtagtctgactgtatctcactataacttgttcggttttgtttggttctttcaggatttcatgagaaatagtgtttgttctcagttctcatggagtttgggcctacgtgaacagcctaggccctatggcagactctcgaatggccagcgtcgtccctcaagagcttggcattgc

SEQ ID NO: 704803 - DNA, 580 bp, Homo sapiens
gataatgttccattttgtaggctgggtggtggccacatggatgtttactttcttcttttttattttttttcttttagacaggatcttgctctgttgtccaggctgaggtgcagtggtacaatcatagctcactgcagtctcaacctcctgggctcaagcagtcctcctgccttgacctcccagagtgctgggattacaagcgtgagccaccttgcctagtctttattattctttaaaccatatatgtaagtaattttatacgtatcactttataaatgcgtgtgtatacacatacctgtacatatattattttctaagtatgagctactttgtaattttctttaaaawtttttttaaaattgacaagtaataattaaacatttatggggcacatagtgatgttttgatacatataatgtagagtgatcagatctgggtaattggcatattcatcatctcaaacattatcgtttttctgtgttggtaagagtcaatatcttccttctagttattcgaaactatatattattgttcactctagtcattccacagtgctatagaatactaagcttattactcc

SEQ ID NO: 704804 - DNA, 580 bp, Homo sapiens
gataatgttccattttgtaggctgggtggtggccacatggatgtttactttcttcttttttattttttttcttttagacaggatcttgctctgttgtccaggctgaggtgcagtggtacaatcatagctcactgcagtctcaacctcctgggctcaagcagtcctcctgccttgacctcccagagtgctgggattacaagcgtgagccaccttgcctagtctttattattctttaaaccatatatgtaagtaattttatacgtatcactttataaatgcgtgtgtatacacatacctgtacatatattattttctaagtatgagctactttgtaattttctttaaaatttttttwaaaattgacaagtaataattaaacatttatggggcacatagtgatgttttgatacatataatgtagagtgatcagatctgggtaattggcatattcatcatctcaaacattatcgtttttctgtgttggtaagagtcaatatcttccttctagttattcgaaactatatattattgttcactctagtcattccacagtgctatagaatactaagcttattactcc

SEQ ID NO: 704805 - DNA, 1507 bp, Homo sapiens
gtttcactgctggtaagaataatagccaatggtacattgccttcccattagagttagaaacctccagagagactatgaaggcaaagcgcgatccacaaagttgctatttgataagggtcattggtaagtatatcgagtttcttctctgctatttcagagggagaatttacaaaatgttatggctgcttatttgccactgaaagaggctgaactgaagatttcatttatgaatatgttagaagctcatattgctgcatggcagctgatagaatatattttaaaatttaaggaagaaaaaggccaagatgcaaacctagctctgcccaggggaggactacctattgtgtaggttcattacctgagtgaataacaggaaactgctcagcttctgtgttaaggctgataagcctgcaggtttattttaaaagtccacatgcagaagatacgctacaactacttccaatattacaaaaagcacccttgaaatgattagctctgaagaatgtttgcactgtctacatatttcagacagcattttaggtgctgaattgaattttacacacacacacacacagacacacatacacaatcaacattatcattatcatcatcatcatcatccttcaatctcaaaagacttcttgtgcaatccagtgcagtaacaggaaaaaatatgacctagtttaagattgttgatagcactttggaagggaatcaacagtgactgcattaaaaaatatatactaggattcacctgatgctgagtttggcatcatttcatgctgctttaaatctataagtggcaagatatcatagattgtttctgctattgatagacttttgatataggtagtttaggaagaaacttttaaccaaagaatctagtatttatttagagtattgttactaatatgcagcaaaagaaccaggtttttctgatttattttataaatactaggttggtgcaaaagtaattgctgtttttgatataacttttaatgcatcaacctaaaatatatcaattattggttattcccaactccttcctttaagctaggaaattttcgtgtgataacaatttatctgatttaatataaccacataaaataaatcagatgaatataaaatgaagtactttttgtcttttttcttcaatagatttgttgttttattctttaattatttgttattcactcagaaaatagtaattgaatttatatttggtttgggaaactgtgaaaagatgcaagacatgccattgtaaacccttgtgaatatagttaaaggaaagtgaaaattgatctcttcttttgcaccatttaaaatatttgatcagcctttcttttaatcaaatttaattcactagactaaagaatgtgactggaataggacaggtttgttaaatgaaggttgaggagcatctagaatattcatacatgtatattggttttgacaaatcacttgaaataatttacaaaygatagtgtgtaagttaatttctaccttt

SEQ ID NO: 704806 - DNA, 821 bp, Homo sapiens
tgcagccccataggcccatgcttaggaaagggacctgacctgaatttcascccctctatgcccgagccagcaccctcgtgcagtgaacaacctacacaactgtatacaatggccacagatgccagggaacagtcagaagggtgtagcgacatttgttgacaaatctgtctcctccatcttaagcaccttgagttctgagttctggagctgcatatccatgtttgtaacctcagtacacataggagatgctcctaatatttgtcgaatggattgttctttggctacttgttttttcttcagactttctgtcttcttgtccttctaaattcataacggcttcctcttaatgcactcctgctagcgttagaaagcactgtgttggctagcttgcctttttttttttttagacagggtctcgctctgtcacccaggcttgaagtgcagtggtgcgatctctgctcactgcagcctccgcctcccaggttcaagtgattcttgtgcctcagcctcctgagtagctgggaccacaggcatacaccaccaagcccagctaacttttatatttttagtagagatggtgttttgccatgttgcccaggctggtcttgaactcctggcctcaagcaatccacccaccttggcttcacaaaatgctgggattacaggcgtgagctaccacgtctggcccactttgactttttaatcctaacatcttaccctctgtccattcaacagaaacttggctatggccacacagctaggaaggcgggcaggcagtgctgggcaggaaactgtcaagccctggggttgtggtccaggct

SEQ ID NO: 704807 - DNA, 821 bp, Homo sapiens
tgcagccccataggcccatgcttaggaaagggacctgacctgaatttcaccccctctatgcccgagccagyaccctcgtgcagtgaacaacctacacaactgtatacaatggccacagatgccagggaacagtcagaagggtgtagcgacatttgttgacaaatctgtctcctccatcttaagcaccttgagttctgagttctggagctgcatatccatgtttgtaacctcagtacacataggagatgctcctaatatttgtcgaatggattgttctttggctacttgttttttcttcagactttctgtcttcttgtccttctaaattcataacggcttcctcttaatgcactcctgctagcgttagaaagcactgtgttggctagcttgcctttttttttttttagacagggtctcgctctgtcacccaggcttgaagtgcagtggtgcgatctctgctcactgcagcctccgcctcccaggttcaagtgattcttgtgcctcagcctcctgagtagctgggaccacaggcatacaccaccaagcccagctaacttttatatttttagtagagatggtgttttgccatgttgcccaggctggtcttgaactcctggcctcaagcaatccacccaccttggcttcacaaaatgctgggattacaggcgtgagctaccacgtctggcccactttgactttttaatcctaacatcttaccctctgtccattcaacagaaacttggctatggccacacagctaggaaggcgggcaggcagtgctgggcaggaaactgtcaagccctggggttgtggtccaggct

SEQ ID NO: 704808 - DNA, 821 bp, Homo sapiens
tgcagccccataggcccatgcttaggaaagggacctgacctgaatttcaccccctctatgcccgagccagcaccctcgtgcagtgaacaacctacacaactgtatacaatggccacagatgccagggaacagtcagaagggtgtagcgacatttgttgacaaatctgtctcctccatcttaagcaccttgagttctgagttctggagctgcatatccatgtttgtaacctcagtacacataggagatgctcctaatatttgtcgaatggattgttctttggctacttgttttttcttcagactttctgtcttcttgtccttctaaattcataacggcttcctcttaatgcactcctgctagcgttagaaagcactgtgttggctagcttgcctttttttttttttagacagggtctcgctctgtcacccaggcttgaagtgcagtggtgcgatctctgctcactgcagcctcygcctcccaggttcaagtgattcttgtgcctcagcctcctgagtagctgggaccacaggcatacaccaccaagcccagctaacttttatatttttagtagagatggtgttttgccatgttgcccaggctggtcttgaactcctggcctcaagcaatccacccaccttggcttcacaaaatgctgggattacaggcgtgagctaccacgtctggcccactttgactttttaatcctaacatcttaccctctgtccattcaacagaaacttggctatggccacacagctaggaaggcgggcaggcagtgctgggcaggaaactgtcaagccctggggttgtggtccaggct

SEQ ID NO: 704809 - DNA, 1032 bp, Homo sapiens
  misc_feature 686, 687, 688, 689, 690, 691, 692, 693, 694, 695, 696, 697,698, 699, 700, 701, 702, 703, 704, 705, 706, 707, 708, 709,710, 711, 712, 713, 714, 715, 716, 717, 718, 719, 720, 721,722, 723, 724, 725, 726, 727, 728, 729, 730, 731, 732: n = A,T,C or G
  misc_feature 733, 734, 735, 736, 737, 738, 739, 740, 741, 742, 743, 744,745, 746, 747, 748, 749, 750, 751, 752, 753, 754, 755, 756,757, 758, 759, 760, 761, 762, 763, 764, 765, 766, 767, 768,769, 770, 771, 772, 773, 774, 775, 776, 777, 778, 779: n = A,T,C or G
  misc_feature 780, 781, 782, 783, 784, 785: n = A,T,C or G
acattgtgtgtatagtgatttctgggcttatagagataaaaggttgtgtttgccttcctgaattcacacttcaggctctgcacaaacctttgataatttctcttctttttttgtagggaaatgttcactgatgaattcatgaatgaaggatgattactttttcccctgatcagggcttgggctgctgtttcacgtgtaccatcttaaggactgtgacacccaaaaaaggctctgccacttagatacaaaggcatttctcctcctctgagcctcagtttcctcaactgtaagactagggtgggggagatttaattcctgacttgcagggtttgcaaagtgaaacaaatgccgccaggctcacagaggcatggtgaagactcaggcgcctccggtactataaagagtgaagatggccttcggctccatgaagggtttcctaagagggcagggacagctccttggtccctgacacaatagcacacactagggccaagagcagggtctcatcacctcactcacaaacagtggctgaggttgacacgggggatccctgtgtgaatcagaactcctaggactctaggtgacagaaactcctctccaactagcctaggggaaactgataaatgcagggtgaagaatgtgcrggtagggtatctccagtaagcccaggggaaacgcggagatgnnnnnnnnnnnnnnnnnnnnnnnnnnnnnnnnnnnnnnnnnnnnnnnnnnnnnnnnnnnnnnnnnnnnnnnnnnnnnnnnnnnnnnnnnnnnnnnnnnnngaattccataggtggaaaacagatactcagtgcaaagtagagtggtgtgaagagtcctgtgcaggaaataaaaagaccacactgctggaagaaaagccgtgtcttgaattaaagagttctcaggttgggtgcaatgattcacgcctgtaatcccagcacttttggaggctgaggtgggtggatcacctgaggtcagggggtcaggagtttgagaccagcctggccaacatggtgaaaccccgtctct

SEQ ID NO: 704810 - DNA, 741 bp, Homo sapiens
tggaagggagcctctgcaggctcagagaccaggccaccgcagctcctgtccctctcagatttcttcggcccacccacaccctagcctgtctctcccctttggccaccaccccagtacttggtttgtgaggggtatataagaggctgcctcgctttgtggaacagggccaggatctcaggttagagaggagacagcatgtgttgagttcccacatggtttcatatgaagactgtgtgttaaygggatcggcatgttctcctgagacccagcattccctgaggtgtctgccacgtggcgtggagggagggaaggctccaggtttctcacccttcatcagcaggaacagcttccttttcgtgtcttaccactgtaatcgtttgtttgaacaagagttttattgctgaaaagacatcacaaacaagttttgaaggccaccaatgacagccccttcctcaagcactgccttcacctcactggcctctttccctaggatccagagggaggctgaggccattcaaagccaccccaacacacaccccacccagcaccaccccctgtttatccccagccatctgtttggcccgacaaccacagcagaacatgagccgggtgaagcctctcccattggccatggaagccactgacatgctcgtctcgcggctgggccatccagtcttgtgatgtggctggatttgggcccagaaggtttcttccactatagatggggccctcccttccctg

SEQ ID NO: 704811 - DNA, 741 bp, Homo sapiens
tggaagggagcctctgcaggctcagagaccaggccaccgcagctcctgtccctctcagatttcttcggcccacccacaccctagcctgtctctcccctttggccaccaccccagtacttggtttgtgaggggtatataagaggctgcctcgctttgtggaacagggccaggatctcaggttagagaggagacagcatgtgttgagttcccacatggtttcatatgaagactgtgtgttaacgggatcggcatgttctcctgagacccagcattccctgaggtgtctgccacgtggcgtggagggagggaaggctccaggtttctcacccttcatcagcaggaacagcttccttttcgtgtcttaccactgtaatcgtttgtttgaacaagagttttattgctgaaaagacatcacaaacaagttttgaaggccaccaatgacagccccttyctcaagcactgccttcacctcactggcctctttccctaggatccagagggaggctgaggccattcaaagccaccccaacacacaccccacccagcaccaccccctgtttatccccagccatctgtttggcccgacaaccacagcagaacatgagccgggtgaagcctctcccattggccatggaagccactgacatgctcgtctcgcggctgggccatccagtcttgtgatgtggctggatttgggcccagaaggtttcttccactatagatggggccctcccttccctg

SEQ ID NO: 704812 - DNA, 1536 bp, Homo sapiens
cccgcagtaaattcactctctccggaggaaacattgacctcactgctgctgaagcccttacttagaacttcctattcatttttgcaattagcaaagattaacctctcaataattcattcattcagggcacagatagttattggtacctttacatgccaggtactgggctttggggctacaatagtgcacagaagagtcatgctcctgtttcctgaagccgatagtctgagagggacacagatagcaacctgataattacacagatagataccaacaatccagtatcaatatgcaagaagagcacagaagagcagacaacagtgcctggagtggtctggggtgttcagggaaggtttgcctgaaatagacgggtaagtgggagttgtctggttgagatgggggtcctgaccccaagtacctagatagtgaccttatttggaaatagggttttttacagagataatcaagttaacatgaggtcattagggtaggccctaatcttgactggtattcttatcaaaaggggaaatttggacacagagacagacatgcgcacaggaagaatgtcacgtgaagatgaaagcagacatcagggggatgctggctgcttacaagccatggaatgccgaagatagtgagccgacaccaggagctaggagagaagcctagaactgacgctccctcacggcctccaaggaaccaaatctgctgacaccttgattttgaatttttagcttccagaacttgagatcacacatttctgttgtttaacccaccccagctgtggtcttttgtcaaggtagccgtagcagacaaactcagttttccagcagaggaaactgcacatgcaaaagccctggaagtgagggcaggggaggcgggtttgagaaaagaggccaccctggctgaaatgcagagtcaaaaattccttcatccagactgacagggaagcagatcagtgtgggcacctcaggcgactattaaaatagcaataaaaataactacctcgaaggtgtgtagagtgtaccagataagcctggggaggcaggaagtgactagagctatgcaggggcttccctgtaggggtagaagtggagcctttaaccttaagacagaggagaagctagcagggtacgcaggcgacctagagcctcgtttgaggtgtgtgactttgggaaaatggccgtctgtctctgtgccttagttcttcgatctcttcccttatctgggacattctgtgaccatatgactagcagtgtgctctgtgttgctgtctcctgtgtggtgagccggtgcgaaggaagagaaaagaatgaaaatagcattggacacagttgtggatyttatggaacttatagtctagttggggaaatgacattcattcgggccagtgcacaatggaagtgctaagtgtgtgaagtggacaatgtcagacattttgaagggctaaagtggtggcttccctcatggggggtctcgaagtctagtgggaccccagatacaatttctcggtggttttttttttttttttttttt

SEQ ID NO: 704813 - DNA, 1536 bp, Homo sapiens
cccgcagtaaattcactctctccggaggaaacattgacctcactgctgctgaagcccttacttagaacttcctattcatttttgcaattagcaaagattaacctctcaataattcattcattcagggcacagatagttattggtacctttacatgccaggtactgggctttggggctacaatagtgcacagaagagtcatgctcctgtttcctgaagccgatagtctgagagggacacagatagcaacctgataattacacagatagataccaacaatccagtatcaatatgcaagaagagcacagaagagcagacaacagtgcctggagtggtctggggtgttcagggaaggtttgcctgaaatagacgggtaagtgggagttgtctggttgagatgggggtcctgaccccaagtacctagatagtgaccttatttggaaatagggttttttacagagataatcaagttaacatgaggtcattagggtaggccctaatcttgactggtattcttatcaaaaggggaaatttggacacagagacagacatgcgcacaggaagaatgtcacgtgaagatgaaagcagacatcagggggatgctggctgcttacaagccatggaatgccgaagatagtgagccgacaccaggagctaggagagaagcctagaactgacgctccctcacggcctccaaggaaccaaatctgctgacaccttgattttgaatttttagcttccagaacttgagatcacacatttctgttgtttaacccaccccagctgtggtcttttgtcaaggtagccgtagcagacaaactcagttttccagcagaggaaactgcacatgcaaaagccctggaagtgagggcaggggaggcgggtttgagaaaagaggccaccctggctgaaatgcagagtcaaaaattccttcatccagactgacagggaagcagatcagtgtgggcacctcaggcgactattaaaatagcaataaaaataactacctcgaaggtgtgtagagtgtaccagataagcctggggaggcaggaagtgactagagctatgcaggggcttccctgtaggggtagaagtggagcctttaaccttaagacagaggagaagctagcagggtacgcaggcgacctagagcctcgtttgaggtgtgtgactttgggaaaatggccgtctgtctctgtgccttagttcttcgatctcttcccttatctgggacattctgtgaccatatgactagcagtgtgctctgtgttgctgtctcctgtgtggtgagccggtgcgaaggaagagaaaagaatgaaaatagcattggacacagttgtggattttatggaacttatagtctagttggggaaatgacattcattcgggccagtgcacaatggaagtgctaagtgtgtgaagtggacaatgtcagacattytgaagggctaaagtggtggcttccctcatggggggtctcgaagtctagtgggaccccagatacaatttctcggtggttttttttttttttttttttt

SEQ ID NO: 704814 - DNA, 628 bp, Homo sapiens
gatggttttaattttttctattatacttaatgtgatgatcactctcaaatattaatctttggcatgtctttatttgcttggggtatattttgagaagtgaaagtgcttagtgaaaggctatacccattcttaaggtttttgatacatattgccaatggccttgcaaaaaaagttgtattaatttagaatcccaccagcagagcatgaggcatttatttcctggatcccctgccaacacccagcattatggttctttttcatcttagctaatctgaggagtgaaaatggtgtttcttttttgttttaattaatttattcttgaagccaacatttctgaagatagaatgtcacccaccttctcaattacatgattgcatatgccagtagttatacctagaattcattattacatgtrttttatagttatgtcattttacagtaggtaaaactaatctgtttagacaccaaaaaaagctgtatgatctgctgagataatacagatttatgtaaattaaacatggagcctatcttatgccttatatctgagaaaatataaaagacaatgaaatttaaaacatacttttgtgctaaaagaggaaggagtgagatagctggaaggtaatattac

SEQ ID NO: 704815 - DNA, 841 bp, Homo sapiens
ttaacatattgcaggcattaacaaatattaatttcttttcccttgtaaactgttctatgattaataccacattttcccaggccatcccaacctgaaggtaaaaaggggaccacaacagcagcataaatgtccgcagcctcttgcatggggccttataagttccgttcaaagcaattctcccaaatttgtagagtgcccaggattgtctcacacacgctgataagcacagcattcttcgctcacacacagagcttgccttctttgtctttgccttgactgttcatgaccctttgctgggactgggattgctaatcctggtaaggccaatgcaaagatgtcaagaaccttttgatgactttgggaagttgggaaattccctcctaccactgatagcttccacctcctgccacttaggctagatgttttatagagccagtgccattctctgggccaatccacagtgtgccaaaaccactttgtttccttccctgatgtgtcaagatctattttctgtctttatattaacattaattgttttagtttgtattttcagccactttcttcttggggacctaattatgagttcttagggcctgggccagaggaaaatttgactaacggatatcacaccaaaaacctgctctccctcctaacactgaagctttattagaaggccaagcttttatgtgaatgcctgtcttctctgaggataagtgattttayaagagttattttcaattcctcatgccagtcaccctccctcctcccagtccccttagggccacctcagcagtcttccagatgttctaaggtaaatactcctgtgttctagttgagaatc

SEQ ID NO: 704816 - DNA, 757 bp, Homo sapiens
gaatctcctgcctcagcctcccgagtagctgggattacaagtgtgctccacacgcctggctaatttttgtgattgtagcagaggcggcgttttgccatgttggtcaagctggtctcaaactcctgacctcaagtgatccacctgcttcggcctcccaaagtgctgggattacaggcgcaagccaccgcgcctggcctatgtgtgcaattcttaaagctgttatgggagaaaggaacccaaatgaaaattgagtgagtactgcaagcctttgaataatgagatagatctattggatttcaatggcaaagctgcaggtaactcactaatgaatcatctattacatacatttcacaataacarcaaattcaatattttgggaagcagggaataacccacaaatcatgtaaatgatttcattctgtattttgaatgttattgaaataagtcctcttaccatactcttcaatattgacaagtattatctcaaaaattctctagcttataggtaatggctgacccctttgggcagctgatcgtgacggttaacactttgttctttccattacattggaggatgaatccttcttttattcagagaacagaccctttaagcaagagaaaactaatgaaacatcaggaaaacagtctgttttagaaattctaacttaattctctctgtgacagaagcaacagcttgattttcgttttgtcagcttcagcattggctgtcaaaggcagctctggaattagcatttcc

SEQ ID NO: 704817 - DNA, 590 bp, Homo sapiens
aaaatttgcttcaactctgtgtactgaactcatacttttaaatactgattttgcagtctctgcatttaaagcaacacactagaaaatcatgctcccaccaaaaacatgtaaaaatgtaaagatgaagaaaacaactttatgttttatggcatttacttcaaaaatctgattaagatagatgtctttagctcataattcttcaatgtcaygttgtcatagttcccatcagcaagatgttttaaaggctttcgattaatattgcatgccagaactgaaattacatcctttgtcgtttagctcttaatggtgcaagtgatatctatcaagtactgttttatgaagtgtgtgtgatttttattgcaggctgttttcacaaatctttttcaggtttcagaaaggcggcttagggtttaaaacaaataagcccttctgttgaaaatcttgatgattcttaaaactgcagtaaaacttatattactatttatcaataaaaaatcatctatttggaatctgttgcattcacatttgcacactgtcttgaatatatttgctttaacccatattttagtaaaacacagtattataattta

SEQ ID NO: 704818 - DNA, 590 bp, Homo sapiens
aaaatttgcttcaactctgtgtactgaactcatacttttaaatactgattttgcagtctctgcatttaaagcaacacactagaaaatcatgctcccaccaaaaacatgtaaaaatgtaaagatgaagaaaacaactttatgttttatggcatttacttcaaaaatctgattaagatagatgtctttagctcataattcttcaatgtcatgttgwcatagttcccatcagcaagatgttttaaaggctttcgattaatattgcatgccagaactgaaattacatcctttgtcgtttagctcttaatggtgcaagtgatatctatcaagtactgttttatgaagtgtgtgtgatttttattgcaggctgttttcacaaatctttttcaggtttcagaaaggcggcttagggtttaaaacaaataagcccttctgttgaaaatcttgatgattcttaaaactgcagtaaaacttatattactatttatcaataaaaaatcatctatttggaatctgttgcattcacatttgcacactgtcttgaatatatttgctttaacccatattttagtaaaacacagtattataattta

SEQ ID NO: 704819 - DNA, 2291 bp, Homo sapiens
tcttagtcatcattcctgatcatactatagatgctgctcttactggcttgaattcaaacacgtatgattagtcaatataaccaattcattgccagccctaatgttcattaacttaatctcatttttttgcaatgaaaaacaccacctactctgctgccaggaaactgactcaatctcatttatatcatgcattccttttaattggccttctctctctagatagatgcctgtgacccaagcagtaaatgccctgagactactccttcaggtcataaccctttgataacttatttcttgaagcaatgtatcccagcacaacaaggtttattgcttaagcacatgtacacctatatgtttattcacttggttctacccagggaatcagattttactacttttctgctcaaagcacacctacgactttttatcacacctaaaaccacatacatattatttccctggctcttaaaacccaagtggctactaggtgcatctgatcctttaccacaaccctgctggctttcttgaagttcttcaaatacactgcagcccagggccttttcactttctactttctctgcctggatgctcttttctcagatattcattggatccattctcttacttcatttaaacctcaacttcaatgttagttcctcagaactaacctttgctaaccacactatttgaaatagacagtgagtctctttccagtctttctgagtctcttccagaggctccttctgagtctttttgcagtcttatttgctctgctccatttttcttagaatttgtcacaatctaatattgtgtttgatcctttgtttattgcctctaatcctcactgaaatataatacactctataaaggaagacactgatttcttcaatagtctagcctcagtgcttaaaactatgctttgtatgaatacacagtaagaattcaataaatatttgctgaatgaatatttgaatttaatgaccttcaacaggaaacaatattctgagtgaagtagcatagcarttaagagaattttactaaagagaggttaagaatgagtgggaaaggataatgactgaacaggacctcttaaaattaaggagtcaggctgatgaaagtaacgacaaaatattcatgaaaaagccatgaatcaggctgactacacactttagctttcaatcatcagaggaagcatatctgctctgtttagttaattcctttacccaatgatcttatagacatattccattctttcattttatttcaatttatctgtattatatttaattaatatttatttcataattatatttatttcatttatttcaatttatccatattatatttggactccaaatttggttcatgaaacaatatatatgcatcattatatatgcgatgattagtgtaatatgctttcaattttaaaatcctattgagaaagacatctgaaaatgttttttaatgaaaaataatgaaccatatatatatatacacattttaggtattttatttatattttaatagcatagtatattcttcatcataatgtttctattcttttaaatgtaagtattttgttttgtaaaatttagattgtgtcatttgcagaattctttaaatgtgttaaaaattagcaaattgcacatttattaagagtgaattttgtgtgataccttgatacctttataaatcactttgaaaaattaatactcatgcttggtattagatcattacatcagaattctgaggtcattttcttcttgaatcttgcacatggtttgactgtttgcacagacacacacagaaatacagattaaatttctcaaaaatgtcagttaaaacaaatttttactatttccctaaatagtgtgaattgtgccagaaattgagtggtttgtttattaacttatggtttcctctggatggctgtactgtagctactatgacctgatttctaaaagagaaaactttaaactagttcaactaaagccttactttcttcaactgatattctctccaaactgcctttctctgcttatacaccagtgagctgcttgtcctgatgtagcatttccaggcatcagctatttagtattttgtcttttagttcaaattctcactcacagggatctcactgactcctggctaaaggaggaggagaaatcacaagcacatcaattgctccctcctgatccaatcagtttgtgtcttgattgtggcttcctatggcctcttaagcaagatcttcaacacagcaatgtcatgagggctggcagacactccaactg

SEQ ID NO: 704820 - DNA, 601 bp, Homo sapiens
cactgcactccagcctgggtgacagagtgagactccatctaaaaaaaaatgaaaaacagtagggatacgtctgagcaatgtgtcctcaggcaatttgtcattgtgcaaggrtcatagagtgtgtttacacaaacctacatgaaataccctgctacacccaggctgtgtgggatagcatagtgctcctaggtaacaaatctgtatgtcatgtaagtgtactaaatactgtgggcagctgaatcaccatagtagatgtttatacagatgaacatatctaagcatggaaaaaatgcagtgaaaatacagtattataatctaatgagacctttgtcatgtatgtggcctgttgttcacccaaatatcaaaatgtgcatgattctattcaagttgctgaaaaaaaaagccaaaaaacttccaaataaatatcttacagggattaaagcttttcttcagtaatgcaggatgtttgagaagtttcccaaaaaagtaaaaagtcgacaagttcatcaccactaggccggccttacaggaatgccaagtgtctctggcaggtttcctgaacaaggaagtagctgcatcagctccactctgttatctgcca

SEQ ID NO: 704821 - DNA, 1012 bp, Homo sapiens
tacagaatatagaaagagacagatattaaggaatcacactaacaagataaaattattttttgatatgagctacatagaaaaaatgcaagatatatagaatctgtttcatagtgagacctaatttagattgaaggggccaatgaaagcctccttgaggaagtgacatttaaggagccctgtagactaagtagagattagaagggaatggggaactgagaatatttcaggtatgccataatgtggtcctggatttggtaattggctatggtaatggaaacagagatgaaattaataaagtcttgttaattcttcctccaagagtcagtgattctcattatattaggcataggtatagtaaagagctgataataagaagactaagatgtccascttttttatggttccacagagataaagaaaaataaaagataatgagttaaggttttgatgttagtgttttaggtttgaggggagtttggggtgtagcatgaaaaacttagatttgaatgtattgaaattgataaaggaattatgggcctatgctggaggatataaaggagaaagagctgacatttccaacgcccactgtgttccagacccaagatagaagctgcacatgtattttcttatttcttacttaacctaatactctatgaagaagtagggagttctggaggaacaaatgtgaagaagtgatcaaagaaagagaaggataaccaaaataaaatgatagtgtggaagaaatacaaaaaggaagtcttaagaataggaaagtggtccacaaggtcagaaagcaccgattgttttaccaatactttgtattgtttcattttgtctcgcatatgcaatcaatgaaattccacctctagttggcaacagttgtcaaattcatccatgtatgtttcttaatttgtccaataatctttaatgtgcaaccactatgttccggtactatagcagtcattggcacaatccagtagtgaaaatcccagctctcatggagctcacagtt

SEQ ID NO: 704822 - DNA, 1012 bp, Homo sapiens
tacagaatatagaaagagacagatattaaggaatcacactaacaagataaaattattttttgatatgagctacatagaaaaaatgcaagatatatagaatctgtttcatagtgagacctaatttagattgaaggggccaatgaaagcctccttgaggaagtgacatttaaggagccctgtagactaagtagagattagaagggaatggggaactgagaatatttcaggtatgccataatgtggtcctggatttggtaattggctatggtaatggaaacagagatgaaattaataaagtcttgttaattcttcctccaagagtcagtgattctcattatattaggcataggtatagtaaagagctgataataagaagactaagatgtccagcttttttatggttccacagagataaagaaaaataaaagataatgagttaaggttttgatgttagtgttttaggtttgaggggagtttggggtgtagcatgaaaaacttagatttgaatgtattgaaattgataaaggaattatgggcctatgctggaggatataaaggagaaagagctgacatttccaacgcccactgtgttccagacccaagatagmagctgcacatgtattttcttatttcttacttaacctaatactctatgaagaagtagggagttctggaggaacaaatgtgaagaagtgatcaaagaaagagaaggataaccaaaataaaatgatagtgtggaagaaatacaaaaaggaagtcttaagaataggaaagtggtccacaaggtcagaaagcaccgattgttttaccaatactttgtattgtttcattttgtctcgcatatgcaatcaatgaaattccacctctagttggcaacagttgtcaaattcatccatgtatgtttcttaatttgtccaataatctttaatgtgcaaccactatgttccggtactatagcagtcattggcacaatccagtagtgaaaatcccagctctcatggagctcacagtt

SEQ ID NO: 704823 - DNA, 1012 bp, Homo sapiens
tacagaatatagaaagagacagatattaaggaatcacactaacaagataaaattattttttgatatgagctacatagaaaaaatgcaagatatatagaatctgtttcatagtgagacctaatttagattgaaggggccaatgaaagcctccttgaggaagtgacatttaaggagccctgtagactaagtagagattagaagggaatggggaactgagaatatttcaggtatgccataatgtggtcctggatttggtaattggctatggtaatggaaacagagatgaaattaataaagtcttgttaattcttcctccaagagtcagtgattctcattatattaggcataggtatagtaaagagctgataataagaagactaagatgtccagcttttttatggttccacagagataaagaaaaataaaagataatgagttaaggttttgatgttagtgttttaggtttgaggggagtttggggtgtagcatgaaaaacttagatttgaatgtattgaaattgataaaggaattatgggcctatgctggaggatataaaggagaaagagctgacatttccaacgcccactgtgttccagacccaagatagaagctgcacatgtattttcttatttcttacttaacctaatactctatgaagaagtagggagttctggaggaacaaatgtgaagaagtgatcaaagaaagagaaggataaccaaaataaaatgatagtgtggaagaaatacaaaaaggaagtcttaagaataggaaagtggtccacaaggtcagaaagcaccgattgttttaccaatactttgtattgtttcattttgtctcgcatatgcaatcaatgaaattccacctctagttggcaacagttgtcaaattcatccatgtatgtttcttaatttgtccaataatctttaatgtgcaaccastatgttccggtactatagcagtcattggcacaatccagtagtgaaaatcccagctctcatggagctcacagtt

SEQ ID NO: 704824 - DNA, 1767 bp, Homo sapiens
cacaggtcaactgaccagcctgtcctcttttcctgtatcgatttagtgacatacttattactgtcttcttagaaacttgctcgaatcgagtagcccttgggattggcaagtatttgacaaaatcagttcctcttctacttgtgaaatgaaacattgtctgccagccagtccctctgtcattcctcagattccaagtgatgccattgataggaaatgtccagacagacaaatccgtaaacacagaaagtagattcatagttgcctaaggctggagggcgtccagggtttcttttttgtgtaatgaacatgttttaaaattgattgtagctctatgaatataataaaaaccattgaactgtatgctttgaaggggtgaattttatggcatgtgaattgtaactyaaaaacggttttttaaaaaacaccaatatataaaatacatacaatttggcatttaagtcccagaactgggtgtcatcggtgatccaggggttgctggggaggcagcctgacatgatggcatcgttggatgagaactgctcactgtatttcacaatcctgaaaaggaaacagaaaatgatttcctagaagctcgacacccaagatatgacatcaatacacaggtcaactgaccaggctgtcctcttttcctgtatcgatttggtgacatacttattactgttttcctagaaatttcctcaaatcaaataacccttgggattggcaggtatttgacaaaatcagtcccaattctacttgtgaaatgaaacattgtcttccatccagtccctctgtcattcctctatacctattactttttcttttttttcttttttttttttttttgagacagccaagctggagtgcagtggcacaatcttggctcactgcagcctccgcctcccaggctcaagcaatcctcccacctcagcctcctgagtagctgggatcacagacgcgcaccaccaggccaggctaatttttttttttttttgtatttttggtagagatagggttttgccaagttgcccaggctggtctcaaactcctggggtcaagcgatccacctcagtctcccgaagtgctgggattacaggtgtgagccaccatgcccggcctttctgtatctatttcattaaaatatggcctgtttatattttatcaataggtttttagattcaaaccaacttggagtgttcaaacttgtgtctctgcacccatcttaaaagcccaaagttgccacagactccaagactcttgccatgttgggttctaccctttctcaggataatgcctgggtttggaaacttaggcccattatttaaacctggggcttaattggtccaaacacactatttggaggaagagctaattccttctcttctagctattatggaaatacatactgtattattattaactacagtcatccttcagtgctacagaacactatctagctgtaatttcgtaactttttttttttttttgagacattgtcttgctctgtcactaaggctggagtgcagtgatgcaatcatggctcactgcagccttgacctccccagctcaagccgtcctcccacgtcagtgtcatgatgagatgggaccacgggcatgtgccaccacctggctaattttttttattctttgtagagatgtggtctcactatgttgcccaggctggtcttcaactcctagactcaagcaatcctcctgcctgaaacttcccaaagtgctgggattataggcgtgagccaccgctcccgg

SEQ ID NO: 704825 - DNA, 1767 bp, Homo sapiens
cacaggtcaactgaccagcctgtcctcttttcctgtatcgatttagtgacatacttattactgtcttcttagaaacttgctcgaatcgagtagcccttgggattggcaagtatttgacaaaatcagttcctcttctacttgtgaaatgaaacattgtctgccagccagtccctctgtcattcctcagattccaagtgatgccattgataggaaatgtccagacagacaaatccgtaaacacagaaagtagattcatagttgcctaaggctggagggcgtccagggtttcttttttgtgtaatgaacatgttttaaaattgattgtagctctatgaatataataaaaaccattgaactgtatgctttgaaggggtgaattttatggcatgtgaattgtaactcaaaaacggttttttaaaaaacaccaatatataaaatacatacaatttggcatttaagtcccagaactgggtgtcatcggtgatccaggggttgctggggaggcagcctgacatgatggcatcgttggatgagaactgctcactgtatttcacaatcctgaaaaggaaacaraaaatgatttcctagaagctcgacacccaagatatgacatcaatacacaggtcaactgaccaggctgtcctcttttcctgtatcgatttggtgacatacttattactgttttcctagaaatttcctcaaatcaaataacccttgggattggcaggtatttgacaaaatcagtcccaattctacttgtgaaatgaaacattgtcttccatccagtccctctgtcattcctctatacctattactttttcttttttttcttttttttttttttttgagacagccaagctggagtgcagtggcacaatcttggctcactgcagcctccgcctcccaggctcaagcaatcctcccacctcagcctcctgagtagctgggatcacagacgcgcaccaccaggccaggctaatttttttttttttttgtatttttggtagagatagggttttgccaagttgcccaggctggtctcaaactcctggggtcaagcgatccacctcagtctcccgaagtgctgggattacaggtgtgagccaccatgcccggcctttctgtatctatttcattaaaatatggcctgtttatattttatcaataggtttttagattcaaaccaacttggagtgttcaaacttgtgtctctgcacccatcttaaaagcccaaagttgccacagactccaagactcttgccatgttgggttctaccctttctcaggataatgcctgggtttggaaacttaggcccattatttaaacctggggcttaattggtccaaacacactatttggaggaagagctaattccttctcttctagctattatggaaatacatactgtattattattaactacagtcatccttcagtgctacagaacactatctagctgtaatttcgtaactttttttttttttttgagacattgtcttgctctgtcactaaggctggagtgcagtgatgcaatcatggctcactgcagccttgacctccccagctcaagccgtcctcccacgtcagtgtcatgatgagatgggaccacgggcatgtgccaccacctggctaattttttttattctttgtagagatgtggtctcactatgttgcccaggctggtcttcaactcctagactcaagcaatcctcctgcctgaaacttcccaaagtgctgggattataggcgtgagccaccgctcccgg

SEQ ID NO: 704826 - DNA, 1090 bp, Homo sapiens
tctyaataatatacaaaccaaatttctcagctgatatatttaatgatgattttctaactgggatctgaaaatccagctgtgccatacccactgctttcttatgcctctccctcttagtgactaagattctttgatatgaatttaggtcatcctgaaatataataaattttggttaccttatataaagttaaagttggagaatggactaagattttaaaatagctacaaatgtaaggtgaccatataaatataacagagaactagtacaaatttaaaaaaaaaacataaccatagactactctaacttctatgatttagaatccagcaccatatagtttgaatttgtttactaaatgttctaaattgtaagagaaatctgatctcaaataatctccatagactataagcagttaagtctccccatttgctaagccattttagccatctatcttgaacaattaacttccccctcctgctactcccttcccccaacacacagattcatctttggattttaaagaatgacataatgaactttcacattagggtctattaactttgataaaggagatgctcaaaaacatcaataaacactttcaactactatcttgtgatgacaaaccataatacttggtcttgataatctctcaaataggtaagtaaagccagaaattttaaattaggagaaataaaagaaaggacataaaatatctccaaagaaacagaaatgccaaaatcattttaaaacattcgtaagaatgagaatacacattttctactgtcataaatctaacaaagctaaaaagctctcttctgagactccctctccttatttcggtctgcactttccatctgatgacagcattttctggatacaaggaatatttctctcatcacagaaactgcctgacttgtaatctaagagaaacaaaaataattcttagctcttagatccaatatcctagcaatgttgaaaaaacaactccctaagatgttaagatgtttctgaaactgattgtctctcattttccaccaaacacagaattaatcagggtctatattcttgatactattctatttaggaaacagc

SEQ ID NO: 704827 - DNA, 3733 bp, Homo sapiens
tgagatgtattgatgagtgaatgttatcagatttcactatctcaacactatttatgaaatattttattcttgcctcctttgttcatccacctccctgaatttcaaggagaatttggttgtgtgtgcttagttcctgggttcttaccatgtagaatcaggaaacaggactggatagaccaaagggaagaggaaaaagagcaaatggtgaaagccctgttttgaggagaaaagagaaaataggacttgatgtagttgtggggtataaattgaaattgagtaaattttctttaagatttgtaagtacaaattttgaaattgtcttaaaaattacttcagaatttttctaaaattagacccttcatcaaatgtgaaactgaacagagactgggctctatgaaacatcaggttttattaggtggatgtgctgcatacgcatgcttatgaatgggaaagaggtttagtgcaatgtggaaaataatctctggatttggaatgagaatatatgattcttgcttttgacacgcaatagtggcataatttttgattagcccctctgatttctctgactccctatcacctcaatgtccttatgaattaatgtggatatagtacctaacctacatactccattgggtcaacataaataataaataagacatgaaagtgctgtgaaaattataagaatttatccagagtttcacaatggcaataataataagtgatgttaatattttaaaaattgatacataatatatgtacatatttttgggctatttgtgataatctaatacatttatataatcaaattaaggtaattgggatatctatcaccttaaatatgttgtgttttccttatgctaggaacatttaaattattatcttctagctattgatgttaatattaacaagaatatctttgaattttttaaacattataggattatatacttagcgacttgtaagaaatgatagttgatgatgacaataagaaggagataacaaaaagatgagctccgtcaagttttagtggcaatggctccaatttagagaaaacaaactgctcattaggaatgactctaaacttggcaagagtacaatttaaactcatcacgctttctttttaacattattcttatatgtgtgaattcttattgttctatctggaaatgccacagttcagtccctgtattttctgattctgtcatgctgcaaaatcgtgtgatagagggatagctaataaattatttgacaggaagtatagaaaaaaaagcctttgtaattcacagttctgacataatgaaaagcttataattcactagtgtgacctcacagctgtgaattacaagtttcacttgacttgttcacaatttgtctttgaatttatactatgaaaagtgggaaccatattgtcaaactgtcactccatattgatatattactgctgaagattaagaaacattttgtcaaagagcaggaacataaaaatactctgaaagaagatgaaatctgatacaaatgtgagggagagtatgaagaaataaatgcctgcaaaaagacagcatgcagtgtttgcatctgtccagggacttgcttttaattcccccattcaatagcagcaaactcctatataacactcaatatctgccaggcactcttctaagcatgttagatataaactcttttaaaacacaagaaacccctagaagtagctactattttatttctatctgtatttatagatgtacagagaggtgaatcaatttgcctaaggtcacatagctagtaagtggcagaaccaggattcaaagtcaggcctcatgcctccagaggccatactcccaagcttcttttccacttggcccggttagaatgttattaaagatagagttggctgagtctatgccaatcttgtatccttaacatcactttaaaaatctctttgctagaacttttttttgatagtgttgtgtcaaaagagtggagagcaagaaagagaatcattttacttgtttagatccatgatagatgaaggttctctatattgcgcatatatctagtattcttttaaacctttcatgaatctttaaataaaatatgcaaagcagattgtcattctgatagtacttttccttgaaaccttatttttaaaaattcaaacttacagaaaagttttaaggataaatctcaaaactgttgtatactttaacccagatttgtgaattatttacattttgcctcattttcttgtgcacttgtgctctctctgtctctccctctttctttctctgtcttcagaattatttgaaactaagaggtaaagtgcctccttattcccaaatatttcagtgtgtattttctgaaagcaagaacattcttctgagataatcacaattaaataatcaaaaataggaaattcttattgatgcaatactaatatccaatccacagtccataaccaaattttgtcagttgtctcaatagtgctctttataactatttttcttcattagagaaggagacttcttatacatttccaaaatgacaaaagtctaamtaggggaacagattagtgattgctgggggttaaggatagtttggcatgggggaggggagagtgaccataaaggggtagcatcactgagagctttggggtgatgaagtggttcaaaattttgactatgatggtggttgcacaaattctattatgttaacatcttcaaaaacttatcaatagctggatgtaaaagtaatggatgaagccagaacaaataaatgaacagaataccaatgctgtgatgatgacttctcagatgtagttaaatcgattttctctcagcccagaaggttcccacagagtgtctcagtgggttcatcaactacacatcttgtctctaggaaggcatctgcctttttctctggactgctccggcttactctggttttctttcttcccatgtgtgtgctgttatcactgtgatctgttgcccagccatctatcaggctgcctcacaggactagaagtgatgatctctttgaactcctctttaacccagatatagactggttggctctcttgctgcagccactgcacctattctgttctcctacacattccaaaagcacccggcaggtaaccttcacctccacttataatatgcatcattatatagtttaaaaatcaacctgctttgggctctgaatagttcatagatatttcagtaagagttcatgtagtttgtactggcttttaatagaaactctcttccataattcagatttgagtccataggtcaatgactatgaataatagacaccatattgtacctcagattgcccttcctcaaattttattctctccccttcctaatctcttctcaaaattattgccaattatccattcagtggacacttatggaatactttatcttaaaatttaactttgttagtagtccctgaacaaaattacacacatctgagatggaaatttacaatatcatctaatttctgcctttctacttctatctgttacagtgctactctggggattctattctgctgtgaactaggattccttgcttttctctaaagaagcttcacttgttcctccttttttgccttgctcaagctcttccattactccaatttctctttcccgagcagctgtaaaattccactcatctctggttgccgacctgtgaagtcatcttttccaatgatgcttgcctgatgtctt

SEQ ID NO: 704828 - DNA, 1097 bp, Homo sapiens
tgtgttaaaagggtgtgaattccatgggagtagacactctccagggttcttttgagctctaaagtcctgtaattctgaaaagaacagccatgcgcaaaaagagttgtattgaatattaataaacaatctctttttattctctttgaaaacaaattaagggataaaaggttcctttgttacaaatacacgttagatttaggaagaaaatgtagggttaagtacaatatcagatttttatttcaagtcgttttataagcatcactttttatatctgcaaagtttttgtttatcaagcttcctgatatgcatacaactctactcgctggcaaatttatggttttttttcacatccaaggaaaagatatgtaatagtttaattaaatctccccctacttactctatcatggtgcttcttaaccatacattttccctttttctgctgtctgtgggatgatagaaatgacagaaaggagagatactgcttgggctgtgcaaatgcctggatataaattaatcttaaattaatctggaaaacactaaattaaactaatatttaataagtttaacttttgggaagtaaattgtgatttgctccagtattttaaagtaggtggctgcagtagtgtagggtctgggcaatyagacacctcactggcagcttcactgtattagaatgcccttggttaggatttctttttgatatttctcactttctaagctagagcagaagtcttttttttttccggtgacatttattaatctttgccctgcttttatgtaaatcacctctctacctaaatttcatgctttcaatccttcatggatcaatcatttgctgagttcccacactgtgctgggagctgggatgctatggtgaacaatacagccagatacctgccctcctggagcatcagactggtcaccacccctgtgaccagagagtacagggtgctaggagtgtgcagaggagggggcccccgcctggatctgggagttaatttctgtaaccatgagggcccatctgcttgactcggaggttcccacaaatacacaaaccacatagcccttcataattacttggtgcttagattggtcaa

SEQ ID NO: 704829 - DNA, 1782 bp, Homo sapiens
gggcctttggcaaactaagtggtctgcccatgttaaattaggccataaagtgaaattgggctgttttacattttgagataatttcccacttagttctgattatcttgcataagcactattcaatgtttgttcatagacatgatgtatttgttttgaatcwactcaatttaaataagctcttttccaaaaaatgtctcaaaacatctttaacattttaaatggttatatttggctacactccagatagaactgaaatagaaaatagaaggggttgaagttttagtatttgaaaaattgtattttattagattattttttgcttaaacttttctatgctagtatttagttgatgtaaatgaaattggctgagtgacactgttgaacaaaagggatgggaataaaaactccaatgccaaatcaatgataatacttttaatcagagttaattgatgccagctgtgtggtctgcgtgttattttgcatttgtgggtgaagaaaggtgtggttgctgttatttcaatctagaagctggaactggttgccagtcattaagaaggtatggataggggcatgcttggtgttaattgtacagagaaaacactaagtggtttaaggggtacagtgtaattttgactatcagtgtaagatgttttagttcttttataatcacagaggtgcaaatcatagacctgctatttagtttttagtctgactttaagaaaacattataggtctccttgatgatgctgttaattaatttgttacagtattagatctaaattattattaaaagttaaagttaatcactacctcttccttaaaccttatttctgaaaataaactattataatttaaattataatttaaattaacattaactaccctaaccacaaaacagttccttaaaacacacattcatataaaagttattttgatgatctatttggacaagtagatttctaatttgactttgttttattgtggagaaatgacagcactaaattttcttattggctttcacttgggtttattactaacagcctgttaatagatagttaatctatgtgtttaaggaaggaaatgaataacaaagatatcataagacaattattattttcattgccttgagataacttttatatgctaattccaaacatgaaattatttctaattatccaatatagactaattgatgcaatgatagtggatccatggtttagttgagcacttacttgaaactttttgaaaagtgatcatgttcaaagataaaacattcatctttaggtaatcctgatcattggaatgtcttttttttttttatcttaagccttaagtctatgtatttgtggcctttaaattgtgcaactcctttcatttttcttcttataaacaaaaatgaaattggttgtgagcaccagataaattggtgaagaaaaaaagaataatcctaagagatttggtttccaattagaaacataagtctagatttcagatatgaagggatctgccctattctcttctacatccaatttagaatgtaagtatgagaaaaaatggaagatgttatgggagtatataaagcatactgattatttgaacttatctttccactggtttttaactttatggccaatttcttgtaagtagtttttaaatagtgacagatgttatttaataatcaaaattatctgcgtggtataacacaaagagagattctagtgtaaattatgaacattatttaataacatcaatattgggtcattaattatataccacattgat

SEQ ID NO: 704830 - DNA, 667 bp, Homo sapiens
gtcagtggcctgcggggacgcagtgagcgccgaatttgcctggggcaggggaaatgcgctctggcccatgtctgcgcactcgtagttccacccctcagccccagtgtttgttatttttcgggttcagcttgcttttgccccgtctccgtcgacgcaatcgccaccagtcaatggggtggtcgttttgagggacaagtggtaagagccaatcttcttggcgaaaacgcggagaaacgggactagttactgtctttgtccgccatgttagattcaccccacagagatagcggcagagctggcagcggacggtctttgcattgccgcctccccagggggcgggaagctggtaaggaagcagcctgggttagctaggggtggggtcacgtcacactaagagggtttggagaagttcaagggaggaatcctgcaaagaagaggggcgactttttccgtgtctccggacagctaatcgttttagtgacaggatgagagagcccttcgtgttctgagggaccgagtgggcgaaaagcgccggagagttggagagtctgtggttcagaatgcgaggtgacaacgtgctagcagccctcgctcgctctcggsgcctcctcggccttggcgtccattctggccgtgctggaggagcccttcagcccgccactgcgct

SEQ ID NO: 704831 - DNA, 1155 bp, Homo sapiens
ttaaaatagttatatatcttgttttcttatttttataggaaatttaatgcaaaagaaattaatttttttacccttttcaagaaggggtaaaaccttggtgggtctgtctgtgttccttgtcttaaagatttattaaaaacttctgcttggccrggcgcagtggctcacacctgtaatcccagcactttgggaagccgaggcaggtgaatcatgaggtcaggagttcgagaccagcttggccaatagggtgaaaccccatctctactaaaaaatacacagattagccgggcgtggtggtgcacccctgtagtcccagctacttgggaggctgaggcaggagaattgctggaacccaggaggcagaggttgcagtgagccaagatcaggtgagtgcactccagcctgggcgacagtgcaaaactacatctcaaaaaaaccaaaaaaacaaaaaacaaaaaaagcttctgctttacaaaatcagaagttgtcaagcacttcaggataatctcacatttagaattttgggagaaatgaagggcctttgagaaagaaggcaatgtagctactatttaaggttgtggaggagaagagagagggagagatatggagacggtatctgagactaggaaggagacaagggtttggagggttttcataagtggcatagatctagaccctgtgtgccacatggtcccactgggctgatggctgaagggcggctatagtccccaaggtaggccattgaagactgtagcaggttctgtggctgagcctgttttcagtagaggaaagcatgatggtggcctctgagggcatccagagtagcagcgtctgagagatggtagagagtaggggctgacggtggcatcacagtggaaaatgacagttgtggctgtgggaatcagaatatggcttgtcaaaaatgtccatgtcccaatcccagaaacttgtaaatatgttaccttatatggcatagggacttggcagatgtgatttgattaagaatcttgagttggggagattaactcagattatctgggtgggcctaatgtaatcataacaatcctagtaaaagaaagagggaggcagaagggtcagaggagaagatatgaggatggaagcaaaggttggagtgatacggctgctggctttgaa

SEQ ID NO: 704832 - DNA, 1155 bp, Homo sapiens
ttaaaatagttatatatcttgttttcttatttttataggaaatttaatgcaaaagaaattaatttttttacccttttcaagaaggggtaaaaccttggtgggtctgtctgtgttccttgtcttaaagatttattaaaaacttctgcttggccgggcgcagtggctcacacctgtaatcccagcactttgggaagccgaggcaggtgaatcatgaggtcaggagttcgagaccagcttggccaatagggtgaaaccccatctctactaaaaaatacacagattagccgggcgtggtggtgcacccctgtagtcccagctacttgggaggctgaggcaggagaattgctggaacccaggaggcagaggttgcagtgagccaagatcaggtgagtgcactccagcctgggcgacagtgcaaaactacatctcaaaaaaaccaaaaaaacaaaaaacaaaaaaagcttctgctttacaaaatcagaagttgycaagcacttcaggataatctcacatttagaattttgggagaaatgaagggcctttgagaaagaaggcaatgtagctactatttaaggttgtggaggagaagagagagggagagatatggagacggtatctgagactaggaaggagacaagggtttggagggttttcataagtggcatagatctagaccctgtgtgccacatggtcccactgggctgatggctgaagggcggctatagtccccaaggtaggccattgaagactgtagcaggttctgtggctgagcctgttttcagtagaggaaagcatgatggtggcctctgagggcatccagagtagcagcgtctgagagatggtagagagtaggggctgacggtggcatcacagtggaaaatgacagttgtggctgtgggaatcagaatatggcttgtcaaaaatgtccatgtcccaatcccagaaacttgtaaatatgttaccttatatggcatagggacttggcagatgtgatttgattaagaatcttgagttggggagattaactcagattatctgggtgggcctaatgtaatcataacaatcctagtaaaagaaagagggaggcagaagggtcagaggagaagatatgaggatggaagcaaaggttggagtgatacggctgctggctttgaa

SEQ ID NO: 704833 - DNA, 622 bp, Homo sapiens
ttgcagtgaggtgtggtgcgggactaactttccattggcaccttaatggaatgggagtgaaaacgatgtgcactttttccaggctggaacttctgtccaggtgtgtcttctgtctgcatcctttttctccttgtgcagtttggtttcaggcaatgataatgccctcggggtgccagagccaacacagacaagattctggggaactgacgcattctctgaaggacagccatctgccaaactgttaccagaaaggggtctccatccagaccccaagagagggttcttggatctcccgcaagaaagaatttgaggttaatctgtaaagtgaaagcacgtttattagagaagtaaagaaacaaaagaatagctactccaacaggcggaggctgctggttgaccatttttgtggttatttcttgattatatgctaaacaagctgtggattattcatgagttttccaggaaaggggtgagcaattcccagaactgagtgtcyctcccctttttagaccatatagggtaacttcctgacattgccatggtatttgtaaagtgtcctggcgctggtgggagtgtctcttagcatgctaatgcattatcattagcatataatgagcagtga

SEQ ID NO: 704834 - DNA, 1820 bp, Homo sapiens
tgcataaaacaattctggggaaaagactcacacatattaagcaaatgtgaaaaatatttgtccatatccttatcataattaacaaaaattaaaagaaagtaaacaataaaacactatatctaactcaagtggaaataataaggtactaaagaaacagactcttagtttttgggcagccagatcaatacccagccagatcgctctggatttggacacaggtaaaggatttaaataagtgattggggaaatcatattaatattccaaatcatggaaaacaaatctaataaaaattatgtagcttgcttaaagttgatttcaaatatccataccacaattttggctttgatgcccaatgtcattttaaaatagaaaagaaatgtaaatgtttaaaataggcttcaaaatttcttcttattttttactattgagaattttaggtgcacacaccattaacttcttttgtttgcaacttttagcatttaatattgctcaaataggttgttctatcttataataataataataataatggcatttaattagttttcaaagccgtttcatgtatataacctgcatgattttcactaagaccctgaatttggtaaagatagttaatccctcagtcttatttctctcctttgctcagatgggggtacaacaataagcagatattactgtgaaaattaactatctgatataaagttatcacctctcacacttattaaccaatagtaaactggctgtaaatctgaattctcgtgactccactgttggagccgaggtgtcaattgactcagtcttctgatttctttacggacctcctttctccacacctcacttgcttggtagtcatgcttggagaaatcactgctcttcaaatagctgctcaatattaaggaggatccccaaatgcaaatgtgaacagagagcccgtttttaaaaaaatgcttaaaaattgtttataattttcaaagtaacatgggatattaaattgtttcaatttgtacttatttgaattctaagatagttgattatgtttcgagagttcactaaccatttgtacttcctattcggggaattatgagagttacatttttaaagattgttaattaagaccaggaatttaataatagtgctgaatataaatgattaatggagtgtcagagggaaaggtttttgaaggatgcttgggatttgaacaggcagagaaaaagatagtgaaatacagttttgttttttcttttctattctgttttcatatctaccttggaaactctccttatttccacttctcttttcttccacaggtaactacttagtctcctatttgcagtttaatattttttgtactttattaagatgcattgttattgcaatcttcttaattgcttcctaattggttctttcttccccttggtgtatttttcatgcattattaaattccaactggctttctgaaactcaatttgaattctttccagacagcccttccaaagttaaagtgtgtgtctcctggtcccttggtcacacaggaaaaagcactggggaattgaaagggtcactcttttgaacctacgtgcttccttatataagtacaaagctatcaacaacatcaaccattctgattattgtcattcacaagcaccttcacataaagcaattcatytgataacagtttcttaaataaagcaagtattattattctcattcaacatgggagacttctaaggattagaatatctttctgtcctaaattcaaaaagctgatccgggacttatacctaaatcttattaagtcctctgctcattccagcatcac

SEQ ID NO: 704835 - DNA, 1444 bp, Homo sapiens
tgaaaatcagaattctaaatacttttgccttttactataagtcttcttctttattgcattactaaaatatatgtatattacatttttactttacatgtgttcaccatattttctaattttccaaggagtaaacaaactaatatagtatagatcatctcagggcacaaaaatagactgtgtacaaggaaaaaaaatagtggttacttgtgtgtgtgtgtgtgtgtgtgtgtgtgtgtgttttaagtatttaaaactagtagttccgtccaggcataatggctcacatctgcaatcccagcactttgggaggctgaggcaggcagatcacttgaggccagaagtttgagaccaggctagccaacatggcaaaaccacatctctactaaaaatacaaaaaaaaaaaaatagctgtgtgaggtggcacacgcctgtaatcacagctactcaggaggctaaggcaggagaattgcttgaacctggaagacagaggctacagcragctaagatagcaccactgtactccagcctgggtgacagagcgagattctgtctcaaaaaagaaacaaaaaaactagttattttgttcatagaaaaataaaccctactttaaaaaatcattaatttcaaaggcccctgagcttgggaaacagggaatacccttattaatacccttggtacttagtattccactaagatgtcaattatgtctctcatgctatgttgttaacataatatgacaatgttggaggatgaataaataaatgaccacatttatagttctaattaatgtatttataatcaggtgagttacaaaatatacctgttcaatttttcctggtcagtttttaaatttttttaaatcaatcactggaaaaaagttcagaagacaaaattatcaactcaaattagggagatgctactgaggacaatagactgaaacatctcgacatccttgtaaagcaagccaaattaccacgatgaaatttaatgaagataaatggaaacaatccactaagcctctaaaaatcaaatacacacatacattatgattaagacattaagtaattgccagttatgtataaaaggcctagacaaaagctgacactaagctcaataagagccgatattatgatatcaaaacagctcatttaatcttagactacagcattagaaatgcaatccacaaatagaagaactacattcccactgtattttgtgctgaccacatacataaagtattactttcaggtatgggcaaaatattaagtgaggcacattaaaaacaatatatagaaacaaggtcaaaggacaaataattatgacgaccttaaaaaaaaaaaaaaacgaatgctgtgctgacatattaggaagacagcaatatggaagctgagctacccagaggcagagagcagacctaggacaaatgcaggcgaagggaatacat

SEQ ID NO: 704836 - DNA, 1444 bp, Homo sapiens
tgaaaatcagaattctaaatacttttgccttttactataagtcttcttctttattgcattactaaaatatatgtatattacatttttactttacatgtgttcaccatattttctaattttccaaggagtaaacaaactaatatagtatagatcatctcagggcacaaaaatagactgtgtacaaggaaaaaaaatagtggttacttgtgtgtgtgtgtgtgtgtgtgtgtgtgtgtgttttaagtatttaaaactagtagttccgtccaggcataatggctcacatctgcaatcccagcactttgggaggctgaggcaggcagatcacttgaggccagaagtttgagaccaggctagccaacatggcaaaaccacatctctactaaaaatacaaaaaaaaaaaaatagctgtgtgaggtggcacacgcctgtaatcacagctactcaggaggctaaggcaggagaattgcttgaacctggaagacagaggctacagcaagctaagatagcaccactgtactccagcctgggtgacagagcgagattctgtctcaaaaaagaaacaaaaaaactagttmttttgttcatagaaaaataaaccctactttaaaaaatcattaatttcaaaggcccctgagcttgggaaacagggaatacccttattaatacccttggtacttagtattccactaagatgtcaattatgtctctcatgctatgttgttaacataatatgacaatgttggaggatgaataaataaatgaccacatttatagttctaattaatgtatttataatcaggtgagttacaaaatatacctgttcaatttttcctggtcagtttttaaatttttttaaatcaatcactggaaaaaagttcagaagacaaaattatcaactcaaattagggagatgctactgaggacaatagactgaaacatctcgacatccttgtaaagcaagccaaattaccacgatgaaatttaatgaagataaatggaaacaatccactaagcctctaaaaatcaaatacacacatacattatgattaagacattaagtaattgccagttatgtataaaaggcctagacaaaagctgacactaagctcaataagagccgatattatgatatcaaaacagctcatttaatcttagactacagcattagaaatgcaatccacaaatagaagaactacattcccactgtattttgtgctgaccacatacataaagtattactttcaggtatgggcaaaatattaagtgaggcacattaaaaacaatatatagaaacaaggtcaaaggacaaataattatgacgaccttaaaaaaaaaaaaaaacgaatgctgtgctgacatattaggaagacagcaatatggaagctgagctacccagaggcagagagcagacctaggacaaatgcaggcgaagggaatacat

SEQ ID NO: 704837 - DNA, 1444 bp, Homo sapiens
tgaaaatcagaattctaaatacttttgccttttactataagtcttcttctttattgcattactaaaatatatgtatattacatttttactttacatgtgttcaccatattttctaattttccaaggagtaaacaaactaatatagtatagatcatctcagggcacaaaaatagactgtgtacaaggaaaaaaaatagtggttacttgtgtgtgtgtgtgtgtgtgtgtgtgtgtgtgttttaagtatttaaaactagtagttccgtccaggcataatggctcacatctgcaatcccagcactttgggaggctgaggcaggcagatcacttgaggccagaagtttgagaccaggctagccaacatggcaaaaccacatctctactaaaaatacaaaaaaaaaaaaatagctgtgtgaggtggcacacgcctgtaatcacagctactcaggaggctaaggcaggagaattgcttgaacctggaagacagaggctacagcaagctaagatagcaccactgtactccagcctgggtgacagagcgagattctgtctcaaaaaagaaacaaaaaaactagttattttgttcatagaaaaataaaccctactwtaaaaaatcattaatttcaaaggcccctgagcttgggaaacagggaatacccttattaatacccttggtacttagtattccactaagatgtcaattatgtctctcatgctatgttgttaacataatatgacaatgttggaggatgaataaataaatgaccacatttatagttctaattaatgtatttataatcaggtgagttacaaaatatacctgttcaatttttcctggtcagtttttaaatttttttaaatcaatcactggaaaaaagttcagaagacaaaattatcaactcaaattagggagatgctactgaggacaatagactgaaacatctcgacatccttgtaaagcaagccaaattaccacgatgaaatttaatgaagataaatggaaacaatccactaagcctctaaaaatcaaatacacacatacattatgattaagacattaagtaattgccagttatgtataaaaggcctagacaaaagctgacactaagctcaataagagccgatattatgatatcaaaacagctcatttaatcttagactacagcattagaaatgcaatccacaaatagaagaactacattcccactgtattttgtgctgaccacatacataaagtattactttcaggtatgggcaaaatattaagtgaggcacattaaaaacaatatatagaaacaaggtcaaaggacaaataattatgacgaccttaaaaaaaaaaaaaaacgaatgctgtgctgacatattaggaagacagcaatatggaagctgagctacccagaggcagagagcagacctaggacaaatgcaggcgaagggaatacat

SEQ ID NO: 704838 - DNA, 1444 bp, Homo sapiens
tgaaaatcagaattctaaatacttttgccttttactataagtcttcttctttattgcattactaaaatatatgtatattacatttttactttacatgtgttcaccatattttctaattttccaaggagtaaacaaactaatatagtatagatcatctcagggcacaaaaatagactgtgtacaaggaaaaaaaatagtggttacttgtgtgtgtgtgtgtgtgtgtgtgtgtgtgtgttttaagtatttaaaactagtagttccgtccaggcataatggctcacatctgcaatcccagcactttgggaggctgaggcaggcagatcacttgaggccagaagtttgagaccaggctagccaacatggcaaaaccacatctctactaaaaatacaaaaaaaaaaaaatagctgtgtgaggtggcacacgcctgtaatcacagctactcaggaggctaaggcaggagaattgcttgaacctggaagacagaggctacagcaagctaagatagcaccactgtactccagcctgggtgacagagcgagattctgtctcaaaaaagaaacaaaaaaactagttattttgttcatagaaaaataaaccctactttaaaaaatcattaatttcaaaggcccctgagcttgggaaacagggaatacccttattaatacccttggtacttagtattccactaagatgtcaattatgtctctcatgctatgttgttaacataatatgacaatgttggaggatgaataaataaatgaccacatttatagttmtaattaatgtatttataatcaggtgagttacaaaatatacctgttcaatttttcctggtcagtttttaaatttttttaaatcaatcactggaaaaaagttcagaagacaaaattatcaactcaaattagggagatgctactgaggacaatagactgaaacatctcgacatccttgtaaagcaagccaaattaccacgatgaaatttaatgaagataaatggaaacaatccactaagcctctaaaaatcaaatacacacatacattatgattaagacattaagtaattgccagttatgtataaaaggcctagacaaaagctgacactaagctcaataagagccgatattatgatatcaaaacagctcatttaatcttagactacagcattagaaatgcaatccacaaatagaagaactacattcccactgtattttgtgctgaccacatacataaagtattactttcaggtatgggcaaaatattaagtgaggcacattaaaaacaatatatagaaacaaggtcaaaggacaaataattatgacgaccttaaaaaaaaaaaaaaacgaatgctgtgctgacatattaggaagacagcaatatggaagctgagctacccagaggcagagagcagacctaggacaaatgcaggcgaagggaatacat

SEQ ID NO: 704839 - DNA, 1444 bp, Homo sapiens
tgaaaatcagaattctaaatacttttgccttttactataagtcttcttctttattgcattactaaaatatatgtatattacatttttactttacatgtgttcaccatattttctaattttccaaggagtaaacaaactaatatagtatagatcatctcagggcacaaaaatagactgtgtacaaggaaaaaaaatagtggttacttgtgtgtgtgtgtgtgtgtgtgtgtgtgtgtgttttaagtatttaaaactagtagttccgtccaggcataatggctcacatctgcaatcccagcactttgggaggctgaggcaggcagatcacttgaggccagaagtttgagaccaggctagccaacatggcaaaaccacatctctactaaaaatacaaaaaaaaaaaaatagctgtgtgaggtggcacacgcctgtaatcacagctactcaggaggctaaggcaggagaattgcttgaacctggaagacagaggctacagcaagctaagatagcaccactgtactccagcctgggtgacagagcgagattctgtctcaaaaaagaaacaaaaaaactagttattttgttcatagaaaaataaaccctactttaaaaaatcattaatttcaaaggcccctgagcttgggaaacagggaatacccttattaatacccttggtacttagtattccactaagatgtcaattatgtctctcatgctatgttgttaacataatatgacaatgttggaggatgaataaataaatgaccacatttatagttctaattaatgtatttataatcaggtgagttacaaaatatayctgttcaatttttcctggtcagtttttaaatttttttaaatcaatcactggaaaaaagttcagaagacaaaattatcaactcaaattagggagatgctactgaggacaatagactgaaacatctcgacatccttgtaaagcaagccaaattaccacgatgaaatttaatgaagataaatggaaacaatccactaagcctctaaaaatcaaatacacacatacattatgattaagacattaagtaattgccagttatgtataaaaggcctagacaaaagctgacactaagctcaataagagccgatattatgatatcaaaacagctcatttaatcttagactacagcattagaaatgcaatccacaaatagaagaactacattcccactgtattttgtgctgaccacatacataaagtattactttcaggtatgggcaaaatattaagtgaggcacattaaaaacaatatatagaaacaaggtcaaaggacaaataattatgacgaccttaaaaaaaaaaaaaaacgaatgctgtgctgacatattaggaagacagcaatatggaagctgagctacccagaggcagagagcagacctaggacaaatgcaggcgaagggaatacat

SEQ ID NO: 704840 - DNA, 595 bp, Homo sapiens
acaacagagagggcgtccacacaggaggcagaatgcacagtgcrgcggggtggtgggtccctaggggtggtgggtccctcacccgcgggccaacaacagagagggcgtccacacgggaggcacaatgcacagtgcagcggggtggtgggtccctcacccatgggctcccacagctcctgccactcccagtggagctgacgtcagggcgccgatgccctctccctgaggatggggccttcccacccccgcacaggtgggcccagctgcagccacaccccagggcctcactgcctggcttcctcttgcttggggtgacttctacaccctgatctgatgcctgcaccagccgggtggggttccaggccagaccgtggaagaagcctgaaatgcaccatcagctgtaggttctcgggttggtggattggtgaccttcactttctgacttatgcttttgtatccaaatttcctactctcagaaaatatcgcctttacaactgttttaatgctattaatacttgtctgtcttgtccctaattattctcctaggatggcaatgggaaccctcatttgagtgaactgtacagccagccagaga

SEQ ID NO: 704841 - DNA, 2602 bp, Homo sapiens
ttttttaattagctcccaagcagtgggatttgatggaaatgtgaaccatttttcctcttttctggctccaggttctacctcttcctgcaggaagtccacacaagctgggatgagggggaggcaagacaaaagagcagggcaagtttgacacaattaacacctcgatcatgcctccaaatgcagagggtctttcagggaaggagaatcaaaatgtacgggagaaaaatgacaggagacgacaggcacggtggctcacgcctgtaatcccagcactttgggaggccgaggtgggcagatcacgaggtcaggagatcgagaccatcctggttaacatggtaaaatcccatctctactaaaatacaaaaaaaaattgccgggcatggtagcgggcacctgtagtcccagctactccagaggctggagaatggcgtgaacccaggaggtggaggttgcagtgagccgagatcacgccactgcaccccagcccgggcgacagagtgagactccatctcaaaaaaaaaaaaaaaaaaaagaaagaaaaagaaaaagaaaagaaaaatgacaggagacaaaaggaaaagtcagccaaatctaaatgcagtattagaggctagaaattcctattgtcaacaacagattctgacaacttcatctcctctaacttaagaaaatcattgaaaagccttcctatatgtttagttgcaaagcaaaatccagatgcacgtcttaagtacctatagaaattatgagaaagtatgcagcaggctcagattctagccctgagaaataatctggtgtttgggaaagaaaagcagaagtaaagtgcctgattgtccggcaacataatactctgtacatttgataatactgagtcaccccaaccccagactatcctgtgatttcattttaatatagagagcaaatacaacacagttaaaatgaaaaaatcaactgggataacttgcagaaaatataattaagttaaaaattataccctgaatatagagagaactgaaacaaatcaataggaaataygccgcaatagaaaatggtctggtggtaatatgtacacacacaacatacacatgaccaaagcgcacgcaaaagtcctcaccttataacccaataaatgcaagtagaaacagctcattctaatttttacccagcaagttttctggggtaggaatgttatgaatttgtctaagaataccatgaattatcatcagggatgggaactgactgcaattgtttacagttggttgcaaaaagcaattcggcaggccacatatggggatctatcctaaaaaaatgaccagatatggatggggacttatggtgtttaaaatgaaggaaaattacaaacaacctatatttccaataaaggatatggttaggctgggcgcggtggctcacacctgtaatcccagcactttgggaggcggagacgcaggtgcattgcttaagcccaggggtccaagaccagcctgggcaacttggcaaaaccctgtctctgcaaacaaagcaaaacaaaattaaccaggtgtggtggcacacgtgtagtgcccagctacttgggagagtgaagtgggaggcttgctggagcccaggaggcagaggttgcagtgagccgagatcatgtcgctgtattccagcctaagtgacagagcaacactctgcctcaaaaaaagggggatatggttaaataaattatggtacaactcccaaaatatttcacagctattatacaagatgcacttgaaaatatcttaatgtaaaaatgtttatgatatttgaggcaaaaagaatgataaaagttagtatttcttgggtgctttccacatcccaggactgttttattctctttacatgtgttttctcattcatttcttaaaagaacctcatgaaataggtactattattaatattactattattaatatcctcactttatatatgatgaagtggaaacaagatggttatcttacccagggttacaatctaagaagttccattccaggcttgatgctgttaaaaattttaccatgttacctgatggctatctgtctgtctgcctgtgtgtctgtctatctacctatttatctttatcagttagggtcccaataggaaacagcacactcaagtgaaaataaccgaagaagagtttctcaaaaggattctttataatagatgtggccaggaggtaaggaagcaataagaggccatgcagtactcatggcccaaagaggagacaaaaatcaaatcaggaagaagaaagtcttctgaagggtcctcttgtctaattattatctgtccgtccatcacccatccacacatcgatctttcaatccatctagccttgcagcctctgtatgacaggatgaggcaaaaagacagcagataacatgccataaagtgaattgtgagatacataccctaggggacttgtgtcttcaggcatttagctgaaatgtggttatagaatgctacagaagcccttaacactaatcccccacaacgaggtagagaggagaggacacataaggggctttccagctttaagaccaccctcttccctggtgtgggaggggtgtgggccccctca

SEQ ID NO: 704842 - DNA, 2602 bp, Homo sapiens
ttttttaattagctcccaagcagtgggatttgatggaaatgtgaaccatttttcctcttttctggctccaggttctacctcttcctgcaggaagtccacacaagctgggatgagggggaggcaagacaaaagagcagggcaagtttgacacaattaacacctcgatcatgcctccaaatgcagagggtctttcagggaaggagaatcaaaatgtacgggagaaaaatgacaggagacgacaggcacggtggctcacgcctgtaatcccagcactttgggaggccgaggtgggcagatcacgaggtcaggagatcgagaccatcctggttaacatggtaaaatcccatctctactaaaatacaaaaaaaaattgccgggcatggtagcgggcacctgtagtcccagctactccagaggctggagaatggcgtgaacccaggaggtggaggttgcagtgagccgagatcacgccactgcaccccagcccgggcgacagagtgagactccatctcaaaaaaaaaaaaaaaaaaaagaaagaaaaagaaaaagaaaagaaaaatgacaggagacaaaaggaaaagtcagccaaatctaaatgcagtattagaggctagaaattcctattgtcaacaacagattctgacaacttcatctcctctaacttaagaaaatcattgaaaagccttcctatatgtttagttgcaaagcaaaatccagatgcacgtcttaagtacctatagaaattatgagaaagtatgcagcaggctcagattctagccctgagaaataatctggtgtttgggaaagaaaagcagaagtaaagtgcctgattgtccggcaacataatactctgtacatttgataatactgagtcaccccaaccccagactatcctgtgatttcattttaatatagagagcaaatacaacacagttaaaatgaaaaaatcaactgggataacttgcagaaaatataattaagttaaaaattataccctgaatatagagagaactgaaacaaatcaataggaaatacgccrcaatagaaaatggtctggtggtaatatgtacacacacaacatacacatgaccaaagcgcacgcaaaagtcctcaccttataacccaataaatgcaagtagaaacagctcattctaatttttacccagcaagttttctggggtaggaatgttatgaatttgtctaagaataccatgaattatcatcagggatgggaactgactgcaattgtttacagttggttgcaaaaagcaattcggcaggccacatatggggatctatcctaaaaaaatgaccagatatggatggggacttatggtgtttaaaatgaaggaaaattacaaacaacctatatttccaataaaggatatggttaggctgggcgcggtggctcacacctgtaatcccagcactttgggaggcggagacgcaggtgcattgcttaagcccaggggtccaagaccagcctgggcaacttggcaaaaccctgtctctgcaaacaaagcaaaacaaaattaaccaggtgtggtggcacacgtgtagtgcccagctacttgggagagtgaagtgggaggcttgctggagcccaggaggcagaggttgcagtgagccgagatcatgtcgctgtattccagcctaagtgacagagcaacactctgcctcaaaaaaagggggatatggttaaataaattatggtacaactcccaaaatatttcacagctattatacaagatgcacttgaaaatatcttaatgtaaaaatgtttatgatatttgaggcaaaaagaatgataaaagttagtatttcttgggtgctttccacatcccaggactgttttattctctttacatgtgttttctcattcatttcttaaaagaacctcatgaaataggtactattattaatattactattattaatatcctcactttatatatgatgaagtggaaacaagatggttatcttacccagggttacaatctaagaagttccattccaggcttgatgctgttaaaaattttaccatgttacctgatggctatctgtctgtctgcctgtgtgtctgtctatctacctatttatctttatcagttagggtcccaataggaaacagcacactcaagtgaaaataaccgaagaagagtttctcaaaaggattctttataatagatgtggccaggaggtaaggaagcaataagaggccatgcagtactcatggcccaaagaggagacaaaaatcaaatcaggaagaagaaagtcttctgaagggtcctcttgtctaattattatctgtccgtccatcacccatccacacatcgatctttcaatccatctagccttgcagcctctgtatgacaggatgaggcaaaaagacagcagataacatgccataaagtgaattgtgagatacataccctaggggacttgtgtcttcaggcatttagctgaaatgtggttatagaatgctacagaagcccttaacactaatcccccacaacgaggtagagaggagaggacacataaggggctttccagctttaagaccaccctcttccctggtgtgggaggggtgtgggccccctca

SEQ ID NO: 704843 - DNA, 621 bp, Homo sapiens
tttgtgttgcctttaatttcttttatcaatatattatatattctatatatattgaggagattaacggacttaaaatcatatatatatataatttacttaatggccataaatttgaagtgtatatatatataaaaatcatatatatgtatagtatatatgattwtatatatatcatatatatgatttatatacagtgtgtatatgattttaaatatatatacagtgtatatatagagaatatatatgattttaagttccttaatcacttcagatttatggccattaacttcaagggggcattagccctgcctggttgtactctcctacttctctgattcattctcctcccctttttaggagactctcacacctttcctttctcctaccttcttcaggtctcttttcagattacaccctgtgagagaggtcttgcttgaatgccctataagaagcagcatcaggctgggtgcggtggctcacgcctgtaatcccaatactttgggaggcagaggtgagcagatcacctgaggtcaggagttcaagaccagcctggccaacatggcaaaaccccgactctatcaaataatacaaaaattagttgagcatagtggcacacacctg

SEQ ID NO: 704844 - DNA, 1024 bp, Homo sapiens
gaggcaactactgggtgacaaagtccactttcaaaccttctgcttgtccagttactgtatgctgactggctgccactggtcagtctctgcgatttggcttagaatattgggcaaatgaccacagacacatggtcagaaacagaatgaatctcttggaactgccaggatcaaggcagccacacagggctcacatccgaaggcagccctttctttccatgtgtggcatagaaaggactcttggccacagacctttactattattcttattaagagtattatttggccttcctattccacttaggtaacaggcaggctcggtagtatcattttgaaattgggaggacagcaattcatagagacttagaacaaatgagcgtctgtcacaggaaagaacaatcagcaaacatggaaaactagagttcattttaaggagtttgtattttttacacttcttttttaaggagataattccctaactaaatctggagtaactatgaataaacagaagtgagtttgaattgaatgcacatcacattttgccacagtttcccggatttagccaacatttttctgtgataacttccaatagtgagtttttcatatatcaacaagtagtgtcttaacaaaagaaatataagccaggtgcagtggtttgtgcctgtaatcccagcactttggaaggccaaggtgggaggattgctcgacaacaggaggtcagcactagcttgggcaacatagtgagaccgtctctacaaaaatttttttttaagtatctggacatggtcacacgcctgtagtcgcagctattcaggaggctaaggcaggaggatcccttgagcccaggagtttgaggatgcaatgagctatgattgcaccactgcattccagagggagtctctctctctctctccatgtatatgtgtgtgtgtgtgtgtatatatatatatatacttatatatatatacttatatatatatayacttatatatatatacttatatatatacacttatatatatataca

SEQ ID NO: 704845 - DNA, 1024 bp, Homo sapiens
gaggcaactactgggtgacaaagtccactttcaaaccttctgcttgtccagttactgtatgctgactggctgccactggtcagtctctgcgatttggcttagaatattgggcaaatgaccacagacacatggtcagaaacagaatgaatctcttggaactgccaggatcaaggcagccacacagggctcacatccgaaggcagccctttctttccatgtgtggcatagaaaggactcttggccacagacctttactattattcttattaagagtattatttggccttcctattccacttaggtaacaggcaggctcggtagtatcattttgaaattgggaggacagcaattcatagagacttagaacaaatgagcgtctgtcacaggaaagaacaatcagcaaacatggaaaactagagttcattttaaggagtttgtattttttacacttcttttttaaggagataattccctaactaaatctggagtaactatgaataaacagaagtgagtttgaattgaatgcacatcacattttgccacagtttcccggatttagccaacatttttctgtgataacttccaatagtgagtttttcatatatcaacaagtagtgtcttaacaaaagaaatataagccaggtgcagtggtttgtgcctgtaatcccagcactttggaaggccaaggtgggaggattgctcgacaacaggaggtcagcactagcttgggcaacatagtgagaccgtctctacaaaaatttttttttaagtatctggacatggtcacacgcctgtagtcgcagctattcaggaggctaaggcaggaggatcccttgagcccaggagtttgaggatgcaatgagctatgattgcaccactgcattccagagggagtctctctctctctctccatgtatatgtgtgtgtgtgtgtgtatatatatatatatacttatatatatatacttatatatatatacacttatatatatatacwtatatatatacacttatatatatataca

SEQ ID NO: 704846 - DNA, 1024 bp, Homo sapiens
gaggcaactactgggtgacaaagtccactttcaaaccttctgcttgtccagttactgtatgctgactggctgccactggtcagtctctgcgatttggcttagaatattgggcaaatgaccacagacacatggtcagaaacagaatgaatctcttggaactgccaggatcaaggcagccacacagggctcacatccgaaggcagccctttctttccatgtgtggcatagaaaggactcttggccacagacctttactattattcttattaagagtattatttggccttcctattccacttaggtaacaggcaggctcggtagtatcattttgaaattgggaggacagcaattcatagagacttagaacaaatgagcgtctgtcacaggaaagaacaatcagcaaacatggaaaactagagttcattttaaggagtttgtattttttacacttcttttttaaggagataattccctaactaaatctggagtaactatgaataaacagaagtgagtttgaattgaatgcacatcacattttgccacagtttcccggatttagccaacatttttctgtgataacttccaatagtgagtttttcatatatcaacaagtagtgtcttaacaaaagaaatataagccaggtgcagtggtttgtgcctgtaatcccagcactttggaaggccaaggtgggaggattgctcgacaacaggaggtcagcactagcttgggcaacatagtgagaccgtctctacaaaaatttttttttaagtatctggacatggtcacacgcctgtagtcgcagctattcaggaggctaaggcaggaggatcccttgagcccaggagtttgaggatgcaatgagctatgattgcaccactgcattccagagggagtctctctctctctctccatgtatatgtgtgtgtgtgtgtgtatatatatatatatacttatatatatatacttatatatatatacacttatatatatatacttayatatatacacttatatatatataca

SEQ ID NO: 704847 - DNA, 1024 bp, Homo sapiens
gaggcaactactgggtgacaaagtccactttcaaaccttctgcttgtccagttactgtatgctgactggctgccactggtcagtctctgcgatttggcttagaatattgggcaaatgaccacagacacatggtcagaaacagaatgaatctcttggaactgccaggatcaaggcagccacacagggctcacatccgaaggcagccctttctttccatgtgtggcatagaaaggactcttggccacagacctttactattattcttattaagagtattatttggccttcctattccacttaggtaacaggcaggctcggtagtatcattttgaaattgggaggacagcaattcatagagacttagaacaaatgagcgtctgtcacaggaaagaacaatcagcaaacatggaaaactagagttcattttaaggagtttgtattttttacacttcttttttaaggagataattccctaactaaatctggagtaactatgaataaacagaagtgagtttgaattgaatgcacatcacattttgccacagtttcccggatttagccaacatttttctgtgataacttccaatagtgagtttttcatatatcaacaagtagtgtcttaacaaaagaaatataagccaggtgcagtggtttgtgcctgtaatcccagcactttggaaggccaaggtgggaggattgctcgacaacaggaggtcagcactagcttgggcaacatagtgagaccgtctctacaaaaatttttttttaagtatctggacatggtcacacgcctgtagtcgcagctattcaggaggctaaggcaggaggatcccttgagcccaggagtttgaggatgcaatgagctatgattgcaccactgcattccagagggagtctctctctctctctccatgtatatgtgtgtgtgtgtgtgtatatatatatatatacttatatatatatacttatatatatatacacttatatatatatacttatatatatayacttatatatatataca

SEQ ID NO: 704848 - DNA, 639 bp, Homo sapiens
taatgggccagagtttagcatgaagcccctcgtcctggtagggtgggtgggacagtgccctgtgtcctcatctgcacacccctattctccagctgcatgaccttgggtatgtgaagctctcattctcaactgtttccgactctaaaatggaaattagcatcaccagccttgcaggattgttaaggacagacaggatgatgtacgtgaagcttcagcctagcyctgagacacagtacccactctacaagtaattcctcttctctttctccagattgaagggaaagcaaatttataaaaagtacaggtcttttaacaggactccaaaattattgggaacttgcaacaagactgagggaaaggaaatgtggcgtatttttaaatgaagaaaaagagaatccaactaacaagaaggtcaatgattagaagaacaggcaagcctgagcctcaggcaactgtagcctacacaggccagtgaggggagaagtttcctctttatttactataaagagaaaacatacaaagaaatccaatggccacttctaggctgagaggtaatggcagagaaccagagcttgtgcctctcataaccttcttccccggccctcccagttccacccaaaggccaggctctggcaggat

SEQ ID NO: 704849 - DNA, 799 bp, Homo sapiens
gaaggttatcctcaaatcccaaatgccactaatgcccatcactggaactggacagtactgcccacaagggatgagaataaaaacagctgccatttactaactgctggagatcccaccagatgcttcaggtctactcattacttaattctcacacagccaccccactcaaccaaataagcttgaggttttctccaagctgcctctttatcaactcttaaatagcagcattcaagctgccacagacacttctcgaagtttgctggcctagggttcccaatggggaaaacatcacctccctggygacaaacgcaacagcctcctaacaccccttctgcaggagaggcaccaagtgcatctctccaacgcagatgagtgaggatgaataagccaaagagggatgtctcccgagagcagagactgtctcataaatagcccagagcagtcagttgggtggcaggttgctagtctcccattttgcagaagaggaaactaaggttcagagtggttaagtaactctgaaagaggcacagctttaagtgacagagttggagtttcaaagccacattctttaccctgtgacacatctccagaagggatcagctctgggccctcactacttccaaaataaagtcttcagtaacatcaagaaaaagaaaaggagtcaggcgtggtggtggctcacgcctgtaattctagcagtttgggaggcagaggcgggcagattgcctgagctcaggagaccagcttaggcaacatggtaaaaccctgtctctactaaaaatacaaaaaattagctggg

SEQ ID NO: 704850 - DNA, 799 bp, Homo sapiens
gaaggttatcctcaaatcccaaatgccactaatgcccatcactggaactggacagtactgcccacaagggatgagaataaaaacagctgccatttactaactgctggagatcccaccagatgcttcaggtctactcattacttaattctcacacagccaccccactcaaccaaataagcttgaggttttctccaagctgcctctttatcaactcttaaatagcagcattcaagctgccacagacacttctcgaagtttgctggcctagggttcccaatggggaaaacatcacctccctggtgacaaacgcaacagccycctaacaccccttctgcaggagaggcaccaagtgcatctctccaacgcagatgagtgaggatgaataagccaaagagggatgtctcccgagagcagagactgtctcataaatagcccagagcagtcagttgggtggcaggttgctagtctcccattttgcagaagaggaaactaaggttcagagtggttaagtaactctgaaagaggcacagctttaagtgacagagttggagtttcaaagccacattctttaccctgtgacacatctccagaagggatcagctctgggccctcactacttccaaaataaagtcttcagtaacatcaagaaaaagaaaaggagtcaggcgtggtggtggctcacgcctgtaattctagcagtttgggaggcagaggcgggcagattgcctgagctcaggagaccagcttaggcaacatggtaaaaccctgtctctactaaaaatacaaaaaattagctggg

SEQ ID NO: 704851 - DNA, 1897 bp, Homo sapiens
aacccttgccatctcctctcctgtgtgtgtctgtgtctcagaggtgttttctcacctgtgatccaggtgttgattggtgctgtcatagccttgcctggcacatctgttggaaaatcaccttgctttccaccttctccctcctcaccccagccagagagcccacctccagacctgagacttagaccccacacatcacctgatgtttgtcctggccttggataagaagggtggagcccacagctcattgccaggctctgacctcaagccctgaggcagtagggtctcccctctgcccaccatctctcacgtgagcctggccccaaccccaggtctctctgtttatggttcctatcattcagtgtgtaattctgggtcagtcctttccccactcacctggcccagctcctgcactggcttccctgccctgtctgagagccaggcagctggtgaagactcagtggcaatcgatggagctgcaaaytgggggataccacccagaattcccaagagaccccatcaagtagtatgttctgctccagccagtagcaagaagtggtagaaagaagttggctttggagccagatagctctgggttcagatcccagcttggctgctctgtccatgaggcatggaatgaggtgctccatagctctgaacagtagctcgttcctgtctgtgacagaggcatatttacaggagggtacgaggacccaaactgcctgtgcccatgaacgctcagaatgcatcgcttattgtattcatattttaatactctactgatattaatggaattcatattccagaaggagaggcagatgtgcaaacagacaattgcactccagtgtgacatactcatggtcgtggcatcgtacaaggcactggttgctgcctgagctgctgaaaaaatgggagtgagagtgctgggaaaactaagtgacacatgctcaggcaaggagttttagtccttagagctaaacctgtctctgcagcctggaaaccccactccctcagcttcctgcggggatgagaaggggagtgcccagctacgagcatttctcctcctggctgctaccatgactccaagtagggccatccctggaatggaagacacagtcactcctgcctcggtttacagtggtgtttcccgacatttgttttcaaggactccagcagggctgagactagggtgaagctagccaggtgcacagggggtaacattcaaagaggcacccactcactctcaggatggtgcaatgagacggtgtcctttaattttgcactgcaggccccttgcttgtctcactgtattcgctcccattcctggctcaggttctacaagatgctctgaaaaagatgggctccagagtgtaaaatatgaagaaaaatttcccactctggcccaaacttggagggtcacaaggcactgtgagcacacactccagcttcagggcctttgcgcttgacatgtcttctgcctggaatgctctctcctcaatacccctatggctcacaccttcctttattccagcctcctcagaagggcctcccagggcccctctggctaaagaagcccctcccccattgccttctatcacttcactctgctttgcttttcctcattatgtttatcaccactggacatattttccatcatttatttgattatgggctcttctgctaaactggcagctccatgaggacagggacgtgtctattgttactgatatgtccccattgcctacaacggtgcctggtacggaatagattctcaattaatttgtttttcatgcataaaggaaagacaggaagaaggaaggagagaaagttaagagaagtcctgaagggaagaacgggtttaattatacttaacccaatatctcttaaaattcatggatgt

SEQ ID NO: 704852 - DNA, 632 bp, Homo sapiens
atttagtgtggcaaaaaataagaattctgtgtctgggcttcactgtctgcaaaaatgaatgcattattgtaaaatgtgcactaatctaaaaagtgtattgccttcctagaagtctgagtaatgtcttacacacataatcacactgcccgtcttcatatggacatgagtcctatagtgcttgagaaatggaaattatttgactgcatcagctagtrcatcgtacttctggttattttgaatttttgtaatcagatgctgctgagctgtggccttttccccacctcctctctcatacatatatatgagtggtgtgttcagtgaaattttctgacatgaaaaagaagtccttaaaccaaaaataataataataataataacaataaagggaccactgtcttagaaaacattagttacccgttctctttccttctcaaggaggaatgacttcagtgcaattaacaatccgtgtctttgtgtcccagtttgatcttgcccagtttgaaacagcttgcactactagattggttcttgtaagtgttgaaagttcttaattacaaattaaatcttgatcctgtaacttggtagtaatcctaccatctatatataactttacgattttcagaggactttct

SEQ ID NO: 704853 - DNA, 632 bp, Homo sapiens
atttagtgtggcaaaaaataagaattctgtgtctgggcttcactgtctgcaaaaatgaatgcattattgtaaaatgtgcactaatctaaaaagtgtattgccttcctagaagtctgagtaatgtcttacacacataatcacactgcccgtcttcatatggacatgagtcctatagtgcttgagaaatggaaattatttgactgcatcagctagtgcatcgtacttctggttattttgaatttttgtaatcagatgctgctgagctgtggccttttccccacctcctctctcatacatatatatgagtggtgtgttcagtgaaattttctgacatgaaaaagaagtccttaaaccaaaaataataataataataataacaataaagggaccactgkcttagaaaacattagttacccgttctctttccttctcaaggaggaatgacttcagtgcaattaacaatccgtgtctttgtgtcccagtttgatcttgcccagtttgaaacagcttgcactactagattggttcttgtaagtgttgaaagttcttaattacaaattaaatcttgatcctgtaacttggtagtaatcctaccatctatatataactttacgattttcagaggactttct

SEQ ID NO: 704854 - DNA, 632 bp, Homo sapiens
atttagtgtggcaaaaaataagaattctgtgtctgggcttcactgtctgcaaaaatgaatgcattattgtaaaatgtgcactaatctaaaaagtgtattgccttcctagaagtctgagtaatgtcttacacacataatcacactgcccgtcttcatatggacatgagtcctatagtgcttgagaaatggaaattatttgactgcatcagctagtgcatcgtacttctggttattttgaatttttgtaatcagatgctgctgagctgtggccttttccccacctcctctctcatacatatatatgagtggtgtgttcagtgaaattttctgacatgaaaaagaagtccttaaaccaaaaataataataataataataacaataaagggaccactgtcttagaaaacattagttacccgttctctttccttctcaaggaggaatgacttcagtgcaattaacaatccrtgtctttgtgtcccagtttgatcttgcccagtttgaaacagcttgcactactagattggttcttgtaagtgttgaaagttcttaattacaaattaaatcttgatcctgtaacttggtagtaatcctaccatctatatataactttacgattttcagaggactttct

SEQ ID NO: 704855 - DNA, 632 bp, Homo sapiens
atttagtgtggcaaaaaataagaattctgtgtctgggcttcactgtctgcaaaaatgaatgcattattgtaaaatgtgcactaatctaaaaagtgtattgccttcctagaagtctgagtaatgtcttacacacataatcacactgcccgtcttcatatggacatgagtcctatagtgcttgagaaatggaaattatttgactgcatcagctagtgcatcgtacttctggttattttgaatttttgtaatcagatgctgctgagctgtggccttttccccacctcctctctcatacatatatatgagtggtgtgttcagtgaaattttctgacatgaaaaagaagtccttaaaccaaaaataataataataataataacaataaagggaccactgtcttagaaaacattagttacccgttctctttccttctcaaggaggaatgacttcagtgcaattaacaatccgtgtctttstgtcccagtttgatcttgcccagtttgaaacagcttgcactactagattggttcttgtaagtgttgaaagttcttaattacaaattaaatcttgatcctgtaacttggtagtaatcctaccatctatatataactttacgattttcagaggactttct

SEQ ID NO: 704856 - DNA, 619 bp, Homo sapiens
agaatatttttgcatttgtagtgtttgcattattttctgcggctaaaatctcagaagagaggatgttaaattaaaaattcttaaccatgcattgccaatttgacctttgaatggcttttctcattttacagtgacattaggaataaattcacataccgacataaatttaatacctactgtgtgggaagttctgtgcattttgagtggcatagtgacaaataggacctgcttcaagtttcaaggaatttacagtgaaatcaaggatatagatatactatcaacttttataatattaggataaatggagcaagtggtacagtcaaaatctaatcaaagaaggaattttatagaagaacttgtatttcagccagggatagaggaaggggtggagtttccctgtacaaagggaggctggataatattccaggctgagagaacttaacggagaaacagccagaggtatgaaaaagtctacrgtgcatttggaaactattgaaatcgatggtgtggctggaacaatgggtgagagaaaggagcttgtaggagacttgaagtactttgccgaaggattttggttataatcagccagaattttcatttctgccactaattgcaaatg

SEQ ID NO: 704857 - DNA, 597 bp, Homo sapiens
ttattaccaacatttataatacaatattccaaatgtgtacaaatatatgcataataagacacaaaatcacatactaactcctaaatttttcctcacatcataattttttttggtcacatttacttttcaacttttttttttgagacggagttttgctcttgttgcccaaactggagtgcaatggcatgatctcagctcactgcaacctctgcctcccagattcaagcgattctcctgcctcagcctccctagtagctgggattactggcatgtgccaccacacctgactaattttgtatttttagtagagacaaaatgttggtcatgctggtctcgatctcccgacctcaggtgatttgccctcctcggcttcccaaagtgctgagattacaggtgtgagccaccacacccagcagaacattttgttaaagacataaaacaatacagatcagcttgagcctattcccmtgtttatttttcttcaatttcatttgcctctgttctttcctccatctcccctaataggtactaataattatgaatttggtagtcttccccccaatgataattaatttgcatgtgtaagtaatatttaat

SEQ ID NO: 704858 - DNA, 636 bp, Homo sapiens
acatacgtgcgtgtatacctacacacaggtatattgtgtacatacgtgcgtgtatacatacacacaggtatattgtgtacatacctgcgtgtatacatacacacaggtatattgtgtacatacctgcgtgtatacatacacacaggtatgtacatacgtgygtgtatacatacaggtatattatgtacatacatgcgtgtatacatacacacaggtatattgtgtacatacgtgcgtgtgtacatacacacaggtatattgtgtacatacgtgcgtgtatacatacacacaggtatattgtgtacatacgtgcgtgtatacatacacacaggtatattgtgtacatacgtgcgtgtatacatacacacaggtatattgtgtacatacgtgcgtgtatacctacacagaggtatattgtgtacatacgtgcgtgtatacctacacagaggtatattgtgtacatacgtgcgtgtatacatacacacaggtatattgtgtacatacgtgcgtgtatacatacacacaggtatattgtgtacatacgtgcgtgtatacatacacacaggtatattgtgtacatacgtgcgtgtatacatacacacaggtatattgtgtacatacgtgcgtgtatacata

SEQ ID NO: 704859 - DNA, 636 bp, Homo sapiens
acatacgtgcgtgtatacctacacacaggtatattgtgtacatacgtgcgtgtatacatacacacaggtatattgtgtacatacctgcgtgtatacatacacacaggtatattgtgtacatacctgcgtgtatacatacacacaggtatgtacatacgtgcgtgtatacatacaggtatattatgtacatacrtgcgtgtatacatacacacaggtatattgtgtacatacgtgcgtgtgtacatacacacaggtatattgtgtacatacgtgcgtgtatacatacacacaggtatattgtgtacatacgtgcgtgtatacatacacacaggtatattgtgtacatacgtgcgtgtatacatacacacaggtatattgtgtacatacgtgcgtgtatacctacacagaggtatattgtgtacatacgtgcgtgtatacctacacagaggtatattgtgtacatacgtgcgtgtatacatacacacaggtatattgtgtacatacgtgcgtgtatacatacacacaggtatattgtgtacatacgtgcgtgtatacatacacacaggtatattgtgtacatacgtgcgtgtatacatacacacaggtatattgtgtacatacgtgcgtgtatacata

SEQ ID NO: 704860 - DNA, 636 bp, Homo sapiens
acatacgtgcgtgtatacctacacacaggtatattgtgtacatacgtgcgtgtatacatacacacaggtatattgtgtacatacctgcgtgtatacatacacacaggtatattgtgtacatacctgcgtgtatacatacacacaggtatgtacatacgtgcgtgtatacatacaggtatattatgtacatacatgcgtgtatacatacacacaggtatattgtgtacatacgtgcgtgtrtacatacacacaggtatattgtgtacatacgtgcgtgtatacatacacacaggtatattgtgtacatacgtgcgtgtatacatacacacaggtatattgtgtacatacgtgcgtgtatacatacacacaggtatattgtgtacatacgtgcgtgtatacctacacagaggtatattgtgtacatacgtgcgtgtatacctacacagaggtatattgtgtacatacgtgcgtgtatacatacacacaggtatattgtgtacatacgtgcgtgtatacatacacacaggtatattgtgtacatacgtgcgtgtatacatacacacaggtatattgtgtacatacgtgcgtgtatacatacacacaggtatattgtgtacatacgtgcgtgtatacata

SEQ ID NO: 704861 - DNA, 636 bp, Homo sapiens
acatacgtgcgtgtatacctacacacaggtatattgtgtacatacgtgcgtgtatacatacacacaggtatattgtgtacatacctgcgtgtatacatacacacaggtatattgtgtacatacctgcgtgtatacatacacacaggtatgtacatacgtgcgtgtatacatacaggtatattatgtacatacatgcgtgtatacatacacacaggtatattgtgtacatacgtgcgtgtgtacatacacacaggtatattgtgtacatacgtgcgtgtatacatacacacaggtatattgtgtacatacgtgcgtgtatacatacacacaggtatattgtgtacatacgtgcgtgtatacatacacacaggtatattgtgtacatacgtgcgtgtatacctacacagaggtatattgtgtacatacgtgcgtgtatacctacacasaggtatattgtgtacatacgtgcgtgtatacatacacacaggtatattgtgtacatacgtgcgtgtatacatacacacaggtatattgtgtacatacgtgcgtgtatacatacacacaggtatattgtgtacatacgtgcgtgtatacatacacacaggtatattgtgtacatacgtgcgtgtatacata

SEQ ID NO: 704862 - DNA, 669 bp, Homo sapiens
gcaatattttataattgttgtgaatgccatgaggctttctcttgtactgggagaggagacagaagtgcaaaaacgagagcgtgtattccacagagaagtgacctgatccatcaacagccaaatctcatcggctcaagtgctctgtgtggataaaaatagggtcatgtgagcttcagatggggaagtcaaatccacgctcctttatttttcatccctggggtattatcaggctatatgaaagattagtgggtgaggctcccagttatgtttcttcttcattcctttttggtagtttctgtctcatcaaattagtcatcggaggttctactctttaatcttctgtcatggtaattgcatctcaaatgcactgtaaaggttttctattaacataccaagaattatttgttgatggagcagattagtaaagatcataatcttcactgagttcagaagatcaaggttcaagatcagcttagacattttctaactgtgtaaccctggacgttttaattaaactctgtctcatttttattatctgtacccagaaaattagtttcaggccggatacagtgcctcacacctgtaatctctgcactycaggaggccaaagcacaaggatcacttgaggtcaggagttaaaagaccagcctggccaacaaggtgaaaccc

SEQ ID NO: 704863 - DNA, 1065 bp, Homo sapiens
  misc_feature 1060, 1064: n = A,T,C or G
ttgctgtactgatcccctctttgatgatggttttgagaagatataatcgaacttcagtttgccagatgggcaagttcttggttcaggccttgttcagaggagctttcaggacccacttttccatatctcatgtaaatggttggagaagagagaagatttcaagaccaaagtcactggtagtcaggtatttattcccagcaagagaatcacatgcattagcttggctttgaggaatgcaaatgctctcagtgagtgtggggtgcaagtgtgcaaatgcagtgtcgttttgtggttgttgttatttttgtttgcttgttttttttttttttacagtaagggccctgagtgcaggttttgggggtggactgcctaggtactgcccacagctctgccctgcactggccagccaagtctaggcaaagtaggttttttatgaggccccctgataatcacagaacctactcatacataaggcagtcttgagattaaaatgagacaatgcatgcaaatcacatcctgggtttgcctgggaatctyagtaaatataaaataaaaaatatgatgatgatgatgatgatgatgatgatgaataaagatagtttttctaagagaggttagaaatctgcccaactaacaagcaagagagctgaaggtattttttttagcagctactattcaaaattggtgtcaagcttgtatcttgaaaccttactgggaatagctcacagtgtttgggcaacacgtatcaggcaccttgtagaaaactgtcaggacaacttccttggacctgggcttacttggtcctaagattgacttgtgttctctttggcatagcagtttagcctgtgcactaaataatatgcagtatctgattcagcaactcagccactgaatcaaaccctttgcatggatgatgccatttaatcctgaaactcattttctttctcctccttctgtctctctttctttctttctttctttctttctttctttctttctttctttctttctttctttctttctttctttctttctttcttttctttcttgctggttcttncttnc

SEQ ID NO: 704864 - DNA, 1065 bp, Homo sapiens
  misc_feature 1060, 1064: n = A,T,C or G
ttgctgtactgatcccctctttgatgatggttttgagaagatataatcgaacttcagtttgccagatgggcaagttcttggttcaggccttgttcagaggagctttcaggacccacttttccatatctcatgtaaatggttggagaagagagaagatttcaagaccaaagtcactggtagtcaggtatttattcccagcaagagaatcacatgcattagcttggctttgaggaatgcaaatgctctcagtgagtgtggggtgcaagtgtgcaaatgcagtgtcgttttgtggttgttgttatttttgtttgcttgttttttttttttttacagtaagggccctgagtgcaggttttgggggtggactgcctaggtactgcccacagctctgccctgcactggccagccaagtctaggcaaagtaggttttttatgaggccccctgataatcacagaacctactcatacataaggcagtcttgagattaaaatgagacaatgcatgcaaatcacatcctgggtttgcctgggaatctcagtaaatataaaataaaaaatatgatgatgatgatgatgatgatgatgatgaataaagatagtttttctaagagaggttagaaatctgcccaactaacaagcaagagagctgaaggtattttttttagcagctactattcaaaattggtgtcaagcttgtatcttgaaaccttactgggaatagctcacagtgtttgggcaacacgtatcaggcaccttgtagaaaactgtcaggacaacttccttggacctgggcttacttggtcctaagattgacttgtgttctctttggcatagcagtttagcctgtgcactaaataatatgcagtatctgattcagcaactcagccactgaatcaaaccctttgcatggatgatgccatttaatcckgaaactcattttctttctcctccttctgtctctctttctttctttctttctttctttctttctttctttctttctttctttctttctttctttctttctttctttctttcttttctttcttgctggttcttncttnc

SEQ ID NO: 704865 - DNA, 1065 bp, Homo sapiens
  misc_feature 1060, 1064: n = A,T,C or G
ttgctgtactgatcccctctttgatgatggttttgagaagatataatcgaacttcagtttgccagatgggcaagttcttggttcaggccttgttcagaggagctttcaggacccacttttccatatctcatgtaaatggttggagaagagagaagatttcaagaccaaagtcactggtagtcaggtatttattcccagcaagagaatcacatgcattagcttggctttgaggaatgcaaatgctctcagtgagtgtggggtgcaagtgtgcaaatgcagtgtcgttttgtggttgttgttatttttgtttgcttgttttttttttttttacagtaagggccctgagtgcaggttttgggggtggactgcctaggtactgcccacagctctgccctgcactggccagccaagtctaggcaaagtaggttttttatgaggccccctgataatcacagaacctactcatacataaggcagtcttgagattaaaatgagacaatgcatgcaaatcacatcctgggtttgcctgggaatctcagtaaatataaaataaaaaatatgatgatgatgatgatgatgatgatgatgaataaagatagtttttctaagagaggttagaaatctgcccaactaacaagcaagagagctgaaggtattttttttagcagctactattcaaaattggtgtcaagcttgtatcttgaaaccttactgggaatagctcacagtgtttgggcaacacgtatcaggcaccttgtagaaaactgtcaggacaacttccttggacctgggcttacttggtcctaagattgacttgtgttctctttggcatagcagtttagcctgtgcactaaataatatgcagtatctgattcagcaactcagccactgaatcaaaccctttgcatggatgatgccatttaatcctgaaactcattttctttctcctccttctstctctctttctttctttctttctttctttctttctttctttctttctttctttctttctttctttctttctttctttctttcttttctttcttgctggttcttncttnc

SEQ ID NO: 704866 - DNA, 1065 bp, Homo sapiens
  misc_feature 1060, 1064: n = A,T,C or G
ttgctgtactgatcccctctttgatgatggttttgagaagatataatcgaacttcagtttgccagatgggcaagttcttggttcaggccttgttcagaggagctttcaggacccacttttccatatctcatgtaaatggttggagaagagagaagatttcaagaccaaagtcactggtagtcaggtatttattcccagcaagagaatcacatgcattagcttggctttgaggaatgcaaatgctctcagtgagtgtggggtgcaagtgtgcaaatgcagtgtcgttttgtggttgttgttatttttgtttgcttgttttttttttttttacagtaagggccctgagtgcaggttttgggggtggactgcctaggtactgcccacagctctgccctgcactggccagccaagtctaggcaaagtaggttttttatgaggccccctgataatcacagaacctactcatacataaggcagtcttgagattaaaatgagacaatgcatgcaaatcacatcctgggtttgcctgggaatctcagtaaatataaaataaaaaatatgatgatgatgatgatgatgatgatgatgaataaagatagtttttctaagagaggttagaaatctgcccaactaacaagcaagagagctgaaggtattttttttagcagctactattcaaaattggtgtcaagcttgtatcttgaaaccttactgggaatagctcacagtgtttgggcaacacgtatcaggcaccttgtagaaaactgtcaggacaacttccttggacctgggcttacttggtcctaagattgacttgtgttctctttggcatagcagtttagcctgtgcactaaataatatgcagtatctgattcagcaactcagccactgaatcaaaccctttgcatggatgatgccatttaatcctgaaactcattttctttctcctccttctgtctctctytctttctttctttctttctttctttctttctttctttctttctttctttctttctttctttctttctttctttcttttctttcttgctggttcttncttnc

SEQ ID NO: 704867 - DNA, 608 bp, Homo sapiens
agaagtgaatatgccctgacccaccttaactgatgacattccaccacaaaagaagtgtaaatggccggtccggtccttgccttaactgatgacattaccttgtgaaagtccttttcctggctcatcctggctcaaaaagcacccccactgagcaccttgcgacccccactcctgcccactgagcaccttgcgacccccactccggcccgccagagaacaaaccccctttgactgtaattttcctttacctacccaaatcctataaaacggccccacccttatctcccttccctgactctcttttcggactcagcccgcctgcacccaggtgaaataaacagctttattgctcacacaaagcctgtttggtggtctcttcacmcggacgcacatgaaacttataagatgaatgaatacatgccatcaaaattgccagacctaactcagaaaacagaggtgtcattatcatttctgttatgagaaagcttttccacattacgtgatctttttactttctgaagttctagcagatatggcattttgcatttgctctctttggtttccagatgcatttacaatgtacctcaccaggtcaggtctcactgatg

SEQ ID NO: 704868 - DNA, 629 bp, Homo sapiens
ttgaggtcaggagtttgagaccagcctggccaaaaccacccatctctactaaaaatgcaaacattagctgggcctggtggcgggtgcctgtgatcccagctactcaggaggctgaggcaggagaattgcatgaacccgggaggtggaggctgcagtgagccaagatcgcaccattgcactccagtctgggtgacagagggagactccgtctcaaaaaaaaaaaaattccttcaggtcctgcatacctacgaaactgttgactcagctggtccagaggaccccactgacacaygctggcctcacagcaaagaaacagttttgaaagacatctttgctgagttttccatgctcagctggcactccctttctcttcggagttcctggcctcctcaggggtcttgtggcctctccagaggtcttgcggcctcctcaggggcctggtcaaccctccttagttataggaatggcctcatttgaggagattccctccaataggagggagacgcttgcagagcaggattcatgaacaatccgtgtaagtgcggggacgatgcctggcatgttacactccagatgccggctgtcagtagcgccatcacagtcactcatgtctgtggttcgcttcccac

SEQ ID NO: 704869 - DNA, 629 bp, Homo sapiens
ttgaggtcaggagtttgagaccagcctggccaaaaccacccatctctactaaaaatgcaaacattagctgggcctggtggcgggtgcctgtgatcccagctactcaggaggctgaggcaggagaattgcatgaacccgggaggtggaggctgcagtgagccaagatcgcaccattgcactccagtctgggtgacagagggagactccgtctcaaaaaaaaaaaaattccttcaggtcctgcatacctacgaaactgttgactcagctggtccagaggaccccactgacacatgctggcctcacagcaaagaaacagttttgaaagacatctttgctgagttttccatgctcagctggcactccctttctcttcggagttcctggcctcctcaggggtcttgtggcctctccagaggtcttgcggcctcctcaggggcctggtcaaccctccttagttataggaatggcctcatttgaggagattccctccaataggagggagacrcttgcagagcaggattcatgaacaatccgtgtaagtgcggggacgatgcctggcatgttacactccagatgccggctgtcagtagcgccatcacagtcactcatgtctgtggttcgcttcccac

SEQ ID NO: 704870 - DNA, 629 bp, Homo sapiens
ttgaggtcaggagtttgagaccagcctggccaaaaccacccatctctactaaaaatgcaaacattagctgggcctggtggcgggtgcctgtgatcccagctactcaggaggctgaggcaggagaattgcatgaacccgggaggtggaggctgcagtgagccaagatcgcaccattgcactccagtctgggtgacagagggagactccgtctcaaaaaaaaaaaaattccttcaggtcctgcatacctacgaaactgttgactcagctggtccagaggaccccactgacacatgctggcctcacagcaaagaaacagttttgaaagacatctttgctgagttttccatgctcagctggcactccctttctcttcggagttcctggcctcctcaggggtcttgtggcctctccagaggtcttgcggcctcctcaggggcctggtcaaccctccttagttataggaatggcctcatttgaggagattccctccaataggagggagacgcttgcagagcaggattcatgaacaatccgtgtaagtgcggggacgatgcctggcatgttacactccagatgccggctgtcagtagcgccrtcacagtcactcatgtctgtggttcgcttcccac

SEQ ID NO: 704871 - DNA, 646 bp, Homo sapiens
taatatctacatagttataactatatccattcatatatagatccatatctatatatatggataaaaaaagacaaattggaaataattacctttgtaattttaagtattatatttgatttttttaaatgaataaattactcaatacctataaaaagctcaaagtaatacttgacccatgtttattgtggaatacatgttattatctatttttgctatttaaacttttagagtttttttacgtgtctgtatctgtgttttttttycctgtgtgctcaaacttacagacctaagtgttctttgttccatagcagaaaccaagtaaggctcctaagtgactgtggaaatcctccacaccttattcaatatcagagcaaaaccaatgggaaagggattaaagttattgtgattttcagcttcctaaagattctgttatttgtgtggagaagaagtaatattgtaaggtgataggacattgaattttacatttattcaacacaacctagatttggctgcttgttaaggttaaatccgacaagaaaagggacctttcaagccagtctatgaaataagcattattggatgtctcattaccatcagtccctcttcaccaggtcactcataatacctgtagccccagctactgact

SEQ ID NO: 704872 - DNA, 656 bp, Homo sapiens
aaggaagggaaaaaagtgatagcatataaacaagaaagagaaaacttagtttatagaagacgttactgagtattctgaaattttaagaaatttttaaaaagttatcagacatagcaagtgaacttaagatcacaagatgaaagatcaaaatataaaattcaagtatgttttaatgtaacagcaataaaataayagaaatttaaaaatacaatttaaaagtagcatcattgtggtgcatgcctttaatcccagctacctgggaagctgaggtatgagaatcgcttaatccatgaggcagggcggggttgcagtgagcagagatcatgttttcaggtgacctctgccttcagttttagcgttttggtttactcatcctcacttgagtttcaaatcattttgaagttctttcctttgtttcccactgagacaaatttggagtccatcacttatttttgttccctgcttttcttaataccaacaacttttacaatgtattttgtattgtattttgtataatgtattttgtacaatgcattttacaatgtaatggcagacattaggcttgcctgaggaattgaaccaaaatatttaaatctcaaaagtgagggccactaccacagacatcttggagagtctcttccttgtttctctcttca

SEQ ID NO: 704873 - DNA, 1086 bp, Homo sapiens
tgcaagtgtaaattcttaaaactataatcaaaatgtccatagacccttattcctgtttactagataagaagtagcattaactttataaacaaatattgttcacgtgttgctcttgccactgcctggacctgagagtctttattagtaaactttctccacttatttttgtttgcaacttggggatgtcatgtcatttagcctgaatcttctcattgaagatttgcttccaacctgaatgaactgttttactttcacagcttccagtcccctatgaaaaacagtcagtcctctgatgtttctagttcctcacctccatctgctaagagctgtagctttcccaggacaccacctgggctcccagtgtacagagcaggacagaaggaaggaatggccccgtattcaactcttgccatcagcacacagatcaacaatgcttgaaatatactcatttgtaagttcacccttttaaccagctgccatatctcaagcctctgtaatgaggctcaaaagacacctcagagataaaactggcagaataccctttccttcactgtccttatctccattatccttccttccagactcctgyatacacagacatgcacacacatgcacaaacacacatgaccccaggcacacaaacagacaaaagcttaaccatctaacaatatttttttaaattttatttatttcttttctcaatccaaacaaaagccctcttacctgccaacacacgcaaatgataatttggaaaattttcctgcccattagttcggcaaactgctagacttggaacccaaacaaccatatcatattcctcacgttgtgtactgggcatcaaaaggtaaatacttatcatttatacatattgtttttacttgttccagtgtttgaattattttacataaattagcaaagaacaattaacaatttttacacaaattagcagagaacaattttacataaattaacaaagaacaatgcaaggaaagagaagtcaacctcacttaggttcatatttataacaactacatcatagaatttattaaaggattgaatgagttaatatttataaagtaactatca

SEQ ID NO: 704874 - DNA, 1182 bp, Homo sapiens
ggcaagagatcagagatgccactcaacatccagtgagcaaagggcagcccccacgccacagaatgatccatccccaatgtccatcgtgccacagtggagaatccctgcaacatccagctgcagatagtaccttgtatttccaggaggggaacgagatgagaaaggcttgaggaagaacatttgctgtgtcacatgatcttctgtgtttacagcagagtacacacttgcaaatcagtcagctagaattaattctgcaattcttaactctggacagaatattctgaagcatgaagccactgaactgcttgcaaacattcatgtgcagcttccagcaatttaagattcacagaaataatctgcagtttgtggatcaaccttagtaaaaagacaactgctaaccagaaataataaagaacaggttccagaatatctgaaaccttctccagtttctgcatgacatcattttaacattttaacatttgtcaagaaagaatgttccacatttattttactggacaaatagagaaacagttattctcacagtccataaggcatataatctcacactggaatgcccatgacatcacagctacaaacgcttaacacgcgtgatttttataaaaccaacaagccttttctcctctctttaatgaaayggtgtactctcaggcttatttctggattttgtaagtacaagtacagaggctgcagaatggcctgggccttggaatctggaagcttctccacagcaatttgcatggggacacaggacgagtgaccctcagggtgttcatcaccaccatcttaccctgaaactttgatcagttcccagataacttgcaggaacccaataacctagagggaagagggcagagaagtgaaagctgtaaacaatagagacttaagatcatgagaaaacctctaagtaggacaatattcagactcgtaatacgcaccctgaggtgaaggggagggcaaatgggagtcaattatccactcttgttcctcaaactcattggtcaccccaagatgacagacccacttgctttcactcacattcactttgcgcttctgcccgcccaccagccacatggactttagttcttccaactcctgcctttccctctggcctgtgcagatgcccttcctttcctggactctccctccatctgtgactggtga

SEQ ID NO: 704875 - DNA, 1283 bp, Homo sapiens
  misc_feature 624, 625, 626, 627, 628, 629, 630, 631, 632, 633, 634, 635,636, 637, 638, 639, 640, 641, 642, 643, 644, 645, 646, 647,648, 649, 650, 651, 652, 653, 654, 655, 656, 657, 658, 659,660, 661, 662, 663, 664, 665, 666, 667, 668, 669, 670: n = A,T,C or G
  misc_feature 671, 672, 673, 674, 675, 676, 677, 678, 679, 680, 681, 682,683, 684, 685, 686, 687, 688, 689, 690, 691, 692, 693, 694,695, 696, 697, 698, 699, 700, 701, 702, 703, 704, 705, 706,707, 708, 709, 710, 711, 712, 713, 714, 715, 716, 717: n = A,T,C or G
  misc_feature 718, 719, 720, 721, 722, 723: n = A,T,C or G
aagtccaactttattaattttttgtattgaagtatggtactgaaataatattttaccatattttccatgaaccttgccagaaaatatatctgggataattaagtgttatacatattactacaaaggaagtaaggactcttcattttcaatcctaatgaccttgaacaagtaacttcgtttctctggatctcatttctttttctttttctttyttttttttttttttttgagacagaatctcacccaggctggaatgcagtggcgtgatctcggctcactgcaacctctgcctcctgggttcaagtgattctcttgcctcagcctcccgagtaaccgggactacatgcgtcagccaccacactcggctaatttttgtattttttattttagcggagacggagtttcgccatgttgggcaggctggactcgaactcctggcctcaggtgatccacctgcctcggtatcccaaggtgctaggattacaggcgtgagccactggtcccggccggatctcattttctcaccagaggatggaattagatcactggttttcaaacggtgctctgcagagtcctacagattagaaatgctttttagtctcccacacaattctgactttgtannnnnnnnnnnnnnnnnnnnnnnnnnnnnnnnnnnnnnnnnnnnnnnnnnnnnnnnnnnnnnnnnnnnnnnnnnnnnnnnnnnnnnnnnnnnnnnnnnnngtttcactgcttggtcgtttacaaacaacatataaacgtactttatgatagagttattctgtaaactcccgtaatgcaagatttccaaaaaaaaaaacataatacaagagttgcaaatatacatattcgggaattcttgacacttttgtcatctagtttaaaaatcatctgagaaagaatgtaatgaattcatttaactgtgagttacattttaaatattttgtagagacacaaactctgaataattaactctgttactactcaataatttaagtggaatgacccttgacagtctgtttgtaataactaacagtgcattttaattattttttttaaattagaaatgacatctctagagttcaagattcttgggagcaaaattgaacttttaaaattggttagtatagagggttatttttcttaatgaaaataaaactgatttgcattttaaaaatctgggtacactttttaaaatgattatgtcagtaatttaacattaggcatatattagagagaattataccttttctttctatctcttcataccaatcttctggtat

SEQ ID NO: 704876 - DNA, 819 bp, Homo sapiens
tatgaatattacactgactaagaatgcagtcatatactgctgagatacatttggtgttattatttagctaacattctattaaattttatataagtgttatttacctagctagtagagagttccttcctactacggaataggaattaccttcctttatataatcccactctgcctgaagggtgaaatagctagatagacagacatttgttgaatgaatgtagtcactgtaagcaaataaaaaatagtgggaaaaattgtaaaatgcctaacatttcatattctagtttgaatataattacagtagtttgtttcataatctttattgcctgagataaagaccattactgacctttaaaaatgtacattattaaggataatcagaatgttttcattaatatcatatccattaaatagcagttaaaatataagtcattagaaaaataaaatagaagaaagattgtcattattctctttagttttcacttttgatttaaaaacacacatgagatgaaaactgtattyttaactttgacccagttatgatgttgacgcaacctgaactatgcccctgaatgccaacctgtaagtggaggttattgcttctttccatgaaggcgtaaattcaattcacatgtaccaggcatttaggaaacaaagacattaaggagatacaattcctgccttcaagaaacttaggggatagtaggaacatttttacgttttttcatgctcaaagacaaaacagtttttgtttatttgttattgttgttgtctgagtagatattatgaaaatttgacccctgtatcatttgggaaaat

SEQ ID NO: 704877 - DNA, 819 bp, Homo sapiens
tatgaatattacactgactaagaatgcagtcatatactgctgagatacatttggtgttattatttagctaacattctattaaattttatataagtgttatttacctagctagtagagagttccttcctactacggaataggaattaccttcctttatataatcccactctgcctgaagggtgaaatagctagatagacagacatttgttgaatgaatgtagtcactgtaagcaaataaaaaatagtgggaaaaattgtaaaatgcctaacatttcatattctagtttgaatataattacagtagtttgtttcataatctttattgcctgagataaagaccattactgacctttaaaaatgtacattattaaggataatcagaatgttttcattaatatcatatccattaaatagcagttaaaatataagtcattagaaaaataaaatagaagaaagattgtcattattctctttagttttcacttttgatttaaaaacacacatgagatgaaaactgtattcttaactttgacccagttatgatgttgacgcaacctgaactatgcccctgaatgccaacctgtaagtggaggttattgcttctttccatgaaggcgtaaattcaattcacatgtaccaggcatttaggaaacaamgacattaaggagatacaattcctgccttcaagaaacttaggggatagtaggaacatttttacgttttttcatgctcaaagacaaaacagtttttgtttatttgttattgttgttgtctgagtagatattatgaaaatttgacccctgtatcatttgggaaaat

SEQ ID NO: 704878 - DNA, 551 bp, Homo sapiens
aaaaaaagagagagagagagaataaaatagatatcaaagttgaatttcaaaactttagaggtgaaattatctttcattaaccaaagagaagggaaacaaggaatgtagcccctaaattatttcggttaaggctgtaatttgttctgctggagcaayaaggcattaaaatgtcattttttttctgcaagtatgcttttgttaaagaaatccaccaatttctagagacctaaaacttactattaaatatccactccattaagttaaaggaggaattacaggactttttgcttttaagaaagagtgagttgtctgtgggtttgtcatagtaaatgtggcacatatacaccatggaatactatgcagccataaaaaatgatgagttcatgtcctttgtagggacatggatgaaattggaaatcatcattctcagtaaactatcacaaggacaaaaaaccaaacatcacatgttctcactcatagatgggaattgaacaatgagaacacatggacataggaaggggaacatcacactctggggactgttgtggggt

SEQ ID NO: 704879 - DNA, 551 bp, Homo sapiens
aaaaaaagagagagagagagaataaaatagatatcaaagttgaatttcaaaactttagaggtgaaattatctttcattaaccaaagagaagggaaacaaggaatgtagcccctaaattatttcggttaaggctgtaatttgttctgctggagcaataaggcattaaaatrtcattttttttctgcaagtatgcttttgttaaagaaatccaccaatttctagagacctaaaacttactattaaatatccactccattaagttaaaggaggaattacaggactttttgcttttaagaaagagtgagttgtctgtgggtttgtcatagtaaatgtggcacatatacaccatggaatactatgcagccataaaaaatgatgagttcatgtcctttgtagggacatggatgaaattggaaatcatcattctcagtaaactatcacaaggacaaaaaaccaaacatcacatgttctcactcatagatgggaattgaacaatgagaacacatggacataggaaggggaacatcacactctggggactgttgtggggt

SEQ ID NO: 704880 - DNA, 653 bp, Homo sapiens
tgctcccttgataaggcacattatggcaagttgaactttttttttttgagtgtttttgaatttcattaataatatttaaaatatttctatatatttgctttccagctatagtttctcttttaaaagtttaaattaatttaaacaacatattttaaaaagttttttttgtttaaaacattacgtgtattttttaaccaatgaaaatagtaggcaaaagaataatatattttcccagaaaagatatgttgttgaagaataaagcactcatttcaatccttgggaaaactgggcaaattattatgatgtaatactgaagcagttttgcatgaaaaaatacaacagattaaagaggcaacatctaatatgccagaacaatagaaattacaaccaaatacagaatactctaacttagagatgatctattcactgccatatacattcaaatttcattttttttctttttttttgagatgaagttgcccaggctggagtgcattggcaygatttcagctcactgcaacctctgcctcccaggttcaagcgattctcttgcctcagcctcccaagtagctgggattacaggtgtgagccactacagccagctaattttttttaacaactattttttttaattattattatactttaaggtt

SEQ ID NO: 704881 - DNA, 659 bp, Homo sapiens
tctatcctccagcccagtacttcgcaaatttaacggtgctccaagatcacccgagaagcttgttcacataaagcctctgattcagcaggtctaaggtggggtctgagattctgcattttgagcaggcttccaggtgaggccagcgctgctgggcccaggctttggccaggtgaggggctcagcccagcccaggcttcccatcctctccccatggtcctggtggcaaatggccatgatcaaagagccagccacctccttcccgcctctgaagctccctccagctggcagatatttaaaagaaagcaygaaagttcagggagtgaacattccttccagattccttccagatgttcctttcagatgttcctcccaccatcctttgataattttttcacttcaaggaccatctcgtgttttcacctccccgtgtatgggtgctggctgacgatccgatcacatgagccgcgtgaaggctctgaatctccacggtgccatctccagtttctgggcatcgcgttcctctcaagaatgaacggcgatttcaaaggaccccaacactgggtgatggcgtgcaaagtgttaccgagaaataaacttcaagcagtgaagacagatggatgagatggagctgtgattgaacatgtctcagaggctagaca

SEQ ID NO: 704882 - DNA, 952 bp, Homo sapiens
tctgtcagtctcagcagagttcttgctctttctttcaacatgggactaacaaatgttactttgacattatcctctgtccttcttataggtaattgtttcattagtctttgcttttcttgttctctttcttttttttaacttctcaaggaagtaccttatatttgtgagaaaacattcagctttgctgagtcctcaaaccattgcaaaatgccctctgcttttactgctgtagtgtaactattgtcctcaaactcagtaatggcctgttggtttgcataatcaattgaccattttggagccgatatctttctgaatctctctgctacatttcacagatgtttctccgaggagctctgatatccttgattctcaagacgccaccctctcttgattaccactttttgtcttggacttccccttcaggtcccctttgagagacctctcagttttctttcccttagaggtaaccaaactgatttcagctttcggcgcttctcactctacacaacctctctcagtgacatcatattcttccataattttattcatgtattcattcagtccttcattcaacaaatctctggcattctcactatcccagggaatattccagatactgcttatagaatgaagatttaaactcatggtctaagattcttgttattatatrtagacaatacacaaataaatagtccaacatagtttcttagtggtgataattctaatacagaagaataaagcaaattggtggaacgagagtgataaagagtgccatgtattaagatacacttcaacaataaactgggtaaaatgaagaagacattttctaagagaagaacatttcagaaaaaaaaatgtcagagcactttgaaaagcctctgtgtttgaagtatgcttggtgtatcttggaaatatcaaggataccaatatggctgaggtggagtgagcaaga

SEQ ID NO: 704883 - DNA, 663 bp, Homo sapiens
tcagtttaccacagatcgcctcatggttttgaaaaccagtaagctgagctgaaaaattttttgtgagttaggttttgaaatgtgtggtgtcattagcgtgttcaccaaaaattcccagctttcatcctttcagacacgtattagattgcatttccctattcttgttgaacagggctatgcraacagtagtcccatcaatagaaacattaagaggtgagtatccctctggtggaaactttacaagccaaagtgtgttcccttcccacttctaaggctctcgtggaagcacatgtcacagagaagcttctgtcctcctgacccttgactggctttgaagagtagacctcaagccaagtcccatgtgatatacaggatgactgagaaataaccttatgttgggttaagctactgaaatttgggttgcttgtcaccaaggtaaaatctagcctatcttgcctgatataaaatgtcacattaacattttgacaagttggccattgtatactgccaagcatactagacttgccaggaaatgaatctgcagctggctactttgcagaacttctcctctagcttttaaattctttcttcactggtgaagactgagatcagacagactgaattcaaactctgtctccactcttgactatccctgtgattgag

SEQ ID NO: 704884 - DNA, 1137 bp, Homo sapiens
gttttggctccatttgcatatttatttcaatattcctggtccataagagtatcttttctttggattctcctttgggtcagttataacatgtgccttatttcctcagagggaaataaaactttcacatgagctcatttggtatctgttttgagagtcattatactttttttaaaattattctttaacaagggccaaaaataggtatctttgattcccatctacgagaggtctacccctttcttgaaagtgcacattctaattaaggagatgttcaatgttgaaagtaatttttttgagatgtcccaaccctcttttcccttttgctctcattcaaacagttaagaccctatctcattgcctcaggggaggcaggggcaaaactaacaaaatacaacgaaggagtttgtaaatctttctggactttgttttcctaaagctcaagttcttccaagagtttagagaagtggagtgggagaggacctgaatattgggggaaaagagaggagatggggttttccttccagaaaacgagattacctcagattgggggaaggagggagaggcagacgcaacaggaccaggccctgagaggcgaggctgcaggggctggatggactggagcccagaccacatggaattagagaaaggctgcgctgggagggccctgaaaatagggtcctgggaggtcaggctgacccctgtggactaaagatccttgacagcgttcgcgtgtgtgtgtgtgaacaaatttggcctctaaccttccgggcagtcttgactcaagaggcaagctgcagtcttataaactcatttgtgtcctggactacattttagaagtgaaaaaaagggcagaaaataccagaaagcatagaatgtggtaaawggaggtgtttcataaacctttttgtttcagctgagtcagtatgcatattaattttctttctatgatcaatctatataattttactgtgggttctgagccaaaggaaaaaaacattgcaaaaaactgatgctaaaggcatttttaaaagtcaaatttaactctattagcccagctgtattcagaagacctgagctttccttttcttctttcaaaatggctccaaaggaataccacattagggctgaaataaattt

SEQ ID NO: 704885 - DNA, 665 bp, Homo sapiens
ccctgcctcctcaccacctccccaggagggattttcaggcacctacacctcacccctggtgcctgggctccaccaccaatgtcaccctactcccaaggtgctgacagagtcatgttggtggaggcctccgcaccggtacagggagagtcaggacttggcatgcaccctgcaatgttgtggggagaggcatagtgccagccatcctgcactccctggactggcagtgctgcagtgcaattgctgctgactcaatgrggacctctcgcccactctccatctaggtaccaagagtgcccagtgcagatgtgcaatctcttggggttacctgcccactatgagctgcagtggcaggccagtgggaaggggagattggcatccccacaccagtctggtgagtagagttgttttagaagaagccagggacaccagtgttgacattagaggtggtgagaagaatggcattcaggattcttgcacagaatgctgagtacccacatgttccttctgcactgggctctgcaaattatgaagctcaccctgtcacttcacctaaagataggccaacttgacatctgtggggcttaagcctgctcaaatgggttgaaggcggggcgaaacccagccttgggtttcaggcagccatcttgcattgtttgttcttccta

SEQ ID NO: 704886 - DNA, 602 bp, Homo sapiens
gttgagatgtctgcaatttggttgatattactcaataccaaagagaaggcaaagtgtgttctctgctctctccttgccctcttgtttctcagaacatgctgctgagctgtttatcagcttccactgtccttcccagcctcccccaccatggagggctaaccacaaatgatggcagccaatcatgggccaggagaccccagctccagctgccacctggctctttaggaagcttagctcaggggggcctgagtgtagaaccatgtgcgagagtttgctggggcactggctgccagttccctccctgagaatgtttgggttggaaatggtcttgtcagtcagtataagccccagcttttgccagggttctatatctctgtgcctcagttccacatctgtaaaaaggaaaggctagtagtatatacctcaaagagtcaataatgttatacaatgacagttattataggaaaatacttgaaacgatgtctgcctctttgtagatgttcatcagatattaacaacactatggaatttttttattattatcttgaaatgttatccaaacaatctcagaacstttcaacctggtcaaatcttgctgagga

SEQ ID NO: 704887 - DNA, 2021 bp, Homo sapiens
  misc_feature 1936: n = A,T,C or G
gttggcttaagcctgtgtgagaacttaacatgtgctgagctctcggataggtcatgagaagccacttcctcacagaagaatagaagaggcayggggctgagattgagttgaggagctgtttgggcgtgcatgggaagggatgcatccatttcctgcccctgtgtcccagcaacacaggacagaggtaggaggagatgtggagatgctgaggtatgttctaaagattgagatattgagaccattcagccatatgggaacccagtaaaggggcttattccgttggtctcttgctcttctttcagggaaaacatgtactcttacctatttgtatgctgcataggagtgtgcgtgcttttctgtgtgcagaaaagctctttctgtcattaatatttccttcagtggtatttcttaaatgttagttgattagaaaagtgtgtgtgtgtgtttctgtgtgtatatgtgtgcacacacataccaaactttgttttacacatataaatacaccattgtttaaaccaattattgtgatgggacaaatagtaatatacaattaaaatatgcatatctacatagactatattgcatgttattactctaagttcacttttatttatatagattcgtcctttttcacatccttcatttctaaaactgcaatctttttctttaaagcatttgatttttgcctgtgattgcattaaatgcatgctaaaatagagctaatatataatgtatcctagacttctatgtatttcaacccttggagacaaatcaaaactgaaatataactcatgattcattttgtaaaattcaagtttcccataatcttaataaaatcttctcaaactaagcatccaaaacgagctattcaataatcaaatactgctggctttgtttcctgggaggaaaggctaaatggaacattttaagcaaatcatggatgcaaatgtaatgcattacttcagagcctctgtgcctgatttcaagaatatcagttcactgggctgtaccaggatctagtccaaaatgaatgaaccatgtggacttaaaagtggatctggatggcaacaattcaccacaggttatttccatcctgtgagattgcattccccttgttccgtttctgtgaataaagaaaaaataaataggtctagcaatgtaattccttattgtattgatcagactctcagcattaaaaatgtctgccctttaaccttttcctcttcataaatctttcagtgactcagatgagcatgacatgaatgtgttccccagaagacactgtaagcaatactttttttattactgacagtgtaaaaaatggacatgttttaagccctctacaaattgctatttaaaaacacaagacatgattgatcaccagatggagcagtaaaaatgaaaactgggagataaagatggaatacaaatatttaatcataaatgggaaaacaatgaaaatctgaggatagctatattctgcttgcagataataacctttcatatgagaatgactcacttatggagtctaacatagggacataaatccagttgcatcataaatacaaatttttgcctggaacacacttgcttatgactgaaaacatttgtttagctattctaacttggaaaagtctaatatattagaattttgacatcacaccagtcaagaaacattacttcttataccaagaaaaaagtcttggctgtgtcctcacccaaacctcatcttgaactgtagttcccataatccctgcacatcatgggagggacccagtgggaggtaattgaatcgtggaggccgttaccttcatgctgttcttgtgatgtggatgagttctcacgagatctgatggttttgtaaggggctttcccaccttgtctctgcacttctccttgttgcctgttgtgaagaaggacatgattgcttccctcncaccacaattgtaaggtgtaagttcagcacggctgaggtctccccagccatgctgaagtgtgagtcaattaaactctttccttta

SEQ ID NO: 704888 - DNA, 782 bp, Homo sapiens
aaaaaaacctccattgagtttatgaaacaaatgccagtgagatggaaattattcgaattcctcccacattccagaaatcctctgaaatcagaatactgttttgctttggtatattagccataatggacaactgacaccaggtggccccaaattgtatctggggtcagttccctgaactcaaacartgttatgaccatggactttggtaaaatttaaaattttatttatcatgttataaagataaattttatttatcatgttaaaaattttatttacatgtacattttacttatcatgttataaagaatttcaaattttatttaccatgttataaagagagggttttctgtgctttgattagaaatacatatacttaatatattgatattcattacaaattctttttttccattctggttcaaattggtaggttctccagatcattactctgcctctgattgttgcattctatgacatacagggatattcattgcttaaaaaaataaaaattatttcctttgatttgtgagtataaacttcagttcaaagatctattgttatatttgtcttgctttttggcacttgcacaaactatatttttctgattagaaaaagcagcattcacctgaatctgcagagatagccattgctgacagtggtcaaacactgataacttgaggataaatttgtctattgttttgaaaccatttgaaatattttcttgcatcttccttttcctttttttggtaatctttttacatttttttaatgaactttaaaaa

SEQ ID NO: 704889 - DNA, 577 bp, Homo sapiens
tatatatatatataataaaataagacatagttatataggagataaataaaataagtcaaaatactgagaagacatcagcaaaaacagaagagtaatgaattccaaaaatttcccctccataaaagcaataaaaaatgggtaaaaattctcaaaatcaactttttccagaagtctgaaaattaaccaaaagctcccagcaacccagggagaatttaatcaagaaaaattgctgaatctcataatgaaaagcaagccttgtggcaattgaacatactctagtctcatcctttacttcccagctctgtggcaaccttgaaaattaacagctacattcccagtgcctgagagagtattatgggtctagagtactttaaaaggcttaatcccaacaaaaagctattaattggcctatttggtgtttccctrgcatatactggaaaggtgtcactctaactttcttctcttcagaggcctttgttgaatattttttaattacagctacctgaggtaatagataatagttggaccaaacaataggctaaccaaaaaacttaaaaggaaaagctgagaagtgaga

SEQ ID NO: 704890 - DNA, 671 bp, Homo sapiens
cctggggtttgaggaatgcagccttgctgggcatcactggcctgcacatccagatgcggctgctctttctcaccccacgcttgccctggtcagccagagcctgagcacccgcacttcagccgacagagtgctcactggagcagcatcagagcccctctgtcctcttcagaggctgggtcagagcaacttcacttcgatgcatgacacctgagaggcacctgcacacaggtgacagctggagagaaaagtcagcagcctgccttgccagagggcagacagaccacgcttggacttcagtttccaggcggaacaaaaggatctccacattttttaccttaaaaattaattgacaggtcctgtctgttcccaagtgtctaacatctaagagggttgggttcatagtctggctgaggatatcctttccctcccctcccatttttactgtaaaaacattttgactagaaaaagaaaacctcttatatactcactatcccaggcaagattcttcttttttctttttcctctctggttgttttttttgttttktttttttgtttttttttttcatttccttacattctctgtgcatttgcctatgcaccgtgggatttaaacaatagattgggaaaacagtggagagggcactgagggtgcccttttgtggtagaaat

SEQ ID NO: 704891 - DNA, 671 bp, Homo sapiens
cctggggtttgaggaatgcagccttgctgggcatcactggcctgcacatccagatgcggctgctctttctcaccccacgcttgccctggtcagccagagcctgagcacccgcacttcagccgacagagtgctcactggagcagcatcagagcccctctgtcctcttcagaggctgggtcagagcaacttcacttcgatgcatgacacctgagaggcacctgcacacaggtgacagctggagagaaaagtcagcagcctgccttgccagagggcagacagaccacgcttggacttcagtttccaggcggaacaaaaggatctccacattttttaccttaaaaattaattgacaggtcctgtctgttcccaagtgtctaacatctaagagggttgggttcatagtctggctgaggatatcctttccctcccctcccatttttactgtaaaaacattttgactagaaaaagaaaacctcttatatactcactatcccaggcaagattcttcttttttctttttcctctctggttgttttttttgttttgtttttttgkttttttttttcatttccttacattctctgtgcatttgcctatgcaccgtgggatttaaacaatagattgggaaaacagtggagagggcactgagggtgcccttttgtggtagaaat

SEQ ID NO: 704892 - DNA, 671 bp, Homo sapiens
cctggggtttgaggaatgcagccttgctgggcatcactggcctgcacatccagatgcggctgctctttctcaccccacgcttgccctggtcagccagagcctgagcacccgcacttcagccgacagagtgctcactggagcagcatcagagcccctctgtcctcttcagaggctgggtcagagcaacttcacttcgatgcatgacacctgagaggcacctgcacacaggtgacagctggagagaaaagtcagcagcctgccttgccagagggcagacagaccacgcttggacttcagtttccaggcggaacaaaaggatctccacattttttaccttaaaaattaattgacaggtcctgtctgttcccaagtgtctaacatctaagagggttgggttcatagtctggctgaggatatcctttccctcccctcccatttttactgtaaaaacattttgactagaaaaagaaaacctcttatatactcactatcccaggcaagattcttcttttttctttttcctctctggttgttttttttgttttgtttttttgtttttttttttcatttccttacattctctgtgcatttgcctatgcaccrtgggatttaaacaatagattgggaaaacagtggagagggcactgagggtgcccttttgtggtagaaat

SEQ ID NO: 704893 - DNA, 540 bp, Homo sapiens
aaggatcctgtgacattctgggaagtctttaccatgccagtccccccatcctttccctgaagggtctgtggcaatttgttcaggtgaccgtgcgctggaaaaagggcaacaagcagacgtgtcgaggayttctggatatggggtctgacattgatcccaaaaggcccaaagcatccacacagccctctgtgtgggtgggggtgcaggtgacaagtggcgtcctgacgcaagtccagttcacactggtccactgggcccgtggggcccgcctgcggtcctttccccagtccctaagtgtgtcattggaatggatctactcagcagctgaagtagatcaggacccacctgactctcctccactgaccatgaccaaaactctccatctgccctaaaaacttgcttctcctggcttcctacctgaggacaccactgtccaccaggtcaccatcctctaatggtcacctgggccatcaggtctctcctgcacccccaagagtgacactaagtcaacacagcctgtaggatcttcctggaagcagg

SEQ ID NO: 704894 - DNA, 540 bp, Homo sapiens
aaggatcctgtgacattctgggaagtctttaccatgccagtccccccatcctttccctgaagggtctgtggcaatttgttcaggtgaccgtgcgctggaaaaagggcaacaagcagacgtgtcgaggacttctggatatggggtctgacattgatcccaaaaggcccaaagcatccacacagccctctgtgtgggtgggggtgcaggtgacaagtggcgtcctgacgcaagtccagttcacactggtccactgggcccgtggggcccgcctgcggtcctttccccagtccctaagtgtgtcattggaatggatctactcrgcagctgaagtagatcaggacccacctgactctcctccactgaccatgaccaaaactctccatctgccctaaaaacttgcttctcctggcttcctacctgaggacaccactgtccaccaggtcaccatcctctaatggtcacctgggccatcaggtctctcctgcacccccaagagtgacactaagtcaacacagcctgtaggatcttcctggaagcagg

SEQ ID NO: 704895 - DNA, 1030 bp, Homo sapiens
gagggatcattggtggtgttaaattttaaatatattctttgwtttagaatataacaatatgtctgttgttttgactgggactctgtgcccgtagaatatttgttcttccctgcatgtgacaaatttaaacttaacatatttaagtactaggtgaaaagtgtttcctttgcattctctgttacattcagtatcttctttcttgaaattttaggggatactccattttatgcggattcacttgtaggaacatatagcaaaattatggatcataagaattcactgtgtttccctgaagatgcagaaatttccaaacatgcaaagaatctcatctgtgctttcttaacagataggtaatgtacattgaatttctttgtagagaagccctttatgttaaatttatagaaataaaagcatgcctagcttattaacatatgaaatcagtctgcctctcattacccaagtagcatctaattctgggttagccttttccttctgctaagcctggtgttgggctaccttgttgttatgtgtgtacagcccagttgtaatcgaactctaaccttaaccctcatgtctaaaaaggaaaaaatagaacgtggtaaaacaatggatttgaaagaaataaaactttcgtgttgttcacattttatcctccaagctggttattccatattactcttatataacttttgagagtattttgtgtagataaatactcaacaggttataatcttaaaaactatttgtgttagacttgggagtgcttccttcccaaccctttttaatttgcatttgaatatgagcaagactatcctggaaattccatacttttaaaaacaaaatatatgaacaaaggtgtgaaaacctgcccccaaaagataagctagaaaactatttgatttctcttctttgttcaccccattccatttttttctaatgtcccgttttatatttgtgataggagtcatcctgtcaaaggaccaacatatacaagaggatgctcacaccctcgttcaaacttacacatcag

SEQ ID NO: 704896 - DNA, 2606 bp, Homo sapiens
  misc_feature 1367, 1368, 1369, 1370, 1371, 1372, 1373, 1374, 1375, 1376,1377, 1378, 1379, 1380, 1381, 1382, 1383, 1384, 1385, 1386,1387, 1388, 1389, 1390, 1391, 1392, 1393, 1394, 1395, 1396,1397, 1398, 1399, 1400, 1401, 1402, 1403, 1404, 1405: n = A,T,C or G
  misc_feature 1406, 1407, 1408, 1409, 1410, 1411, 1412, 1413, 1414, 1415,1416, 1417, 1418, 1419, 1420, 1421, 1422, 1423, 1424, 1425,1426, 1427, 1428, 1429, 1430, 1431, 1432, 1433, 1434, 1435,1436, 1437, 1438, 1439, 1440, 1441, 1442, 1443, 1444: n = A,T,C or G
  misc_feature 1445, 1446, 1447, 1448, 1449, 1450, 1451, 1452, 1453, 1454,1455, 1456, 1457, 1458, 1459, 1460, 1461, 1462, 1463, 1464,1465, 1466: n = A,T,C or G
aggtcattgcagattacataaagcagttctgcatgcagaaggcatgactgtgcctgcagagtgtctgttgatcccgtgcatcctcgtgatgtgctatgggaaaaacatgtcccaggaggctttcagtgcaagagaatgagagacatgcacaaaaaactggaacctaacctggtgtgtgtaggcaagtctagccaagcccagccaaaatcagctgagccccagctacatgcagacctgtgagcaaggaagggggtgttttgttacacagcattatcacagctgactaatgcactctgtaaaagaactcaaacccctttcttcttcagtactccctgaatgctcaaagaagagaatcctggagctggagatgcccttaaatctgtcttcttccctcccgcgccattttataactgtggagactgaggcctggagcggggaaggcagcatggagaagtcacacatgagatggatcctggctcttcactagttgtgagaccctgaccagattgaatgaagtgttcggcttagtttccaaacctctcaaatggtgacaattctaatacgtgcaaaagacacaatgtgggtaatgtgccaagcccagagtctgtgcttataggttgcattgtctgtaagtggctgtgcttccaggagtggcagaaccggcgcwggtccctggccctcctcactgccctccagggcactcagtgattctctcccctctgcacaggcctgaccacttgcagccatccttaaccttgacttttcttgtgcctctccctccctcaaatggaaatcttctttattttgagtgtgagaataatataaggcaggctcagggcaaaaacgtagattgggtctttaaggagcctccagcatctttgtacccacccagcctaaggacgagcacttgaccttcatgggatgcagccaggatgtgaccaggacccctggctgtcctggccactgacctttacccagctgatgatctcagagtggagagggagcccagcttccatgtcagacactgagaaagaaggcggtggcctccagatccaagtaggaagggttgggcctcttcctggccaagtcacactgggcctggtctgctccatcacacagtcgctcagggccagggtatggcatgaaacacaggggctgttgcatggaaataacgtgtcctgtcctgtgtaactcctggaaacaccgatgatctattcttgatggtagtagggatcccagagattggaaaaatcagtttttcctttctcaagaatcaagagactttctttaagcagaaaaatcctgtaatttgctaaatttgggggaatcaattcattgaggattaaaggggacccatatagcataannnnnnnnnnnnnnnnnnnnnnnnnnnnnnnnnnnnnnnnnnnnnnnnnnnnnnnnnnnnnnnnnnnnnnnnnnnnnnnnnnnnnnnnnnnnnnnnnnnnttaaaaaactattattactattgaaaaaggcaaactattttataaccaaaactaaaatttatgagatcttttattttagactcaggcgtatgtaatggataaacagtatcagacaaaatttttatatgggtaccttattcaagcataaatgaatatttcccctcatggagaacacaatacaaaagaaactatttaaatagaaacatttaagaaagaaacaaacaggaataaggaacattaaaggtgaaagaatgacagaagaattcactataatttaaaaaaaacagctttctgaacaaactactgcacctaactcacacagaaaagagcagaggaggtaggagcaatttaaaaaaatctagagatactagattcaacggacacaagaagagggaataagccccatatcaatggaaagaatgagtcactggtagccatatttggaagacgcgtaactcttctctccccttccccatcaccttgttcatgataaacaagagacattcagtttactgagactatagcagtagcattgggaccagagaaagaagataccagtccaggttgctactgaccccccaaacagacagagaaaccacaatgtctgaagaaaacctatctgtacattctaccaaacagtatgtcacacccctcccagaaacaagcaatgcaaacacaagtcttccacagacaaacagggaaaagataaaactaagaatcaatatttgagaaaaaccaacatcatgaaatagagaaaacagcaatttgagaaacaaaaataatactcaaggaaatgtttaataggacaaaccgaagacagctttaaaaatgtaaaatcaaccaggcgtggtggctcacacctgtaatgtcaccactttgggaggccgaggcaagtggatcacctgaggtcaggagttcgagaccagcctggccaacatggtgaaaccccgtctctactaaaactataaaaaattagccaggcgtagtggcaggcacctgtaatcccagcaacttgggaggctgaggcaggagaactgcttgaaccccggaggcggaggttgcagtgagctgagattataccattgcactccagcctgggcaacaagagcaaaactctgtctcaaaagaaaacaaaaaata

SEQ ID NO: 704897 - DNA, 2606 bp, Homo sapiens
  misc_feature 1367, 1368, 1369, 1370, 1371, 1372, 1373, 1374, 1375, 1376,1377, 1378, 1379, 1380, 1381, 1382, 1383, 1384, 1385, 1386,1387, 1388, 1389, 1390, 1391, 1392, 1393, 1394, 1395, 1396,1397, 1398, 1399, 1400, 1401, 1402, 1403, 1404, 1405: n = A,T,C or G
  misc_feature 1406, 1407, 1408, 1409, 1410, 1411, 1412, 1413, 1414, 1415,1416, 1417, 1418, 1419, 1420, 1421, 1422, 1423, 1424, 1425,1426, 1427, 1428, 1429, 1430, 1431, 1432, 1433, 1434, 1435,1436, 1437, 1438, 1439, 1440, 1441, 1442, 1443, 1444: n = A,T,C or G
  misc_feature 1445, 1446, 1447, 1448, 1449, 1450, 1451, 1452, 1453, 1454,1455, 1456, 1457, 1458, 1459, 1460, 1461, 1462, 1463, 1464,1465, 1466: n = A,T,C or G
aggtcattgcagattacataaagcagttctgcatgcagaaggcatgactgtgcctgcagagtgtctgttgatcccgtgcatcctcgtgatgtgctatgggaaaaacatgtcccaggaggctttcagtgcaagagaatgagagacatgcacaaaaaactggaacctaacctggtgtgtgtaggcaagtctagccaagcccagccaaaatcagctgagccccagctacatgcagacctgtgagcaaggaagggggtgttttgttacacagcattatcacagctgactaatgcactctgtaaaagaactcaaacccctttcttcttcagtactccctgaatgctcaaagaagagaatcctggagctggagatgcccttaaatctgtcttcttccctcccgcgccattttataactgtggagactgaggcctggagcggggaaggcagcatggagaagtcacacatgagatggatcctggctcttcactagttgtgagaccctgaccagattgaatgaagtgttcggcttagtttccaaacctctcaaatggtgacaattctaatacgtgcaaaagacacaatgtgggtaatgtgccaagcccagagtctgtgcttataggttgcattgtctgtaagtggctgtgcttccaggagtggcagaaccggcgctggtccctggccctcctcactgccctccagggcactcagtgattctctcccctctgcacaggcctgaccacttgcagccatccttaaccttgacttttcttgtgcctctccctccctcaaatggaaatcttctttattttgagtgtgagaataatataaggcaggctcagggcaaaaacgtagattgggtctttaaggagcctccagcatctttgtacccacccagccyaaggacgagcacttgaccttcatgggatgcagccaggatgtgaccaggacccctggctgtcctggccactgacctttacccagctgatgatctcagagtggagagggagcccagcttccatgtcagacactgagaaagaaggcggtggcctccagatccaagtaggaagggttgggcctcttcctggccaagtcacactgggcctggtctgctccatcacacagtcgctcagggccagggtatggcatgaaacacaggggctgttgcatggaaataacgtgtcctgtcctgtgtaactcctggaaacaccgatgatctattcttgatggtagtagggatcccagagattggaaaaatcagtttttcctttctcaagaatcaagagactttctttaagcagaaaaatcctgtaatttgctaaatttgggggaatcaattcattgaggattaaaggggacccatatagcataannnnnnnnnnnnnnnnnnnnnnnnnnnnnnnnnnnnnnnnnnnnnnnnnnnnnnnnnnnnnnnnnnnnnnnnnnnnnnnnnnnnnnnnnnnnnnnnnnnnttaaaaaactattattactattgaaaaaggcaaactattttataaccaaaactaaaatttatgagatcttttattttagactcaggcgtatgtaatggataaacagtatcagacaaaatttttatatgggtaccttattcaagcataaatgaatatttcccctcatggagaacacaatacaaaagaaactatttaaatagaaacatttaagaaagaaacaaacaggaataaggaacattaaaggtgaaagaatgacagaagaattcactataatttaaaaaaaacagctttctgaacaaactactgcacctaactcacacagaaaagagcagaggaggtaggagcaatttaaaaaaatctagagatactagattcaacggacacaagaagagggaataagccccatatcaatggaaagaatgagtcactggtagccatatttggaagacgcgtaactcttctctccccttccccatcaccttgttcatgataaacaagagacattcagtttactgagactatagcagtagcattgggaccagagaaagaagataccagtccaggttgctactgaccccccaaacagacagagaaaccacaatgtctgaagaaaacctatctgtacattctaccaaacagtatgtcacacccctcccagaaacaagcaatgcaaacacaagtcttccacagacaaacagggaaaagataaaactaagaatcaatatttgagaaaaaccaacatcatgaaatagagaaaacagcaatttgagaaacaaaaataatactcaaggaaatgtttaataggacaaaccgaagacagctttaaaaatgtaaaatcaaccaggcgtggtggctcacacctgtaatgtcaccactttgggaggccgaggcaagtggatcacctgaggtcaggagttcgagaccagcctggccaacatggtgaaaccccgtctctactaaaactataaaaaattagccaggcgtagtggcaggcacctgtaatcccagcaacttgggaggctgaggcaggagaactgcttgaaccccggaggcggaggttgcagtgagctgagattataccattgcactccagcctgggcaacaagagcaaaactctgtctcaaaagaaaacaaaaaata

SEQ ID NO: 704898 - DNA, 2606 bp, Homo sapiens
  misc_feature 1367, 1368, 1369, 1370, 1371, 1372, 1373, 1374, 1375, 1376,1377, 1378, 1379, 1380, 1381, 1382, 1383, 1384, 1385, 1386,1387, 1388, 1389, 1390, 1391, 1392, 1393, 1394, 1395, 1396,1397, 1398, 1399, 1400, 1401, 1402, 1403, 1404, 1405: n = A,T,C or G
  misc_feature 1406, 1407, 1408, 1409, 1410, 1411, 1412, 1413, 1414, 1415,1416, 1417, 1418, 1419, 1420, 1421, 1422, 1423, 1424, 1425,1426, 1427, 1428, 1429, 1430, 1431, 1432, 1433, 1434, 1435,1436, 1437, 1438, 1439, 1440, 1441, 1442, 1443, 1444: n = A,T,C or G
  misc_feature 1445, 1446, 1447, 1448, 1449, 1450, 1451, 1452, 1453, 1454,1455, 1456, 1457, 1458, 1459, 1460, 1461, 1462, 1463, 1464,1465, 1466: n = A,T,C or G
aggtcattgcagattacataaagcagttctgcatgcagaaggcatgactgtgcctgcagagtgtctgttgatcccgtgcatcctcgtgatgtgctatgggaaaaacatgtcccaggaggctttcagtgcaagagaatgagagacatgcacaaaaaactggaacctaacctggtgtgtgtaggcaagtctagccaagcccagccaaaatcagctgagccccagctacatgcagacctgtgagcaaggaagggggtgttttgttacacagcattatcacagctgactaatgcactctgtaaaagaactcaaacccctttcttcttcagtactccctgaatgctcaaagaagagaatcctggagctggagatgcccttaaatctgtcttcttccctcccgcgccattttataactgtggagactgaggcctggagcggggaaggcagcatggagaagtcacacatgagatggatcctggctcttcactagttgtgagaccctgaccagattgaatgaagtgttcggcttagtttccaaacctctcaaatggtgacaattctaatacgtgcaaaagacacaatgtgggtaatgtgccaagcccagagtctgtgcttataggttgcattgtctgtaagtggctgtgcttccaggagtggcagaaccggcgctggtccctggccctcctcactgccctccagggcactcagtgattctctcccctctgcacaggcctgaccacttgcagccatccttaaccttgacttttcttgtgcctctccctccctcaaatggaaatcttctttattttgagtgtgagaataatataaggcaggctcagggcaaaaacgtagattgggtctttaaggagcctccagcatctttgtacccacccagcctaaggacgagcacttgaccttcatgggatgcagccaggatgtgaccaggacccctggctgtcctggccactgacctttacccagctgatgatctcagagtggagagggagcccagcttccatgtcagacactgagaaagaaggcggtggcctccagatccaagtaggaagggttgggcctcttcctggccaagtcacactgggcctggtctgctccatcacacagtcgctcagggccagggtatggcatgaaacrcaggggctgttgcatggaaataacgtgtcctgtcctgtgtaactcctggaaacaccgatgatctattcttgatggtagtagggatcccagagattggaaaaatcagtttttcctttctcaagaatcaagagactttctttaagcagaaaaatcctgtaatttgctaaatttgggggaatcaattcattgaggattaaaggggacccatatagcataannnnnnnnnnnnnnnnnnnnnnnnnnnnnnnnnnnnnnnnnnnnnnnnnnnnnnnnnnnnnnnnnnnnnnnnnnnnnnnnnnnnnnnnnnnnnnnnnnnnttaaaaaactattattactattgaaaaaggcaaactattttataaccaaaactaaaatttatgagatcttttattttagactcaggcgtatgtaatggataaacagtatcagacaaaatttttatatgggtaccttattcaagcataaatgaatatttcccctcatggagaacacaatacaaaagaaactatttaaatagaaacatttaagaaagaaacaaacaggaataaggaacattaaaggtgaaagaatgacagaagaattcactataatttaaaaaaaacagctttctgaacaaactactgcacctaactcacacagaaaagagcagaggaggtaggagcaatttaaaaaaatctagagatactagattcaacggacacaagaagagggaataagccccatatcaatggaaagaatgagtcactggtagccatatttggaagacgcgtaactcttctctccccttccccatcaccttgttcatgataaacaagagacattcagtttactgagactatagcagtagcattgggaccagagaaagaagataccagtccaggttgctactgaccccccaaacagacagagaaaccacaatgtctgaagaaaacctatctgtacattctaccaaacagtatgtcacacccctcccagaaacaagcaatgcaaacacaagtcttccacagacaaacagggaaaagataaaactaagaatcaatatttgagaaaaaccaacatcatgaaatagagaaaacagcaatttgagaaacaaaaataatactcaaggaaatgtttaataggacaaaccgaagacagctttaaaaatgtaaaatcaaccaggcgtggtggctcacacctgtaatgtcaccactttgggaggccgaggcaagtggatcacctgaggtcaggagttcgagaccagcctggccaacatggtgaaaccccgtctctactaaaactataaaaaattagccaggcgtagtggcaggcacctgtaatcccagcaacttgggaggctgaggcaggagaactgcttgaaccccggaggcggaggttgcagtgagctgagattataccattgcactccagcctgggcaacaagagcaaaactctgtctcaaaagaaaacaaaaaata

SEQ ID NO: 704899 - DNA, 622 bp, Homo sapiens
gcacctatcatggtttctgtttcttactggaccatgacaggcatggcacctttacagatttccttggctgttctccaccgccctcattacgcatcaggctccataggcaggggcatgtctgtcttgtttatttttgtatcgccaatgcttggcagagagagagtaggtgctcagcttgaatgaatacttgggatttaattttttgaaatgttttctagagataggatctcactttattgcctaggttggccttaaatgcctagcctcaagcaatcctcccatccaaagtgctgggattacaggtgtgagccattatggcttcagttcttaatgctggttgataatctgctaaatggagtcacagtccatgaatgagtctcactcacagtttgccagtcccagggctgggggaactgatggaggcttggctaacatggtgacaccccatctctactaaaaatacaaaaaattagctgggtgtggtggcaggcacctgtaatcacagctacttgagaggatgaagcaggagaactgcttgaatgcaggaggcagaggttgcagtgagctgagattgtgccattgcactccagcccagktgacaagagcaaaactcagtctcaaa

SEQ ID NO: 704900 - DNA, 1795 bp, Homo sapiens
agccacttagtcacataattctggggaagtcctagagagtttattactctctcatttttattcatatgttttagaagccaaataaattaaaacaatttaacctattataggttattttatgaaatatttagagtaacttcttaatctgagacaagtatttcttctgccaacaagaatgtggtaacatattagtttgtcttcagctggtatgtatttaaagattttgaaggcctttaaaaatacctaagtgctaattggtaaggtcaaccaggtggaagggagtggggagtagggaggaaggtgaatataaagtaaaattatacataattttttttgtttgtttttttgagatggagtctcactctgttgcccaggctggagtgcaatggcatgatctcggctcactacaacctccacctcccaggttcaagcagttcttctgcctcagcctcctgagtagctgggactacaggcacgtgccaccacgcccggctaatttttttgtatttttagtagagacagggtttcaccatgttgatcaggctggtctcgaactcctgacctcgtgatccgcccgcctcggcctcccagagtgctgggattacaggcatgagccaccatgcccagccaataatacatcattttaaaatgatctagctcactgtttctttcaaccaaaaaagagtaatagctcctcattaaatatttacttaaatatttcacattaaaaccttcttgaaccaagttggcaacctacagagctgggccctgggtgccctccttttaagtcaatggggtggcagccgaatataacacaagagctgtaagtcaggcaacagctacagcttctattcttcacttagccactcattagatgagtgaccttaggcgagtcatttagcttctttcgggccttgtttccttattggtaataatagaggcttagactaaattcctttaaacagatactacagggctgctgatatgccatgttttggtgagacataaaaatgtaaaaagcagcccctgtcttcaaggaagtgacagtttaatagaaaagacatctataaaaacaaatgcatgcaaaaaagtggtttcgagactgttacataaatttgtactatgtacattgggggcaccaaaagaaaagttgtcaatcctatctgggtttaggtgagagagatgaaattcacaaagacttaacagatgaaatgcttgaactgagtttgaatgccactacccagatgaacatggggatggaaactataagagcacccgtctatagaagtgagtcagcataaagccccaggamctaacagtggtcctttatggctggaatataagtataagataaaatatgcaaaggatcattggaacaaatggaaaagtctttctgtgacataaggattccagaatttgtgagacgctatgacagggttctaagtagaatttgtgaactgttcgtatatgtgttctagagagatcattcttgcaaagtatggcaaaggcttggcaaaggtgagcaaggaaaccattcaggaggctattacagaggtacatggaagagatgataaaggtcacagtgtagccatcgagtagaaggaacagaactataagatgtgaggaaagtgattcctatcaaatcactgattaaatgagggttgagggaagaggaggaaagtctgtaacatcctttcagttttcatctcccatgagtcaattattccaagactgttagattacatactgaaacctctcaattcaaggaaggattttcataaacacacttaatgga

SEQ ID NO: 704901 - DNA, 2311 bp, Homo sapiens
tggtgaggcgtaaacacccttcccccatcctattgggctacgaggcaaagctgctggctctgggctgctctgtccaggtggatgcttcatggtacatggattgcgttaaccattttgaatatgccattatgactatgtggaagaaagaagtaatcatgaactgcatccactaacctgtattgtgatctctcatttgtttattggttcattagtaaacctaaatggaaacaactctaaatgatgtctgattcttcaattgtgccaatcttccagcccagaacagatttaatggtctggcttagcctaaggccaaccatcattgcttagaaaatgtctgcaaacataagggttatataatgacagatataatctgaattgcaacaatgggctcaataaagaaacgccagcatgttgagaactaaagacatcacttaaaaacaattgacatttctttaaaatatcattttgatatgcaattaaagaaggaggtttagcatcgtgactaaaaaaactacaaatgtaagttggatgctgacaagtttgacaataaagtgaattacttctgcaggcaagtcaacaaggaaatctaataatattctagtcaaaggagagttgcatagcttcctaaggtagctactccaaatgagaaaatatttctctgaatatgtaagccaaggtatccatttctatatcttytgggtcaaataatttatctctcaaatctctgcacagggagactccttcatactgaaagaataattaatgtaatattttatttttggtcctacaggggcattgccatttaagttgcttaacagagctaaagtaatagtcttgcaattattattttgtatgattccatttgtcagtcttaactacttcattgtgagctccttgaagacaagaaccaaccccgtgttatttacttttcttcctccattacagagtgcctaaagaaagttcccagaattatattactctagtagaaagacccacattacatttagaaaaaaacatttccaactctgactttcttacataatagcagcatttagactctcactgaaggaaatggtgtagtacagatgagtttctcaaaagttttataaatatatgtggatagaaaagaggacaaagtgaaggtgacattataaacacataggccatttcattcttggatgaatgaatgcatataacccagttgggtatcccagtcagcatcattttcttgtatataaaagacaaaaatgcatattcttacaaacctttgaaatatatacattagagaccctgggtatatttctaaagcaacatctaaaagctgcatttaggtttggggatgcagccagcttatttgatagctttatgctgagggaagaggagtaagcgttttgggctgggtgaagcaagaatgagattttgaagttcactaagcaaattctgaaaatatctcaaagcaataatgaaatattcattttatgtataaaattcttggttataatataggattatcatttttatgccttatgagactgggtaacagctatagagtaaacatttttttctgacttttaacataatagcaactacactataaagtttctaaatctaagtatgataatagtttgcagttttatgttgctagttctactttttcatagctctggcattgtgtataaaatagaacctgatataaaaactaatcttgccttgtgccccagtgacttgaagaatccttcactttcaaattacagttaccacttgaatttgggacactattttagcaatgtatatatttacatttatatatatgagttacttgaaattttgtattaattgcaatgtactcattacaaatattctttgaggtcaataactataaggtcccttaaagaatcaagagagccagcaatattattacactaaaatgtaatgatcaaagaaaaagtttcagcttttaaacaccttttgccccaaatatgccatgaggactatctgaatttctcctgttaaagctatgatctgctatgcttttcactatgacaagctctcagagtcaacaagaaaaagattttaggggcagaattaaaatgattctgtttttactgcttagtaactaacctacaattctcatcacattgatgggaaatgtatataaagtctatggcatcaaataaaattaaatgtctctttgtagtatattctacaagaaagaaaaatataaacatagtatatcaaaattttcaaagatatttatgcaatactcagaactgtccactaagaaaaggtgcaattagaattagactatttg

SEQ ID NO: 704902 - DNA, 1322 bp, Homo sapiens
aggctctgctcctctgcaaggtggggagttaaaaaatgaaactcaaggccaaatcctttgcagagaaatctactcaacagcaaagcgagacggcaagaaaagccgtctgttttggttagatattgaggggagagagtggctttctgagaatttataaccatagtcctacccttacatggttcaggatttagatattcactatcttcctggtccaagaaaccccaagccaagcgaagtaacatatatgttccagggttggttgcatcctagagcacctggaagtaactaaagtgattctttctaaagaagtgcatcctcaacccatggcttgaagttcccacagagaaagcccagtggaacatgagctcacaatccaaaattatgagccaccatgagcaaaagacagaaacagaaaacatcatacgcttttcacaaatctcttaattaaagttataaagtatagtatacaaaatatgaaataattgaagaattatggatagtagaccccataatgatcattaagagattaaataactggtattaatgttttatgtggaagaagaatttagaagaaaaaatgagaacatgtgttggaattatggcagttttcaaacaagaccctgaataaaattaaaaaggcaatttttctctcaggcctacctgttgccccccttccttctgcctccttcacttgactttcctcttctccagcccctttggaaagcctactatattcatatgtattctgactcatctcagaatgacatcarctcaaactacaaaagcatcactgccaacaattaagtggaatctgtttaatctaaagacaatactcatattctagttttatttgaagatactatttcataactttttaaaatactctcacaatggaatatttcttaaacttaataaagaaccacattatttcatttacagcagtaaataagatttataaacctttttatgcaacataaaatcatgcagacttttatctgaaaatgaaatgtttgatataactatcaaaagattaaattagatgtattgatcttagaagcacagttactatatatgttattatatatcattgtttatacagaactatatcctaaattatcaatagtttttgtaaggccagggacaacttgcaatgctattattatatattaaaggctaatattgcattcctttgaaaaaaagtatttatctatttaacaagatttaaatgaacatctactctatgcctggtactacaatatgcactgtagataattaatgagcaaaaaatggtcgcaattcctgctctcatggagcttttaatg

SEQ ID NO: 704903 - DNA, 798 bp, Homo sapiens
tgataaccaggatggactacacacaccatcacatatatgttccacattagctggcatcaaaggccaataagacccagtgtaaagatgatatggaaggctctgacctggctgccttctattaattgggaagggagtggagaccacctcctctctattttcccttcttccctttcagcaccactgctcctttcagatacatgctttctttcatttgcccacttgaatcaagggtcataaaaaaaccttcagctaacatgacaggaagagtttacaaatccatttatataaacatatttccctccctttacttgagcactaaccatcagttgttcatgttgctgtgtcccctttaacagctgtagtgagggacaacctctccataggtgctgattccttaggcctctatattataagcagccccagtgtcactgagctgtggtctttgggctgttcttaaaaacaactgccccatattgtgagcttctggagcactccatgctctctatattctaagtgcttgccacagtgcctacgatgttataaaaattcaataaaattgacattgaaaagagacgttagcctggaaaggggaggatttacattagaaattggcttggggaaaggaaggctgaaggagatctgggttctaccatgtgctcttttatacactatgtccctgagtctcacttccttcacctgtaaagttaggtggtaggacaggcagaagggtaaacaatgtgaatgactggtcrgcagttaggacaatgttttgagtttatgatttagtatacctttcca

SEQ ID NO: 704904 - DNA, 604 bp, Homo sapiens
taatataccttcaattacaatttgtaaattataagtaaaggattttgcactgttaaaaaaagagtaagttactttcacagtaaaccctataatggaatgttaatttgtttctgcatgaattcaaagtcaagtacttttggacttcctcttccatctttgatggagcacttaaaatcagacccatgcacccctagttcttggggaaatagaaaaaaaaaaattaaattttaaaataaaaattaaaaaacaggaaacaaagcaaggaggaagaggagcaacctaaggggcactgaagaattaatgaaaagacaggtcttgaggggacaaaatcttggagaagcaggacaacactcaggaagtcaaccagctgttcctttttccttcagggcattttcagactctttacccattgcaagaaattgawcatccatgcaagatacttggtaagccggaattgcagtggaaagaaacgatgaacttagtgtctcacattctgctgagcatacctttaaaatgtcttcaaatttctaagtacatgagacgaaggcaaacagcagaaaagctcagaaatgtagagacgtctggacagtcgaattgctggtga

SEQ ID NO: 704905 - DNA, 641 bp, Homo sapiens
ttttcactctgactcacagcaacccaaatgattcctagtcctgtgagaactgaaaaaaaattgcagcttacaactatccagtaatatctccttctctagtagcttttctatgtttagccttatggaattgtatgttacccattgtcatattgatattcaaagactccagcatccctttgactaactctatagctctttctctatggcatttccttctctctgtatgctatccccaaattttagacatgttgacatctctagaatccaagaacattatctccaacatagaaagaccacttggtgcatgtgtatttttccaacttaaaatatggtttrgaaattctctccagaaagaaatttgagggcatttttgggctcattttctgatgtatatcagtattaaaatgtctgtttcacagtgactgaaaagagctttcataaactttgccatgttttctagttgttttaggcagtaaagttctgtagcaattagttcttcatgtctggaaacaaaattatcctttaaaagtatgattatcgttccattcactctagatcttaacttctttgctgcttgaataactgacccttaaaaaatcatttttgtcctcctgcattttagtattcataatgttgaacgt

SEQ ID NO: 704906 - DNA, 1188 bp, Homo sapiens
gtgggtttaaattttctcataatctagctatcagatcactgctatttcaaagaattcaaatccaggtgatgggttgataggtgcaggaaaccaccatggcacatgattacctatgtaacaaacctgcacgttctgtacatgtatcccagaactttcaattacgttttaaaaaagaattcaaatctaatttccagccactatcctaggaaatgtatttcatcgatttatattcacgtggtaaaagtcactcatagagcttggtggcaactggaacgcacaaacatgtagtttatgtcatctytggacatgttagggggaggtctggggattttgcattagacaagttgtttcagagcatggagacctaataaaattaatcttatgtacaaccccaaatcaatctctcaaagtctcttttcttggtactatgaacatcctttcaaagaatgaaccagttaatcttgccagttattactgtttactctagttttcatagatgtgggaagttatccttcttcaaaggtaactgggaatgacatgtgacttctggtcttttttgagatttttgtcctgcatctgttcttactttatttcattcttgttttaataaaatcaacctatttgttcatacaaattatgattatgattattattatatatctgtaaccaacccccaaattcttgttctatctctctgactgacttatacatatttttctgaattcatggtcttatcttgtttggttcctactgaaaaaaaccaataaaatactcccccgatacagtagatttgcctcacgaataatatcacacaaaggaataattacaacttgatataagaatgtatgcttgtttcatcaaaatgtaggcctactttcttattcattaattaggaagccagtgttcagataagttatttactctggatatactagctgacaatataaaaccagaatttgaacttgaagacaagatttttatttcctattactagcatatttttaaatgtaaaaacataatttaaaaagaagaggttccttaatgttgcacacataaaaattaagatcaactgttttctcatcatataatattccactgctctctgttcaaatgcctgttatgagtaaccaaagtaaatattattttattgtaatatttgtataataacatcctattattttcattcca

SEQ ID NO: 704907 - DNA, 630 bp, Homo sapiens
cccccttattcagaaagtccatatcatgagaatacaatccctcagcctggcatctgtgttcattgcagctgagaaggtcccagtgaagccagcagacagaagatctgcagtcttggtctccagttgactcaaagttcaacagagtcaacaggctgcagaagaatcaagccccaaattgggggaaagaccacatttggagggtgacagttttggtgtgacctcagcaaacagtaggatgcctgaagaagtcccctggacagtaaaatcaggctctacactcaagggctgaaagaattagataaattttggcagaagaagggaagaagatttggcagaaagacacatttgtcatatagggtgtggagaaccaaggtcagaactaggacaaacaaatgaaagatgcctgaatgcaaattttggcaagtttttttctagcaggtatctgctagtggatggggtttcctgggaagaggcagccaayaggcaggagttttagcagaggctgggtggccgcacgttgggtaggtgaacctcctgaacagaggtggttggacacatccaaccccagcccctggttctggggttggtgtgaagtggcattttccctatcttctgtagactgagaagtga

SEQ ID NO: 704908 - DNA, 630 bp, Homo sapiens
cccccttattcagaaagtccatatcatgagaatacaatccctcagcctggcatctgtgttcattgcagctgagaaggtcccagtgaagccagcagacagaagatctgcagtcttggtctccagttgactcaaagttcaacagagtcaacaggctgcagaagaatcaagccccaaattgggggaaagaccacatttggagggtgacagttttggtgtgacctcagcaaacagtaggatgcctgaagaagtcccctggacagtaaaatcaggctctacactcaagggctgaaagaattagataaattttggcagaagaagggaagaagatttggcagaaagacacatttgtcatatagggtgtggagaaccaaggtcagaactaggacaaacaaatgaaagatgcctgaatgcaaattttggcaagtttttttctagcaggtatctgctagtggatggggtttcctgggaagaggcagccaacaggcaggagttttagcagaggctgggtggccgcacgttgggtaggtgaacctcctgaacagaggtggttggacacatccaaccccagcccmtggttctggggttggtgtgaagtggcattttccctatcttctgtagactgagaagtga

SEQ ID NO: 704909 - DNA, 875 bp, Homo sapiens
ctagctggagtaccagtacgtgaatttcatcgcacctcacgaaaaggagtgtctgtgtttttatctgctataatggatgtgggctcttgtaggagtttaaaatgggtgtccataaagaatgacagatgtccattacagtgccagaaagcacatgaataaacgtttcagtcattctgtatcaggagaaagtcttaggtcactggatgctaagtttctctatatttcctctgtagcagactattttaaattctttcagtctccagtactttgcaggatgcctgcaaaataaaaggcactcaagaaatgtttgtaaatgaactaatgcttgttgagtatattctttcaacaaatatgtgttaggcattgtattagttstcacattgctataaagaactacccgagactgggtaatttataaagacgaggtttaaatggctcacagttctgcaggctgtacaggaggcctcaggaaacttccaatcatggcagaggaagaaggcacatcttacatatctggagtcggaggacaagagcaaaggggagatgctacaaacttttaaacaaccagatctcgtgagaactcactatcacaagaacagcaaggggggaaatccgcccccatgattaaatcacccccatcaggcccctcccctaacattggagattacagttcgacatgacatttgggcaaagacacaaatcgaaaccatgtcgggcatatactggtgaatgctgtctgtgggatcaaaatgctttacccaataataaagaggtaatcagtcagaaataaggactgggctcctatgtaagaatcaaaatgagaggattaggatttagagggaaggagtactgcttagataagaagtagaatgaat

SEQ ID NO: 704910 - DNA, 880 bp, Homo sapiens
tccaaatttatttcaacaggtgactctcaatagtcggtaatcaaaagtagcatcaatgatatttttaaagttttaaattgctgttaagtgagctttagtctcaagtaggaaaggaaaaaggtagaattttatttccaccttccataagcacaactcccagattcatattgtctactccaataattaaagataactggatttccctttgaccaaaagatgtcaaatgatggaaccaacgagagaccaatcagcaagctactaaatgtatgaggtctggccctgcgtaaaccaaagcagtcaataaatactagatttaaagaaaataaagtgagatgtttcaagtaaaaagcaagcaacaaaaaccacagcagcagtccccaacctttytggcaccagggaacagtttcgtggaagacaatttttccatgggactggggcaaggagagaatggtttcaggatgaaactgttccaccgcatataatcagacattagttagattctaggagcacacaacctagataccttgcacgtgcagttcacaatagggttcacactgctgtgagaatctaatgccaccgctgatctgacaagaggcagagttcaggcggtaatgctcattcctctctctctcccaaaccccccaccccatagcctgactgctaacaggccactgacagactggtgctggtccactgcccagagactggggacccctgcaccagacgaccaaggagctagaaagatgaaaatattcctaatattaattactcactaattacaaatggccaatattatcaatagtgacccctaacaggtaagagttacagtgtttacattgtcattgcttgtactgaaattgagataaaatgctggggatag

SEQ ID NO: 704911 - DNA, 651 bp, Homo sapiens
tgcactaattggtacactatgagcagcagcccaaacaatttcatatgaagttaccctagctattatcctcctatcagttctgttaataagtggttcattcaatttatctatactcatcccaagagtttattctgactactcctaccatcrtgacctctaaccatatgatttatttccatgctagcagaaactaacagagtcccatctgacttgacagaaggggaatcagaattcgttccaggctttaatgtggaatatgctgcaggtccatttgccctattctttatgtggcatatataaatattattataataaatgccctaagcactattatcttcctaggagcattatatgatattcatacaccagaactctatactataattttcatcaccaaaaccctccttttaacaaccttatttttatgacttcaagagtcatacccttgattctgttacgatcaacttgtacatcttctatgaaaaaatgtcttagcattcacactagtgctttgcagatgacacatctctatgcctgtcctaatatctagtaccccacctcgaacataagaaatatgtcggacaaaagagttactttgatagactaaattatagaggtttaagtcctcttatttgtagaattataggaatc

SEQ ID NO: 704912 - DNA, 651 bp, Homo sapiens
tgcactaattggtacactatgagcagcagcccaaacaatttcatatgaagttaccctagctattatcctcctatcagttctgttaataagtggttcattcaatttatctatactcatcccaagagtttattctgactactcctaccatcgtgacctctaaccatatgatttatttccatgctagcagaaactaacagagtcccatytgacttgacagaaggggaatcagaattcgttccaggctttaatgtggaatatgctgcaggtccatttgccctattctttatgtggcatatataaatattattataataaatgccctaagcactattatcttcctaggagcattatatgatattcatacaccagaactctatactataattttcatcaccaaaaccctccttttaacaaccttatttttatgacttcaagagtcatacccttgattctgttacgatcaacttgtacatcttctatgaaaaaatgtcttagcattcacactagtgctttgcagatgacacatctctatgcctgtcctaatatctagtaccccacctcgaacataagaaatatgtcggacaaaagagttactttgatagactaaattatagaggtttaagtcctcttatttgtagaattataggaatc

SEQ ID NO: 704913 - DNA, 651 bp, Homo sapiens
tgcactaattggtacactatgagcagcagcccaaacaatttcatatgaagttaccctagctattatcctcctatcagttctgttaataagtggttcattcaatttatctatactcatcccaagagtttattctgactactcctaccatcgtgacctctaaccatatgatttatttccatgctagcagaaactaacagagtcccatctgacttgacagaaggggaatcagaattcgttccaggctttaatgtggaatatgctgcaggtccatttgccctattctttatgtggyatatataaatattattataataaatgccctaagcactattatcttcctaggagcattatatgatattcatacaccagaactctatactataattttcatcaccaaaaccctccttttaacaaccttatttttatgacttcaagagtcatacccttgattctgttacgatcaacttgtacatcttctatgaaaaaatgtcttagcattcacactagtgctttgcagatgacacatctctatgcctgtcctaatatctagtaccccacctcgaacataagaaatatgtcggacaaaagagttactttgatagactaaattatagaggtttaagtcctcttatttgtagaattataggaatc

SEQ ID NO: 704914 - DNA, 1029 bp, Homo sapiens
ttttcagcttcaaatctaggatattccaggcaaaaacacaacctaggaactcatggtgtgccattccttgggtcgtgaagtccctagccatctaactttttctctccacctttcagagactttttatatttgttatgtataatattcagggtttttttgttgtacttactgagagtaataaaaaaaatacatgtactccgtcttcacaaaagtagcagtttcatgatttacattttaaaggttacactggttgttaacatggggmatagaccacaacagaaatggagcaagagagcacataaactaggctacagtagatgttatccaaaagaagttctacaacttattagctataatctgggcatgttatttgatcctttaacatattagttgaatagattacttgataaattacatcatatattttgcagtgaggccaagaggattttttggaatattaattgtggagggtgaagagaagagaagatttaaagataattcctgggtttgaaactgaatggtgatactattgactgacagagatgagagaaataagagcaaggaggctcaagagttcagatttagacatgatgattgtggatgttgatgttgatattgccaaatatttaaaaagcagctggagctcagggaagagattgggactagagatgtaaatctaggattaatcagcctacaaaatcaggtatacaactagatgagtatagggatcgaagacaagataatctaccaacctgagaataaatgatgttcccttgaggtagttgtggaagaaggcaacaacagaaagaaaatgatgaatactgataataagaagcactatccacgagagaagccatggggttcatatatctctgcacgtctaggggcatccacaaggatcacattggaagatcctgagctgctagaaagccttcaaactttaaggaagaaatatctccctgtacccatggtcttttgaatagttccacgctggactctgacatatcccccaacattatctgaatatca

SEQ ID NO: 704915 - DNA, 555 bp, Homo sapiens
taaaaatcccacagctcatatccagrgccttgtataataaactcaagtaaacattccatttcctgcaagtgattgtggtctgtgactagatttagaaaacagggcagtaagtcatctttctttaatgagtcgttgaaaacaaagtcgtatcccatgaaaccaaaacctgtccttgacaaaaacaaatagcttatttgtaaaagaccctccaagggggggtcaggtttttctgcagtttatgatctgagattcatttttgctatcacgaagtgctgaaacaatagcaaccccactctccccaacagcacccactgccaatgaagtgcgagagactggttttctaactagagagggcaaggagcttttggaggaaaaaattagaaaatcaaatgtagagagatcaggtttgaggacttggtcttctattaccagctatttataaccgctgtgcctcagtatcttcagttgtatcttagggagatgaagcctacccaacgcattggtgtgatcccaaaccggataataaaatataagtcccctgcacagggctttcca

SEQ ID NO: 704916 - DNA, 555 bp, Homo sapiens
taaaaatcccacagctcatatccagagccttgtataataaactcaagtaaacattccatttcctgcaagtgattgtggtctgtgactagatttagaaaacagggcagtaagtcatctttctttaatgagtygttgaaaacaaagtcgtatcccatgaaaccaaaacctgtccttgacaaaaacaaatagcttatttgtaaaagaccctccaagggggggtcaggtttttctgcagtttatgatctgagattcatttttgctatcacgaagtgctgaaacaatagcaaccccactctccccaacagcacccactgccaatgaagtgcgagagactggttttctaactagagagggcaaggagcttttggaggaaaaaattagaaaatcaaatgtagagagatcaggtttgaggacttggtcttctattaccagctatttataaccgctgtgcctcagtatcttcagttgtatcttagggagatgaagcctacccaacgcattggtgtgatcccaaaccggataataaaatataagtcccctgcacagggctttcca

SEQ ID NO: 704917 - DNA, 2154 bp, Homo sapiens
tctactattaaaattttcttggaaaatatttcaggaagatgagaccttggaggtcaactaaccatctttcagtaaatctaaaagtttttcttttccagaattagaacagattgttgcttttcatttggatttcgagtttggggcatattttatgggtcagagaagagtgtagaggtaatgaactgttgtggtcagtgttgaaggactttaagatctgtaatttctgttaagattaaggaaacagagaatgttcatacactaccactttgaacattccagtagtatgagaatatttaaattaattttatttatttatttatttatttatttatttatttattttttgagagggagtcccattctgtcacccaggctggggtgcaatgacgtgatctcggctcactgcaacctccacctcccgggttcaagtgattctcctgcctcagcctaccaagtagctgggattacaggctcccgccaccacgcctggctaactttttatatttttagtagagacagggtttcaccatgttggccaggctggtctcaaactcctgacctcacgtaatctacccatctcgacctcccaaagtgctgggattacaggtgtgatcccaccatgcccagcctrttttaatttttgaaaagagaaagttatatacattgattgcactctaaagaattgttggcatttggagagagttatccgtatggtaatccctgtgttaattatgtctcaattctaggatcagagaaacaaaatggaagagatgattagggtgggcagaggaatgaatgcagatagatccctcaagtcagtagctaacactagaatacatgtgaagatgagaatggtagatattgcttgaggccagtgactgtaatattagtaattcctctttgtacagactttttagtttccaaagcactttgtggagctcacaaaatccatgatcattaagcccaagtagaggtctttgtctttctttttctgatgagggttcaaaagcccagtgatgagagccactcacttaacgtcatatgtcaaattcatcggacagccacagctccaagtcaggtcttctaaagattgttcccatgctttgaccgtggcaagtgactgaatgttggcatgctttggatggcaggagctcctcatcagcgccagtgtacatggctccactgtgacccatgttacctgcagagattaaagtgggcttaggcagtcaccatggcctttggataaaatcagcggttggaggggaagcacccattaaatccctgcctggcacccaggcctggtgccttagagctatacttccccatccccatcagtcacataaaatttgtcccgaggttctttctaccttcactaagtacttaatatggagttcagtcatccccatttctcacttgaaccattgaaatggcctcttacttagggtttcctctggcagtcatctctgtacccatacatcctacatgtaataccagattaatctttctatggtaccttatcattaattgccttttgcaaaaaccttaataagttcccaaccagttgcagaatacattgaaatcccaaactggatttctagttttatctctccccagtatcctggattccagctgatatgttacatttttagttaattctcacctctatggctttgctcaccaagttccttcttcccagtccttccccaaataaaatctacacatctaaaagtgacccattaagatccagctacagtgttaatttctcccataaggttttctcctcttcctaaaagctagttgtgtgttatttcaccctctcttttagatgttttcactcttttactgtactggagtcatttgtgttcctgtcttctatcaacctatatccaagcatatattagactaagttttaggagaatatcctatgtttctagaaacatatgtatgtagtaactatatgcttagttatttagcagaggtttattgaacattgtgttcactttgaagaattttggtagacactctgtagggccctattagtgtttaagacattgtacagctcaggtgcattttcctttaaggatgcatttaacctgctagatgtcatctcatttttaagaccagagaaaaagagagcagcatctgttgtttctt

SEQ ID NO: 704918 - DNA, 589 bp, Homo sapiens
gtatcttttgcctcacaaattccaggctacttcatgtcaatctctgatttttgtgtctacagctcaaagagactactgcacttcacttggccttccttcactatcccatcttctgtaaatactgacaagcacaaagctgtcgtgattgtagggcttactttgttttctttgtctcagggatcataatcccatatttctttctgtgcaatgttggaaaataattgtttaaagaattatccactttcctagttctttgtggcagaagggctaatgtggaacaagtttttccatcatgtgcaaatgtttgataaagtgagtatacattttttatatctattatccattaagcctttgaaagagagatataacagcttaattttacatgtccatattgataataaattataagttgccataatttgcaactatttaaactcaataaacaattttaggctgagtgtggtggctcacgcctgtgattccaacgctttggcaggctgaggtgggaggasctctggagtccaggagttcgagactagcatgggcaacatagtgagaccctatccctacaaaacaatttaaaaatttg

SEQ ID NO: 704919 - DNA, 1744 bp, Homo sapiens
cctgggaggcagaggttgcagtgagctgagactgcacccactgcactccagcctgggggatagagcgagactctgaattacctagagacaaatgtgacatgtgtctctgtctttaatcagaaattttgttctcattttcagtgtcctgaaaccacgtagcttttcttagtacattgtctttgaatcaatccatgttaggccatcagtaagaaaaacaactttcaaatttttgagacactacatttttatttttctgttgcttttttaaatttttgattcgggggcatatgtgcatttttaaaagaataaactcctccatgctcttcctctccactgtaagacatgcttcattcaaaggaggcaacagtcttgctagggacaacatgaaatacgggacacaggaatcttgggatccaacaactgtagaagttcagaaatgtccaaggcactggccaatgtggccaatgagaygctgtgctataacagctgcacagaaagccttgagacctgctggtctggattagggcaggaggtcagagagcatgaggacagaagaacaaaaaaagaatggagcagatagattttctgacagatgagaccatgtgctattggaagttgtggaaaaaagtatcttcccaaccataagcaagaaaaaaaaattaagacaatatttaactcctagaaaaataaaaagaaattgttcaataaagcaaaagtaattgtaggccattacttggttccaccatgaacagtggattcaaaggcataataaagaaaacataaaatactgatttaattaaatctataatataattatctttggagaatgggggagggtatgtgtggcattctaatttagaaatttgagatatactgcctacaatgataaatcaaccaagagcaagacactcctgttattagtaagaaaaatataaaccccagaagaaatatataggagaattcaaagtggcagcttccactgatcagtacttgggagtggggagatctagggcagaatgttggttttgttgttgttgctctaaaccttaaagcactatctgactttcactcaactatgggcatgtgttcatttgttaaatgcacacacacagacacacacacatatacacatgtgtaagcacacacacatatatacagattaataaaaagcaaaaaccttaatagattccttttaactgccttactgcaaatacctctttctgaagaataaaggtagacatcactgatttacatggtcagaaaagagcctcatttgcctgtatttagaaaattcttgatttgcatgtttatgtaaaaaaagataaatcaaggaaagaaattaaatactaaacaaagatgtaaaatgcttaaaatattcagcaagatagctgcatcatcacttataccgtaaccaatttggggccataataaatgaatattctacaacctttgtgtatgtggcttcttgggttctttcaacttgtcactgttgtcagattatgacaagaatattgggtaaggggatgaaaagctcttaacaggaaattggctaacacagtcagacttcaaaatgaaacactttgaagctgttactagcctcagatagatgtacatgaaatcttcagtaactattaaatgaaagggccaagatgtagagcatagcacatatactctacaagacacaaacacacacataactatctatgctcatggataaaaagactttgggaggacatgtattaaa

SEQ ID NO: 704920 - DNA, 1744 bp, Homo sapiens
cctgggaggcagaggttgcagtgagctgagactgcacccactgcactccagcctgggggatagagcgagactctgaattacctagagacaaatgtgacatgtgtctctgtctttaatcagaaattttgttctcattttcagtgtcctgaaaccacgtagcttttcttagtacattgtctttgaatcaatccatgttaggccatcagtaagaaaaacaactttcaaatttttgagacactacatttttatttttctgttgcttttttaaatttttgattcgggggcatatgtgcatttttaaaagaataaactcctccatgctcttcctctccactgtaagacatgcttcattcaaaggaggcaacagtcttgctagggacaacatgaaatacgggacacaggaatcttgggatccaacaactgtagaagttcagaaatgtccaaggcactggccaatgtggccaatgagacgctgtgctataacagctgcacagaaagccttgagacctgctggtctggattagggcaggaggtcagagagcatgaggacagaagaacaaaaaaagaatggagcagatagattttctgacagatgagaccatgtgctattggaagttgtggaaaaaagtatcttcccaaccataagcaagaaaaaaaaattaagacaatatttaactcctagaaaaataaaaagaaattgttcaataaagcaaaagtaattgtaggccattacttggttccaccatgaacagtggattcaaaggcataataaagaaaacataaaatactgatttaattaaatctataatataattatctttggagaatgggggagggtatgtgtggcattctaatttagaaatttgagatatactgcctacaatgataaatcaaccaagagcaagacactcctgttattagtaagaaaaatataaaccccagaagaaatatataggagaattcaaagtggcagcttccactgatcagtacttgggagtggggagatctagggcagaatgttggttttgttgttgttgctctaaaccttaaagcactatctgactttcactcaactatgggcatgtgttcatttgttaaatgcacacacacagacacacacacatatacacatgtgtaagcacacacacatatatacagattaataaaaagcaaaaaccttaatagattccttttaactgccttactgcaaatacctctttctgaagaataaaggtagacatcactgatttacatggtcagaaaagagcctcatttgcctgtatttagaaaattcttgatttgcatgtttatgtaaaaaaagataaakcaaggaaagaaattaaatactaaacaaagatgtaaaatgcttaaaatattcagcaagatagctgcatcatcacttataccgtaaccaatttggggccataataaatgaatattctacaacctttgtgtatgtggcttcttgggttctttcaacttgtcactgttgtcagattatgacaagaatattgggtaaggggatgaaaagctcttaacaggaaattggctaacacagtcagacttcaaaatgaaacactttgaagctgttactagcctcagatagatgtacatgaaatcttcagtaactattaaatgaaagggccaagatgtagagcatagcacatatactctacaagacacaaacacacacataactatctatgctcatggataaaaagactttgggaggacatgtattaaa

SEQ ID NO: 704921 - DNA, 1744 bp, Homo sapiens
cctgggaggcagaggttgcagtgagctgagactgcacccactgcactccagcctgggggatagagcgagactctgaattacctagagacaaatgtgacatgtgtctctgtctttaatcagaaattttgttctcattttcagtgtcctgaaaccacgtagcttttcttagtacattgtctttgaatcaatccatgttaggccatcagtaagaaaaacaactttcaaatttttgagacactacatttttatttttctgttgcttttttaaatttttgattcgggggcatatgtgcatttttaaaagaataaactcctccatgctcttcctctccactgtaagacatgcttcattcaaaggaggcaacagtcttgctagggacaacatgaaatacgggacacaggaatcttgggatccaacaactgtagaagttcagaaatgtccaaggcactggccaatgtggccaatgagacgctgtgctataacagctgcacagaaagccttgagacctgctggtctggattagggcaggaggtcagagagcatgaggacagaagaacaaaaaaagaatggagcagatagattttctgacagatgagaccatgtgctattggaagttgtggaaaaaagtatcttcccaaccataagcaagaaaaaaaaattaagacaatatttaactcctagaaaaataaaaagaaattgttcaataaagcaaaagtaattgtaggccattacttggttccaccatgaacagtggattcaaaggcataataaagaaaacataaaatactgatttaattaaatctataatataattatctttggagaatgggggagggtatgtgtggcattctaatttagaaatttgagatatactgcctacaatgataaatcaaccaagagcaagacactcctgttattagtaagaaaaatataaaccccagaagaaatatataggagaattcaaagtggcagcttccactgatcagtacttgggagtggggagatctagggcagaatgttggttttgttgttgttgctctaaaccttaaagcactatctgactttcactcaactatgggcatgtgttcatttgttaaatgcacacacacagacacacacacatatacacatgtgtaagcacacacacatatatacagattaataaaaagcaaaaaccttaatagattccttttaactgccttactgcaaatacctctttctgaagaataaaggtagacatcactgatttacatggtcagaaaagagcctcatttgcctgtatttagaaaattcttgatttgcatgtttatgtaaaaaaagataaatcaaggaaagaaattaaatactaaacaaagatgtaaaatgcttaaaatattcagcaagatagctgcatcatcacttataccgtaaccaatttggggccataataaatgaatattctacamcctttgtgtatgtggcttcttgggttctttcaacttgtcactgttgtcagattatgacaagaatattgggtaaggggatgaaaagctcttaacaggaaattggctaacacagtcagacttcaaaatgaaacactttgaagctgttactagcctcagatagatgtacatgaaatcttcagtaactattaaatgaaagggccaagatgtagagcatagcacatatactctacaagacacaaacacacacataactatctatgctcatggataaaaagactttgggaggacatgtattaaa

SEQ ID NO: 704922 - DNA, 2119 bp, Homo sapiens
  misc_feature 392: n = A,T,C or G
gccagtagtcctagcactttgggaggcctcgatggatggatcgcttgagtacaggagtttgagaccagcctgggcaacatgatgaaaccccgtctctacaaaaaatacaaaaattagccaggcatggtggcacacacctatactcccagctactcaggaggctgaggtgggaggatcgcttgagcccagaaggtggaggctgcagtgagccaggatcgcaccactgcactccagcctgggtaacagagtgagactttgtctcaaaaataaaaaataaaaataaaaataagaaaagcacactgcttgcagagctgagtcaattaaatgtcaggcccctctactgggtaccacatgtagcgtatgaaccacaggaccctatgcggtggccctgngcactgtagcttagcagaggtaagcactggcttcgctatcagataggcctggatttaaatcctgacattatcacttcatatgtctgtgccaaagagacaagctctctgtgtctttcatttcctccccccgtaaatggaagttatcctagtgcctcactcatgaagatccgatgtggagtaaatgaaataacatgtcaggctgctagcacaatgcctggcatacggcaagtgctcattacattcatgggctgatcattgttccatcacaaagacttaccgcaattgatgcgcccaatccccatcattaggcattgggttattaccaagggtttgctgttataaatactgctaaaatcaatatcctctgtgcattttgtgcaagtatttatgatttcctcaggaagcaaccctaaaaatgagaccaattagtgcaacggtatttatatttttaaagytttagctacatattcctaaatgcaatgcatacatttaagtcctagcattccctcgtgctttttaaagtcccttcagggattttcaaacagctttcatctttgctccttcaatggggacagaggggggagtgcctgaggcgtgtgaatgttagtgatcttccatcacagagaccacaggtggggaaacccctaggagcctggtcccaggtggtggccacagttcccagagctcagcctgccacgaggaagtgtgagatggccatctgcatgagagccaccaggccactcgttttcacttcctctcggagttttttttttttttttttttttttttagacagagtctcgctctgttgcccaggctggagtgcagtggtgcgatctcggctcactgcaagctccgcctcccgggttcacgccattctcctgcctcagcctcccgagtagctgggactacaggcgcccgccaccacgcctggctaatttttttttttttttgtatttttagtagagacagggtttcaccatgttacccaggatggtcttgatttcttgacctcgtgatccgcccgcctcggcctcccaaagtgctgggattacaggcgtgagccaccatgcccggcctgttcctcttggagcttttgaggctggtgtttcctttgcagaagttatcactctgcaaagtgggaacccaaggcggggagttacaggggtctaagtgcccagaccccctattttgaaggacttccagcaaagcctggacgatggccactcactcagttacacatggcagttgtgtgcccgtgggtaggtcaagtcccttctccagcgccattcttctcccctggcaaatgagtgggaagtgattgaaaatgatacagaagaatcagaaggcaacatggccacagtagatcaggtcaggggtagaacaggttagaaaaagatgtttactaaaaggatcctgattttatacacatgtatcccaaaggatggtgggattacatgtgacattttaaagattcatttcttattttgatgctctgaattttgtttctcataacaacatgtataactcttgtgcctcttttttttcttttttttgagacagagtcctgctctgtcgcccaggctggagtgcagtggcaggatcttggctcactgcaacctccgcctcccgggttcaagcgattttcctgcctcagcctcccaagtagctgggattacaggcatacacaaacatgccccgctttttttttttttatttttttttttt

SEQ ID NO: 704923 - DNA, 2119 bp, Homo sapiens
  misc_feature 392: n = A,T,C or G
gccagtagtcctagcactttgggaggcctcgatggatggatcgcttgagtacaggagtttgagaccagcctgggcaacatgatgaaaccccgtctctacaaaaaatacaaaaattagccaggcatggtggcacacacctatactcccagctactcaggaggctgaggtgggaggatcgcttgagcccagaaggtggaggctgcagtgagccaggatcgcaccactgcactccagcctgggtaacagagtgagactttgtctcaaaaataaaaaataaaaataaaaataagaaaagcacactgcttgcagagctgagtcaattaaatgtcaggcccctctactgggtaccacatgtagcgtatgaaccacaggaccctatgcggtggccctgngcactgtagcttagcagaggtaagcactggcttcgctatcagataggcctggatttaaatcctgacattatcacttcatatgtctgtgccaaagagacaagctctctgtgtctttcatttcctccccccgtaaatggaagttatcctagtgcctcactcatgaagatccgatgtggagtaaatgaaataacatgtcaggctgctagcacaatgcctggcatacggcaagtgctcattacattcatgggctgatcattgttccatcacaaagacttaccgcaattgatgcgcccaatccccatcattaggcattgggttattaccaagggtttgctgttataaatactgctaaaatcaatatcctctgtgcattttgtgcaagtatttatgatttcctcaggaagcaaccctaaaaatgagaccaattagtgcaacggtatttatatttttaaagctttagctacatattcctaaatgcaatgcatacatttaagtcctagcattccctcgtgctttttaaagtcccttcagggattttcaaacagctttcatctttgctccttcaatggggacagaggggggagtgcctgaggcgtgtgaatgttagtgatcttccatcacagagaccacaggtggggaaacccctaggagcctggtcccaggtggtggccrcagttcccagagctcagcctgccacgaggaagtgtgagatggccatctgcatgagagccaccaggccactcgttttcacttcctctcggagttttttttttttttttttttttttttagacagagtctcgctctgttgcccaggctggagtgcagtggtgcgatctcggctcactgcaagctccgcctcccgggttcacgccattctcctgcctcagcctcccgagtagctgggactacaggcgcccgccaccacgcctggctaatttttttttttttttgtatttttagtagagacagggtttcaccatgttacccaggatggtcttgatttcttgacctcgtgatccgcccgcctcggcctcccaaagtgctgggattacaggcgtgagccaccatgcccggcctgttcctcttggagcttttgaggctggtgtttcctttgcagaagttatcactctgcaaagtgggaacccaaggcggggagttacaggggtctaagtgcccagaccccctattttgaaggacttccagcaaagcctggacgatggccactcactcagttacacatggcagttgtgtgcccgtgggtaggtcaagtcccttctccagcgccattcttctcccctggcaaatgagtgggaagtgattgaaaatgatacagaagaatcagaaggcaacatggccacagtagatcaggtcaggggtagaacaggttagaaaaagatgtttactaaaaggatcctgattttatacacatgtatcccaaaggatggtgggattacatgtgacattttaaagattcatttcttattttgatgctctgaattttgtttctcataacaacatgtataactcttgtgcctcttttttttcttttttttgagacagagtcctgctctgtcgcccaggctggagtgcagtggcaggatcttggctcactgcaacctccgcctcccgggttcaagcgattttcctgcctcagcctcccaagtagctgggattacaggcatacacaaacatgccccgctttttttttttttatttttttttttt

SEQ ID NO: 704924 - DNA, 2119 bp, Homo sapiens
  misc_feature 392: n = A,T,C or G
gccagtagtcctagcactttgggaggcctcgatggatggatcgcttgagtacaggagtttgagaccagcctgggcaacatgatgaaaccccgtctctacaaaaaatacaaaaattagccaggcatggtggcacacacctatactcccagctactcaggaggctgaggtgggaggatcgcttgagcccagaaggtggaggctgcagtgagccaggatcgcaccactgcactccagcctgggtaacagagtgagactttgtctcaaaaataaaaaataaaaataaaaataagaaaagcacactgcttgcagagctgagtcaattaaatgtcaggcccctctactgggtaccacatgtagcgtatgaaccacaggaccctatgcggtggccctgngcactgtagcttagcagaggtaagcactggcttcgctatcagataggcctggatttaaatcctgacattatcacttcatatgtctgtgccaaagagacaagctctctgtgtctttcatttcctccccccgtaaatggaagttatcctagtgcctcactcatgaagatccgatgtggagtaaatgaaataacatgtcaggctgctagcacaatgcctggcatacggcaagtgctcattacattcatgggctgatcattgttccatcacaaagacttaccgcaattgatgcgcccaatccccatcattaggcattgggttattaccaagggtttgctgttataaatactgctaaaatcaatatcctctgtgcattttgtgcaagtatttatgatttcctcaggaagcaaccctaaaaatgagaccaattagtgcaacggtatttatatttttaaagctttagctacatattcctaaatgcaatgcatacatttaagtcctagcattccctcgtgctttttaaagtcccttcagggattttcaaacagctttcatctttgctccttcaatggggacagaggggggagtgcctgaggcgtgtgaatgttagtgatcttccatcacagagaccacaggtggggaaacccctaggagcctggtcccaggtggtggccacagttcccagagctcagcctgccacgaggaagtgtgagatggccatctgcatgagagccaccaggccactcgttttcacttcctctcggagttttttttttttttttttttttttttagacagagtctcgctctgttgcccaggctggagtgcagtggtgcgatctcggctcactgcaagctccgcctcccgggttcacgccattctcctgcctcagcctcccgagtagctgggactacaggcgcccgccaccacgcctggctaatttttttttttttttgtatttttagtagagacagggtttcaccatgttacccaggatggtcttgatttcttgacctcgtgatccgcccgcctcggcctcccaaagtgctgggattacaggcgtgagccaccatgcccggcctgttcctcttggagcttttgaggctggtgtttcctttgcagaagttatcactctgcaaagtgggaacccaaggcggggagttacaggggtctaagtgcccagaccccctattttgaaggacttccagcaaagcctggacgatggccactcactcagttacacatggcagttgtgtgcccgtgggtaggtcaagtcccttctccagcgccattcttctcccctggcaaatgagtgggaagtgattgaaaatgatacagaagaatcagaaggcaacatggccacagtagatcaggtcrggggtagaacaggttagaaaaagatgtttactaaaaggatcctgattttatacacatgtatcccaaaggatggtgggattacatgtgacattttaaagattcatttcttattttgatgctctgaattttgtttctcataacaacatgtataactcttgtgcctcttttttttcttttttttgagacagagtcctgctctgtcgcccaggctggagtgcagtggcaggatcttggctcactgcaacctccgcctcccgggttcaagcgattttcctgcctcagcctcccaagtagctgggattacaggcatacacaaacatgccccgctttttttttttttatttttttttttt

SEQ ID NO: 704925 - DNA, 2119 bp, Homo sapiens
  misc_feature 392: n = A,T,C or G
gccagtagtcctagcactttgggaggcctcgatggatggatcgcttgagtacaggagtttgagaccagcctgggcaacatgatgaaaccccgtctctacaaaaaatacaaaaattagccaggcatggtggcacacacctatactcccagctactcaggaggctgaggtgggaggatcgcttgagcccagaaggtggaggctgcagtgagccaggatcgcaccactgcactccagcctgggtaacagagtgagactttgtctcaaaaataaaaaataaaaataaaaataagaaaagcacactgcttgcagagctgagtcaattaaatgtcaggcccctctactgggtaccacatgtagcgtatgaaccacaggaccctatgcggtggccctgngcactgtagcttagcagaggtaagcactggcttcgctatcagataggcctggatttaaatcctgacattatcacttcatatgtctgtgccaaagagacaagctctctgtgtctttcatttcctccccccgtaaatggaagttatcctagtgcctcactcatgaagatccgatgtggagtaaatgaaataacatgtcaggctgctagcacaatgcctggcatacggcaagtgctcattacattcatgggctgatcattgttccatcacaaagacttaccgcaattgatgcgcccaatccccatcattaggcattgggttattaccaagggtttgctgttataaatactgctaaaatcaatatcctctgtgcattttgtgcaagtatttatgatttcctcaggaagcaaccctaaaaatgagaccaattagtgcaacggtatttatatttttaaagctttagctacatattcctaaatgcaatgcatacatttaagtcctagcattccctcgtgctttttaaagtcccttcagggattttcaaacagctttcatctttgctccttcaatggggacagaggggggagtgcctgaggcgtgtgaatgttagtgatcttccatcacagagaccacaggtggggaaacccctaggagcctggtcccaggtggtggccacagttcccagagctcagcctgccacgaggaagtgtgagatggccatctgcatgagagccaccaggccactcgttttcacttcctctcggagttttttttttttttttttttttttttagacagagtctcgctctgttgcccaggctggagtgcagtggtgcgatctcggctcactgcaagctccgcctcccgggttcacgccattctcctgcctcagcctcccgagtagctgggactacaggcgcccgccaccacgcctggctaatttttttttttttttgtatttttagtagagacagggtttcaccatgttacccaggatggtcttgatttcttgacctcgtgatccgcccgcctcggcctcccaaagtgctgggattacaggcgtgagccaccatgcccggcctgttcctcttggagcttttgaggctggtgtttcctttgcagaagttatcactctgcaaagtgggaacccaaggcggggagttacaggggtctaagtgcccagaccccctattttgaaggacttccagcaaagcctggacgatggccactcactcagttacacatggcagttgtgtgcccgtgggtaggtcaagtcccttctccagcgccattcttctcccctggcaaatgagtgggaagtgattgaaaatgatacagaagaatcagaaggcaacatggccacagtagatcaggtcaggggtagaacaggttagaaaaagatgtttactaaaaggatcctgattttatacacatgtatcccaaaggatggtgggattacatgtgacattttaaagattcatttcttattttgatgctctgaattttgtttctcataacaacatgtataactcttgtgcctcttttttttcttttttttgagacagagtccygctctgtcgcccaggctggagtgcagtggcaggatcttggctcactgcaacctccgcctcccgggttcaagcgattttcctgcctcagcctcccaagtagctgggattacaggcatacacaaacatgccccgctttttttttttttatttttttttttt

SEQ ID NO: 704926 - DNA, 1044 bp, Homo sapiens
tgagtcatggtctttgaaatctataaatcaataaaggttggaaacagagaagtagacaagaagttatcagtacttctctttagtaacttgtcatttttatccagagtcaagattctcaaaccacacgtgctttgttaaagctggctataaggaaaactggttgcttggctttttcattgagtctatacaaactgctcaaaagaatgactcttaatgaaagcctgagtgaccctcaaattaggaaattctctcccagataattgagaagtggccttgactgtaccaggtcacacrtggaaataagtacaaaagtaatgactaaaataggccaagttgaccgagcactttgtacataggggtattatacgactgcaaattgtgtgatgtttaattgtcacagaaagagatactcgttttaagcacttttagcctaatgtactggaaaattgcttaatggatttttatactctattggaaacatttccatattggtgaaatgccactcattcctttttctgaggagcaaatcttgagtagcaatgggaagaaagcctggcaacagccaccatttgtcttgtggacctgacatgcttattcacctagaaaaagaagaaattgctaaatgcacactgatacctcttaggtaaccacaggttttcattttgtgctgaattattagtcatttttcctttatgtttttagagtatgattcagagaccaatttattcccaaagaaaattgccattacatctactaagttttcatattaaaacattttctaccaagggatgactgtcactctgagcaactgtgccactgtgaatgcctcatgtgtcagcatagcttattatctagctctgagcagaatgggagtgctgctgaattagtcttggtccacaggtatctccagtgtcccagatgtttcacctcctttgttcttatctttgcttttattttgggttacaaacacagcagataaattaattctcagcatcttcagagaaactgtgggttagagcagaatcaccaactagaagaaaccat

SEQ ID NO: 704927 - DNA, 1044 bp, Homo sapiens
tgagtcatggtctttgaaatctataaatcaataaaggttggaaacagagaagtagacaagaagttatcagtacttctctttagtaacttgtcatttttatccagagtcaagattctcaaaccacacgtgctttgttaaagctggctataaggaaaactggttgcttggctttttcattgagtctatacaaactgctcaaaagaatgactcttaatgaaagcctgagtgaccctcaaattaggaaattctctcccagataattgagaagtggccttgactgtaccaggtcacacatggaaataagtacaaaagtaatgactaaaataggccaagttgwccgagcactttgtacataggggtattatacgactgcaaattgtgtgatgtttaattgtcacagaaagagatactcgttttaagcacttttagcctaatgtactggaaaattgcttaatggatttttatactctattggaaacatttccatattggtgaaatgccactcattcctttttctgaggagcaaatcttgagtagcaatgggaagaaagcctggcaacagccaccatttgtcttgtggacctgacatgcttattcacctagaaaaagaagaaattgctaaatgcacactgatacctcttaggtaaccacaggttttcattttgtgctgaattattagtcatttttcctttatgtttttagagtatgattcagagaccaatttattcccaaagaaaattgccattacatctactaagttttcatattaaaacattttctaccaagggatgactgtcactctgagcaactgtgccactgtgaatgcctcatgtgtcagcatagcttattatctagctctgagcagaatgggagtgctgctgaattagtcttggtccacaggtatctccagtgtcccagatgtttcacctcctttgttcttatctttgcttttattttgggttacaaacacagcagataaattaattctcagcatcttcagagaaactgtgggttagagcagaatcaccaactagaagaaaccat

SEQ ID NO: 704928 - DNA, 2506 bp, Homo sapiens
ccttttcaacaaataaagagatacccccagcttgtgataattagccttcccctcttgcatccttcctacagcttgggctgccctaaccagccacagggccagcctgatcaagtcactcaccttaacacagcctgtggttccccatggtccgtgtggctgtaggagcagcgccctcctctctgccccttctccccaccatgccacccccactgcccatgtgcttggtgtctcagccgccgtgctccttggtggcccctgcactcgcyatgatctcccaccctgtgccattcccacatccgtgaatgctcctcccctgtcccctttctgctctcccgggactcaggaacgaggtcttccctcgaccctgctcatcccctgtgctctctgacttccccaccataccataacctcctcaagggcaaggaacgtttgttttctacctcagtattgctgacatcagcccaactcctggcacagagttgcagaataaaacaggaggcatcatggttacttccattcagacagccacaagccccaacaccaaagggacttggtcctaaaattcacatcctcctgccccactgacccctgccaggccttggtggaagttctgtccacagagtgcacacgtgggtgtctgaatctttgtgtatcatccagctccctttcttgcccagcaggtgctggatgtgtctggggcagacatgttggccaagtcaattgccaactgccaggtggagcttctggaaaactgtgggcactcagtagtgatggaaagacccaggaagacagccaagctcataatcgactttttagcttctgtgcacaacacagacaacaacaagaagctggactgaggccccgactgcagcctgcattctgcacacagcatctgctcccatcccccaagtctgacgcagccaccactctcagggatcctgccccaaatgcggtcggagcgccagtgaccctgaggaagcccgtcccttatccctggtatccacggttccccagagctttggggaccacgcgaaaacctccaagatatttttcacaaaatagaaactcatatggaacaaaataagaaaccccagccatgaaatctaccatgaagtcttcaagttcatgtcactgagaagcttgtgcaaagcagccaccttggaccataattaaatcaaggacattttctttgagacattccttatagttggagactcaagatatttttgttgcatcaggtgtattcccttgcatgggcagtggcttttataggagcattagtcctcattcgctgaaccctgttgtttaggtctaatttaagttttacatagagacccatgtatgactgcagcccattggctgcaagaccagggaggaaagtggcaagctgtagaaaatgtttacacgcatggaggggcattgctctagccctcagagcgtccggagcagcagggtacatgggtgggaggttcattcagcacccaccagtcaggtatgttctgagtgaacccacagcagtcgcagaatgagcacctggcagggtgggtttcctaggaataatttattatttttaaaaataggcctaataaagcaataatgttctagacatctgtctaagtaatcagactcaggttccacacacaagcaacaactcgtgggcctcttttctatttcaatgtgctactaagaacccttggatgtaacatactagttagttaatgaattctgtgaattctgtgaagagtaatgtgattgaaaataagtctaaacagctgtaaaagtgaccacaatgacatgaaataaatttaataagtctagatcagcaacatgcaggtggtttctatttctgaactcctaattaggtgcaatgttggcagattttctgttaactttaaaatgtgttttttaaaataaggcttgtttaacaggctttggaagtctttgcatggatgatttattaggtttaaggaatcatgtttgcaatttttatccagttgaaattgtatatcaaaggccaggtgcagtggctcatgcctgtaatcccagcacttgagaaggccgaggtgggtcgattgcttgaggccaggagttcaagaccaacctggccaacatggcaaaatcttatctctactaaaaatgcaaaaattatctgggcgtggtgggacacacctgtaatcccagctacctgggagcctgaggcatgagaatcgcttgaacccgggaggcggaggttacagtgagccgagattgtgccattgcactccagcctgggcaataagcgcaaaaatccatctcaaaataatataataataattcactggaaattgtatatcaaaaaaggcaagagtcatcaaaatattctttttgactctttctgtaggatttaggagccctaaactccccaggagcttcactctttccaattttttttttacagaaaatctacagccaagtcattctgggaataaagtgagataaactttacagtttaaatctgaattcagga

SEQ ID NO: 704929 - DNA, 983 bp, Homo sapiens
caggaggtgaccctgccgatcgtattccattggggtattacccctctgcctgaaatcccaccactatgagttcttcttttttgtctccctcctggaggagagctaaaacagttaagccataacgagttagtgaggatctactggggatggattcatcagatgcttttctctcaacctacccaactcacccttgcaaccataagttgggagatgcaaacaccaggatttgcacagtgcttccaggatagttgctgcttccccacaggcttccttttcccacttgcagtcctgcttcctgccttgtagacttcactttctccccagtctctcccaatcattgccttcaacttcccagcgtaagttctgctcagacctgcatttgccacaaccaatccacctggttgcaagtatatctggtaaaccactgctcttcaggccccaacctaccacccagctccttgaggcaccaagggagggagacttggtgtcagtcaggtgaaagagagactttgggattaagtgatgtggtgcctaatgaagactgawcttgggggacctctgcaaatggtccatgcttcaagtgggaaaggaagagtagaaggagtagaaggaagagagtaaagggatgtttccagacttagcctccctgcaaggtcaactcacccattctcctctcttagcaacataggaatgaagaaaggcccttaaaaaaggcagtgaaggaaaatgtgcctggaagataactgatacttatggaagctcaataaatataatctatagtataaatagtatcaatagtataactggtaataacatgtgaatatcttcaggtcaatttctagagagtttgacaagaacttccatttgtgttcaccaggtaaatgaatgaggatgggaaggtaaggaggaggtgagtagtccagagagagagccccactgggtaaagacatgaggcctcacttggaatagtgatggtaggcagg

SEQ ID NO: 704930 - DNA, 577 bp, Homo sapiens
ggaatattatacagcaataagaatttttaattaattcatttatttttggtatataagttcctctactcacttgttcacttttaaaatcagccccaagccatactctggcatctaacccgttatctaattatgtgactagagacaatgtatggagaagggaatgatgagtacctgcattcttttacaaggtacttctctcaggtggaaatgtgataatagcctcatctgacatggaggagaagctgctcaatctggagaacaagggaactttacatggaattcgggctcagcataatccagtcatctgaaatctcttgtatatctctattccagttctctttcattcttttactgaataattactttcacgtaaaggatccaactaagctatgaattcaactgatggcacamgtttggcatctcaaaggattaaatctttatttgatattgagtaacattagtccttgggtttcaagaaataaaagacacttttagcttcatctaaaagtcttctagtcttggaaagtcttcatgaaattattggaagtcgtcatgaaaatcttctagtttcacccca

SEQ ID NO: 704931 - DNA, 1055 bp, Homo sapiens
ttggggtcatggaaaacccaatttgaagctggttggtcagaagttccagaggtctggatttgctcctggttgtgtgtggagtcttgggaactgagtcttcaacctgtgcgatatgacagatctccgggtagacagtgtcacagttgaattggaggacacccagcttggtgtctgctgcttggtgagtggtgaaaaactcccacacatttggccacagaagtcatcttctgtgttgatgattgttgctgtggtaatgtgagaggagaggaaaaaacacagtttgagcatttcccaaaacatcctccaagctaaatagacccccatgttttaccttctctccttttgcttttttttcaagacatgtgtcacaattttagaaattattttttttaatgtcagtacttcctttggatcaactcccttagtgtaaggtttaccgttggttccctaatagccaggacaaggactggcatgaagcgcgtgctcaataaatatttgctgaattaataagcttcacctctttaagtctcagttttatatcagaaaattaggagaagaaggtttggacaagaggtgctataatgttccttctgagttctaacatcttctgtattctctgtcttctaaaatcataggtctgtaacaagtttacaggttggtgctactcataataatttatgtattaaacattttaagtgagaaatatttcaaggtcaggtgtggtggctcatgccctataatccsagtactttgacaggctgaggtgggtggatcacacttgaggtcaggagtttgagaccagcctgaccaacatggcagaacgctgtctctactaaaaatacaaaaattagccagaagtggtggcactcgcctgtagtcccagctgtttgggaggctgaggcaggtgaattgcttgaacccaggaggtgggtgttgcagggagccaagatcataccacttccctccagcctgggcaacagagtgagactccatccccccgtaccccttcccccaccgccaccaccaaaaaaagaattatttctaacgtaaaaaaa

SEQ ID NO: 704932 - DNA, 1055 bp, Homo sapiens
ttggggtcatggaaaacccaatttgaagctggttggtcagaagttccagaggtctggatttgctcctggttgtgtgtggagtcttgggaactgagtcttcaacctgtgcgatatgacagatctccgggtagacagtgtcacagttgaattggaggacacccagcttggtgtctgctgcttggtgagtggtgaaaaactcccacacatttggccacagaagtcatcttctgtgttgatgattgttgctgtggtaatgtgagaggagaggaaaaaacacagtttgagcatttcccaaaacatcctccaagctaaatagacccccatgttttaccttctctccttttgcttttttttcaagacatgtgtcacaattttagaaattattttttttaatgtcagtacttcctttggatcaactcccttagtgtaaggtttaccgttggttccctaatagccaggacaaggactggcatgaagcgcgtgctcaataaatatttgctgaattaataagcttcacctctttaagtctcagttttatatcagaaaattaggagaagaaggtttggacaagaggtgctataatgttccttctgagttctaacatcttctgtattctctgtcttctaaaatcataggtctgtaacaagtttacaggttggtgctactcataataatttatgtattaaacattttaagtgagaaatatttcaaggtcaggtgtggtggctcatgccctataatccgagtactttgacaggctgaggtgggtggatcacacttgaggtcaggagtttgagaccagcctgaycaacatggcagaacgctgtctctactaaaaatacaaaaattagccagaagtggtggcactcgcctgtagtcccagctgtttgggaggctgaggcaggtgaattgcttgaacccaggaggtgggtgttgcagggagccaagatcataccacttccctccagcctgggcaacagagtgagactccatccccccgtaccccttcccccaccgccaccaccaaaaaaagaattatttctaacgtaaaaaaa

SEQ ID NO: 704933 - DNA, 456 bp, Homo sapiens
aggctggagattatctggtaaccccattcccagctcaatcaccaactctctaagcagaaggaaatttttcatctctcttgccatagtgaggtcaggattagtgaggtgacaagattaaatatgagctaagctatgacacttgttttccacagtttcctgakcccccctccctccttttctctttcttccttcttacctcccttcctctctcctatttattcttcctacctttttgttgttgctgtgagtgtcttcacctgtttccttccttcctttatattcctggtaatgtttcaaatttattggcatgggcagcttctcataataggtttgtttttattatttttcttgttattactaaaacatgttaatagatagattctaactctatggcacaactaagacagttgtgttacattcttttccgtgttggggctaattagaatattaagttta

SEQ ID NO: 704934 - DNA, 827 bp, Homo sapiens
tctcctgcaatgtcctgacttctcttctgtcttctgctcttacccatccattctccaaccggcagccagagttgtctttttccagagtgagctagatgatgccttccatggttcaaagcccttcaggggctgtctgttgaccttagactagtacccgccgtcttcaccgaggccaacaggccccagatgatccagcccttgcccacctctcttcccttgggtggaccagccattccccagcattctgctctccagatcaccatggcccttcctagaccatccaaggtcctgcctcccctgggggcctttgctttacccgagagaccgcacccttaactcccatgaagtggcttctttcggatccaggaggggcttcccctggccaccttactctcagccagtcttcatttttatatccttccragcaccctgtcatgagctgtaattatcataatctgtaagttacatgtttatttactgatttgtctcccttcattaaactgagagctctaggcaggcaaacatcatgtcaagttcactgtggtgtccccagctcccagcttggggccagactgtagtgtgtgtttgttgactgactgaataacccagacagactcactgggatgtgtctggaggagggttagcaaggtggcccgaaaatgacctgaatcctctatcatgcttgacagattggagcatgcccagcttggaggcagagagtgaagaggactgtgagccttaccctcagatatccctagtcctgtcttgtgggtgaggaatggactcttctgtggttcccttggccagtggaaggagtaatagcaaga

SEQ ID NO: 704935 - DNA, 840 bp, Homo sapiens
tgtaataaaaccttgtaaaatgaaaaattaggatgtatagattaaacaaacttgaaaccaataattaatctactctctacaaaccccaccctaacctactggaatcctatgactaatatgaacatgccagatgtgccctgcccaaaggcttcactttctgatgcttagatatattcaatcaccttaaagaatgtacccaggattatttgtccccaaaatttaaagaactcacctcctagatgaatgggatggtctacattcatccatttggatttgggcaaagccaccaacacccctttctccctcttcatcagctgcatcgtaatggtatcaccaacaacatactgatgtgactctgtggcaacaacactgaaacatggacactyatatgtagcagggcaaggagtgaagagattgggatctaactgagtaaatgtctcaatctcacctcttgagatccttcttatgcacagaactgtaacagatgggacatttactccacgtcttctcactcagtgaaagatagtgcaggatgcatgcccagcagaagatgtgtccacaacgggttatcttggctgcagtaggtggatagaggcatattgggcaagatggcacttcatggctacaaatgcgctgaaacaaaatgccaccagaaggttcactgcttgaagaactgattagggactgtcaaagttttaggcctctctactctctcatccgcatctctctcatctctatccccgtacatccttatactcaacatatctttctaaaattgtttacaacgtaggtacatgtatgatcatttttttcttttttttttttttttgagacggtcca

SEQ ID NO: 704936 - DNA, 834 bp, Homo sapiens
gattcacatgaacatatacaatgataaagaacaaaagtacaataaaacagccatgtaccgggacaatatatttgcatgtaaagtgttcatattataatttgcaaaggctcattaaagtttatagaagtccacgcctccataaataaattggcaaagaataggaatgaacaggaatgaacaagcagttcatccaagagaaatacaaataggaaacaagcaaatgaaaatattttaattctcaatactgatcaaagaaatggaaattaaagaaattgatagtaaaaatatcaacttagaaatgctaaattgtactaaaaaactaagatcttagaaacttaaacattcatgaaaaattaacattcaaacaaatggcatgttcgaagggaaacaaaaattcacataatgatcaaacagataaaactataaagctatccatactatttgggactgaaaaaccatggagggacgtatcctaaggaaataatagagtcaaaaagctgtatgtatgatgatatttattgtaactaaaggagaaaaacttattaaacagtaaaagaagattaagtagccaataaaaataatacgttacaaaactacatagaaatctaaaagaatagtaattatataatattaaatgaacatcgaaaatgcaaaacaattccagctatttaaaaactgtatgtatgtggtgatttacaaagttaaaaacatgcaaattgctttagagtaataggttaagattccctcccwctttttttttttttttttttttgccaatccccgtatttggattatttcacctatcctatgtatttttttccctaaataatagca

SEQ ID NO: 704937 - DNA, 1207 bp, Homo sapiens
aaaaaaaagaaagaaaaacattctaaagtaaagtgcatcccagtttgcaaaacaattttgaaaccctgacctagagggtgagcagatcaagcatgagcacacccattaaagaaactgagtcatagagagggtaggtgctgctgaagtggcccagacaggaaggagggctaggatgaagcccaggcactgtgagcaagtcctgctcctctcccacaccaygctgctatttcacctgtgcacaaaggtggcttacctgtgcatgtgattccgtcaccttcataatccaggttacactcacacgtgttgttctccttacaggtggcatgagcagaacaaggaggcgtacacactgcaggcaaaactgcaaagaaaggggccactttcattctgtacccatggtgtgaagagttaaaacccatctaaggagactttccaagactctctctggacgaccactgtgttcataagtgcccctgtacagcaggaagatggggtgatttgctaaggtcttttctagccttggagattctgggattctagaattactcttttatagtaagacatgatctctgcaatgtcattgagatttatatgagaaaaaatgttctttaggggctatcaattaaaactttataccacaaaacttattagcaggaatgaacttggcagattagctctctggctctaaggacaggggttcccgatggatatggttaaattggaggagaaattccatggccttctgagggcaccactgagctagggagaagcctggagctttggtattggctggggttacagtgcatgcaggcagcaggaggccatgtagtgcttaggggaggagggaggaggcagaaggaacagggaggaggaactcaagttagccatactgctgcaacccatgaaacttcaggttgctaaagcccacaggtagggcctcgccatgccctgtgaccccagggaggattaaatgacagtcattcacatggataattcaaccagcacatttcagatctaccagaacacagggcttcgagtataaaggagacatcagaaaactgaccacctagtaaggatcgagctatggcaatgattataaatgatgagtgtgataatggcagctgcttgttttgagcatctgcgtacactgggaacttcaaaaccatgctcgctgaccctgccagcaatccttgcgttgcagaatgtg

SEQ ID NO: 704938 - DNA, 1336 bp, Homo sapiens
aggacaaacgctggaagcaaggaaatgtttataagaaacactcgtgctcttcacggatgctttcggtattccattaaagcttagaaacttagttttgagagataccaaaaatcatgtggtgcaattcacatccaatactggaactatattactcttaaatttgtccgggtcaatgtaagtattataagctttgttaattcaacagacattcattaaacaactcttatgttcaagggaactgatgacacaaagttgaaaaagtataaggtgtcagcccttaaggaacttgtcaggtagccaggtagtagagaataaatggtcatttatttatccacttagcaaacatttatttcatgctctatgcaccaacacagtatcttgaaagactggtattattgtcatctctattttatagatgaggaaattgggtctcagaaaggttaagtaatttctgagcttgcgcaattatggtgtctggcacattctaagcatcttttatccatyagcttatttactctgcataatcaccacccgtgaggtagctacttttgttagcttcatttacatatacggaaatgtcattctgaaagggtaattgaccctactaataaatggcagaaccaggattacctccagacaacctggttccagcatctatgctctcaaccaccatgttctattgacatattgttaagccagtcagagtcaagtcagtgtgtgagggtcatgtaatgaagaacaatgcaaacaataaatggtcaatataacttgtgtcagttctttcagtttctttgatttttctcttcactccttattgtccagttaactccattaccaaaaataaattgcagagaaggaaaatggcacaatgatgtgggggtgattttggcaacaggttgggaaaatattgctttgagtgggggcttctaccctcagttaactgcaggcttctaactctctgaaacgtgcacattttagtgtggatgagcttctttgcatctttctgggagaagttctacagctttcttagatttccctgtgacccataaaaggctttaaaaaaaaaaagaccaattattagcctactgaaagccaatggaacattaggcacatcaatattttattataaaaaaatctataaatgctatggaggcattaaaatatttagaacaaccctgtggtgacacagaaaatgttgatgtgataatgccaataacaatttgaaagtgttatgttcactttctcaactctgattacctcctcaatccatgcatatttcacttcctttcttccaactagactgtacttagcaaggtcaccagtgaccttcaccttg

SEQ ID NO: 704939 - DNA, 640 bp, Homo sapiens
ggaatagtaacagtgaaagcaaatactcagcaaaaaccatgtgccaggctctcttctaagcactttacatattaacccattgatccttataacaccttaggaaatggtaaaagactagtggttggaagacaaaatgacttctccttgccatacccagcagaaaaagaaaatatgtttgtagaccctctttcaactaacagagatgggtaatcttttttaaaaagagaaagttgagctagttgagatatgtgcagggtggtctggggagacagagaaatctgagagtttgtggggcagtgtgaggctacagggtatgttggaaccactggagtcccatctgggtcctgggctacaatgatgccaaagatcaagagggactcttaaagccgagccctagcaaagaaccagggatattcagagtggaggcaagacagagaagggtgttgaagccaggtctgcaacggagaattgccttaaggtcatttggaaccaggccgaaaagtttcaccagctagggtgaacctaaagttatatcagccaggcgcagtggcttatgcctataatcccaacacttggggaggccaaagtgggaagcccaggagttcaagaccagccttgccaacatagcragaccatgtcc

SEQ ID NO: 704940 - DNA, 608 bp, Homo sapiens
gggagctgcatttcagactgaacaagtggagtttgaagagtttttagatgggatggatacataaaagcttgaaatgctaaacaaagtggaattttctcctttcaaatgagaacaagaaaaactagaaggaattctatttttggcacaacagtttctcacagttgcctgtgcattacaacctaaataatttccttctgatggtctttaatctgctttctgcaaatgagatcttatgtcaaggmtttaatctttggtattccaaatgcatctgaaacagggtagtgagtggggttaataatcacagaagtcgaaagacacaggactaactgtaaatgactgacctccccaagtcacagttttaggattaaatctccattttcttccccctgttgaatctgaaactttcttttatcctcatctctaagggaatgctttctatttccagccggaggttaaacatgaaatgcaaatatgaagacagagtggggtggttctctttcccactctcttcctgctttacccatgaggactccatatcatagcacgacctgtagggtcatcaggctgagatcaaatctggtcatcttgtttttggccatctgacattt

SEQ ID NO: 704941 - DNA, 608 bp, Homo sapiens
ctgtattgagtacagtatagtaacatgcttgcaggctgacagcctagagcaagagcctatatcatagcctagctgtgtagtaggcaataccatctaagtttgtgtaagtacactctatgatgttcgcataataacaaaattgccttatgacatatttcttagaatgtatcccaatcattaagtgacgtgtgaccatacattagattttaatgaacattttttgtacctgctgattgagagcaggtacagagtctcactcttcaatgtatccccagtgcttgaaactttgtaattgcccatttatgtcatgttaattgacagatagattaataaataaatgatgctaagagagaatgagaaaaagtaaaaataaaaaagattattcttttattgtaatatctgatactaagccaccattgcctattggttaaaacaacaaaaaaattatttgaacaaatgtttaamcatagaagatatatggataacaaataagcacataaaaaagatcaacatcattagtgaataaagaaataaaaattaaataacaatgagatatcactacatacttagtagactgaccagaattaaaaagacggcctataccaagt

SEQ ID NO: 704942 - DNA, 1277 bp, Homo sapiens
agcttatcacatgaggcccatggtattcaaggggtgttgagttcaaaaaaaagagaaaaagagcctctccatttccacttcccagcctttttttaaagctgggtgaccccatgactcagttctgcacagtggggcctaaatggtggtcacctgggagctgcacaggtgcgtgggggttacgtgcagagctactgctcttggtctgtctcttccttctgcctggactcggaaggggatgtgtgaagggcagcaggtatgtcagcgggcaaggaggcagcgtgctgagaggcaaagcggaatctgagaaagcttgattgctcaaggacactgtagaatcacttcccctgaaaagggcccttctctgtggacttacgtaagaaaaaaagcaagtgctttagcgtgtttctgtggttaacttctttcaatgtgcagctgaaagaaagcctaactgaaaaataaaaattcccagagttttgctcaagtttcccaaccctctcccacggtgcccaggtgtttcatggcaaggccccagcacctgtgctgtgcctggctggactagtgaggtctcaccgctattttccacatcacagtcaggagtgggaatgctattgaagcagcctgaccaaggtacttgcaggtcttgcttggaaacctggaatagaaccttgttctctctctactgagtgggagcgaggaggctggggcctcatcaccacctggcccgctcttcctggctgggctgccagcctcctgcaggagctgagagaggaagacagagcagagggaatatgcattcttagctacattattgatgccaaccaggcaagctcaaagtcycctccatattttcatttccaattatgtggggcaataaaataaatgtaagttggattttatattatgtgaaacatatatgctttgcggtgacaaaggcaggatgctatcttcagcattctgattccaaatttggttcttacatattcctatgtcaacatctagtgtagcacttaataataacaataacaaagtgatcatcaacgtctattgcacggggtaatcagaatttactagatgaggctctgacgcaaacgaaaaggataataagtgaagtaagatgtggttttgaagcctgaggatctggccatgtaatcagccatccatgtgcagaagagggagtgaccacctttctgagtggaaatgaaaatggtttctcagaggcagcgatggatgtttgaggccagtctgagagagaaataatatttgctaggcagagaaga

SEQ ID NO: 704943 - DNA, 653 bp, Homo sapiens
tgtgccccttcaacacttggagtcccaacacaactctcctactctcatcccaccatctgcttccccagggatctgaagaccctaccaccaacactgggatggcagatataaatatagtagaaactgatttgtgaggttgggggggggggttataatccgggaatccggattttgggcccctgcccttaaacactactgtacactgcttctcagagagagtgtggggctagctcagcacaacccatyaccacttctggaatcgccccaatcacaagattaatctgtgaacagatcgcctaaggatttttttttaatttttagtagagattaggtctcactatgttgcccaagctggtctcgaactcctgggctcaagcaatccttctacctccacttcccaaagtgctgggattacaggcgtgatgccatccgtgcctgaccagatatcttaaaggatcttttaatgcaaacttacgtatgtcaatgcagtggaatccaatacactccaaagtgaatttagaagactgtgaatgtgaaaattttttaatgacagcaaaaattgtcgtaagtgcatggaagcaagcatctcatcctggacaggacaaggataccctttttttaattatgtatttatttatttatttatttattta

SEQ ID NO: 704944 - DNA, 653 bp, Homo sapiens
tgtgccccttcaacacttggagtcccaacacaactctcctactctcatcccaccatctgcttccccagggatctgaagaccctaccaccaacactgggatggcagatataaatatagtagaaactgatttgtgaggttgggggggggggttataatccgggaatccggattttgggcccctgcccttaaacactactgtacactgcttctcagagagagtgtggggctagctcagcacaacccattaccacttctggaatcgccccaatcacaagattaatctgtgaacagatcgcctaaggatttttttttaatttttagtagagattaggtctcactatgttgcccaagctggtctcgaactcctgggctcaagcaatccttctacctccacttcccaaagtgctgggattacaggcgtgatgccatccgtgcctgaccagatatcttaaaggatcttttaatgcaaacttacgtatgtcaatgcagtggaatccaatacactccaaagtgaatttagaagactgtgaatgtgaaaattttttaatgacagcaaaaattgtcgtaagtgcatggaagcaagcatctcatcctsgacaggacaaggataccctttttttaattatgtatttatttatttatttatttattta

SEQ ID NO: 704945 - DNA, 979 bp, Homo sapiens
tggacttgcagtttattttattttttatttttcttgagacggagtctcggtctgttgcccaggctggagtgcagtagtgtgatcttggctcactgcaacctccgcctcttgggttccagtgattctcctgcctcagcctcctgagtagctgagactacaggcgcccaccaccacaaccagctaatttttggatatttagtagagacggagttttgtcatattggccaggctggtcttgaacycctgacctcaggtgatccgccctccttggcctcccaaagtgctgggattacaggtgtgagccactgcacccagccttggactcacagtttataaggtagaataaaacatctgacttctacaaagctatttagaaggctgctaaatcgctcgtctcgggtaacaagaacaagtgcgtttttcctgattcctgacagtcaactatagcataagctgcttgaagatggagatcaggtgtttcatgacctgtctggcacctttactgtttaacccatttcttgtttacaataaggtcccaataaattgctgacaatggacaggtgagcttaagacccacgcttaccctatgctgtgacaggtgcagctgtctttgtaaatgtctttgtgttttaatagtagatgttttcttatttttagcttttaattgcatttctttcatatactaatacaaaaaatggtataaatttctggatgtgctttaactcgtccatatagaagatgggatgtcttggacagatgtttacatttattcctgaaatctatgatttctgccagctttctattgccagagccagtcccttataagtttttgaagcaggaatgaatatcacgtttttcactcgtcacacacaacatgaaagcactgacgggaaaaagatgatttgacttagagggcttacctgtgcctgctggcaccattttcaaccttttcaacttttgtcaagtcaagttgacaata

SEQ ID NO: 704946 - DNA, 286 bp, Homo sapiens
gaacacaggcagtgtttctggcacccagggcctcaccctcccaggagagtccatcattgctgagccagtcgcaggtcaccatgaagcatcgccctgggcagcaagtgggatgcaggggcacagcagggcacgtcccaggcggctgagaaagtccacggagggcaagggcaggggcgtgcgccatcgtcggagacagtcggggtgggcagcaccctggactgctgggaaggacagtgggggragggtggaaggcaggggagcccttgccagttgagaatttcttgat

SEQ ID NO: 704947 - DNA, 942 bp, Homo sapiens
cagtactgggtatatacccagaggaatataaaccagtctaccataaagacacttgcacatgtaaatgttcatcgcagcaatattcacaatagcaaagacatggaatcagcctaaatgcccatcaatgacagattggataaagaaagtgtggtacatatacaccatggagtaccatgcagctgtaagaaagaatgagattatgtcgtttgcaggaacatggctagagctggaggctattatcctcagcaactaacgcaggaacagaaaaccaaatactgcatgttcttacttgtaagtgaaggctaaatgatgagaacttattaacacaaagagggaaacagcagacactggggtctgcttgagcatgcagtgtgggaggtgggagaggagtggaaacagtaactgttgggtactgggcttaattcctgggtgattaaataacctgtacaacaagaccccatgacatgagtttacctttgtaacaaatcttcacatgtacccctgaccttacaataaaagttaaaagaaaaaaaaaaaaagccaagtcccttaaaaagtctcctaagccatttggctggggaaaccattttctccttagagactaagcctgtctggaggggcgtgagctatgttggctgcttctcaggcacgtgctgccacgacttcttgattcatttctctttatcattcatgaatgaaaagcattgggaactcaccagtgcacaagcaccttcttgaaaacccagtatgtagtctaaggygagctagttttgtaaagtcattttgagaagctccaatacctcatggatttatgaaacaaaagcttatattaagtttgagatgaactctactaattattttttaaattgttatttcaatagcttaaggggtacaaatagtttttggttatatgaataaattgtatagtggagaagtctgggc

SEQ ID NO: 704948 - DNA, 942 bp, Homo sapiens
cagtactgggtatatacccagaggaatataaaccagtctaccataaagacacttgcacatgtaaatgttcatcgcagcaatattcacaatagcaaagacatggaatcagcctaaatgcccatcaatgacagattggataaagaaagtgtggtacatatacaccatggagtaccatgcagctgtaagaaagaatgagattatgtcgtttgcaggaacatggctagagctggaggctattatcctcagcaactaacgcaggaacagaaaaccaaatactgcatgttcttacttgtaagtgaaggctaaatgatgagaacttattaacacaaagagggaaacagcagacactggggtctgcttgagcatgcagtgtgggaggtgggagaggagtggaaacagtaactgttgggtactgggcttaattcctgggtgattaaataacctgtacaacaagaccccatgacatgagtttacctttgtaacaaatcttcacatgtacccctgaccttacaataaaagttaaaagaaaaaaaaaaaaagccaagtcccttaaaaagtctcctaagccatttggctggggaaaccattttctccttagagactaagcctgtctggaggggcgtgagctatgttggctgcttctcaggcacgtgctgccacgacttcttgattcatttctctttatcattcatgaatgaaaagcattgggaactcaccagtgcacaagcaccttcttgaaaacccagtatgtagtctaaggtgagctagttttgtaaagtcattttgagaagctccaatacctcatggatttatgaaacaaaagcttatattaagtttgagatgaactctactaattattttttaaattrttatttcaatagcttaaggggtacaaatagtttttggttatatgaataaattgtatagtggagaagtctgggc

SEQ ID NO: 704949 - DNA, 2571 bp, Homo sapiens
agggcagtttgtgaactagaatgggtcctctcttggtgattgttacatgacagctgtttgcatcaccttagcaacttaaagataaattgtttaaagataaattggcgtcgtttcatacaaacattaaagaaaatggtaatgtccaacagagtgcccacctaattactgttccaggggtcctcagaggctgttttcctactgtcttcttgatttttaaaatatattttagttgattggttttattcatgccataattggtggaaattaatccttgattctataaatttttacctagtccgtttccaatgttttttgtttgtttgtttctctttccttacttatttatttatgcttttcttttactttttttgtaaagtggaataagttaggaatgagtatattatgaccaactaaactgagtagttttatgtcaagttgcaaattatgttaagtatcaaatatttgatttttttagatttcaaaatagtcacgttttcagaaaaaatcattagtagttttctaaaaataaaatcctcttgattcaacaaaacatacttgatgtggtttttcctcccaaaacaggctcctccttgagttattgggaataagtaatgcttctcaataaagcttcgtgtcaacaaatctgaacatataacatctcagctagagcaagttactaaaaataggctcaatttgtagcttgcagtcatgccttcataaccacttttcaattaatcctgcttaattcagagaatgtataaatatgtaattttgcatgacttttaaggcagccattttattttgaaacgcaactaacgttatatgcataaattcaataaatataaagctgttttcaaaaattgaatgtttttacttgtaagttattctttcaataataataaagagatgatcactagtcagtttatttttcatagttgaattgatttagttgaacttcattgggtgttcttatgttttagtcatgagtccatgctctttaacaagctaaaggaaaccatattatatgctaaaagatgtcagtttgtgaacaatttaatgaatatatagagttacaacatttttcccgattggatgttggggtttactataattctttgttactttatatgtgaatatactcactactcactatgtttatgtatgtaggaaacatgctagtgatgaaaattcaagcagttattaccctagttttctttcattaacaaaatacagaatagaaattatctacttattcttggaggtcttaaaatatcttttcagttgactgataattctgctatcaagagctacaagtaggtgctctggccgtctatatctgtatttccatatattcaattccttactatatatttctcatttgatattctatacccaattcaaacaaaaccatttcatgtatacaatgtacttttatttatgcttttctctatcattaagtagaaagccatttgcacyttagtctaaatctgaaatgtgcctctacctaacctttctaatacattttcactatttcttagttattagaataaatttacataatttctgaaacaactttctctatggagtattccctttagtttcttttcccttccaaacaatttaatgaattacaaatatgggggagatattttttcaatgggtaagacttgacttctacaaatacatgtttaattccttctcaaaattatttctacttcctcttattcaacactgtgctagattttagggatatataataagacaatatatgaggtccttgctgttgtgaaaggtacattcttatctttggcaaattgtagaatctttagctttggtatgcaagggcattggtgtttggtacatgcttggctctttgccttaagaattgcctctttccaccatgcatatttcacctgtgtgggaattcttgcagatctctgtattattgatagtcattttgctctgacattttatacaaagctgaatcagcaacagtatgactaaacacaaccaaaaaagaaagctagaaagattatattagacacttacgtgtatggatcattatggtgaggactgctaaaaaaaacaaaacaaaacaaaaaaaaccttcagccaaaatagatttacagtttaatcgagtaatgaatgattcataaattggaaagcccccacaatcacagcagattcagagagactccaggggtgtctcatggtcagaatgaatttatagacaatacaaagtaaagtgacccatagaaatcagaagtgaggtacagaaacagctggattggttatggcttggcacttgccttatttgaacactcagctgtatgcgactagttgaagtatggctgctggaattggccaagactcagcgattgttacaggcgcatattcctaagttaggttttagtcttgtgtacctattgagttaggttgcagttcattcacaaggactgaaatatagaagtatggcgtttttctcaggccatatttaatttgatttaacaggactttgggtatgtcattgtattttactaatatattttacaaacaccccatgttatctta

SEQ ID NO: 704950 - DNA, 3078 bp, Homo sapiens
tttagaactcaagtgcaagaaagccattaagggaatcccacaatttttgttgtttctaaaacctaatataatttaagattatgaacagccttctttctcagaagaaaaacatatcaccaacccaccacattaaaaaaatgcattattccaatcaatcttgttaatataccatagaaattgaattttttaaaaaaattcagaactttaaaaataaatactaaccataatagctcaattaaaattatatctatattcttggaggttttcaaatgccatatctaaaaacaggatatagtaaggtatatccagggataaactagctgttaaaaaataattgattgagacctgttattattggctaagtaaacttctcttaccttccaaaacatgttccattatttcataagatctagaaatgatatcaagtttgaaatttgttgaaatgttttcctattgacctacttataaatgggttatttacatattcagcgtaattacttgtgcttaaaactgttttcaagataaatttgaactatgtcattgttcatataaaagaaagatgcttcttttcaattaatttstattagttaataattctacaaattgtgtttatttcaatggagattaaagaatataaaaagaataatgtttctgttttagactatactttattagtaaaccatttggggggtggggcaatgaggataaactccatcaaaggaacataagttagaaaagctgtaacataaacttaggttataagtctgaattaccctagacagttagtctatggaatatgagactgtatgcagcctcagctggaagcactgcccttaagcaaagaccatgaaagagatgctgaaataattattcaggcagaaatttagtataatatttctttgggaatgttctccaatagttggaagtcaaaataacaagtaattctcacttccattctttgtcttctcaatatacatccctatatcttgcaaggcatttagcaaattaaagtacatttaccagcctctttgcactttgatgagtcaatgtaactaatttttggacgataacgtgtgaacagaagcaatatttgcagcatctaaaagaaatgtgtgtgaccttttacccctgttaccatgctttagaattcatagctgttttcagctattttgtatataaaataagcatataaaagcgacaaaataaatcaacatcgtagagctatcgtgacatcactggacttctcctaaaacttttacatgaaaaatatgtgaattatttcaagctgctctacttgtttttcatagactctgtcattaattaattttttatgtaccactaaaaagcattttaaaatgcctctaaactatggcacactgctaaatattttctagatgcctcaaaaaagtttttatatgcagtaattttgttttacatacacatgcacacttaactgatttcaagttttttcaactttcatatgaaattgaaagttgaaaaggcacatgaaatgtctttttgaaattcctaactcaatttaatttttttttacatttaggtttaccatactgttttaacaaaatgctccgtatttattctaatatttttaaaactttaggaataaattaatattttggattgttctacagtattgtatcctgaactggaacttttattactgatttattaattgaaatatgaaatatgatatgcacatgtgaaagacacagatcttgagcatatagcattaaacatttttagaacgtaaaatactaatgtcatcacaacctacatgaatatgaattgagtattactagaatccaggagtctctattgtgaacctccaatcattactataggcaaccactgttcttacttttatctttataaattacatttgcttgacattgaacttcatagaaattgaaccatacaatagatattaatttcaatctggttcaaaaaaacacaaccaacagcgtgggtgtcagtgtgatattctgtgctgcttctcagctgaatcaatggtgctgacagctgcaatagcaacagcagtgtcttcagaagttttactgagagtttggagtccagagtttctgcctaatggcagctgcgctcaaatagggccaatggtcagtctggaatcatgggacccagaatgcaccaccttcccctactcatttttcacagttaaggatggaagtggcttccttcatttgctcatcatctggagtagcaggccccttttgctctttcagtgtttctaacattgttgtaaccacgcccccaacccctgtattatattgtctatgctttaaaaactatattgtggacttgaataaaatttattttcccattcccggtaaaaaataattgggtcattctttactcatgtatcaattcaaatttctaagactctatttatctcttctcctcaataatgtttcttttttcttttgcttttttttagacagggtcttgtgctctcacccaggctggagtgcagtggctggaacacagctcactacagccttgacctcttgaattcaagtgatcctcacacttcagcctccagagtagctttgatgacaggtgtgtgccaccaggcccagctacttttctttactttttgtagagacatggtcttgccatattacccaggctagtctcagatccctgggctcaagtatcctcctgcctccaactcccaaagtgctgggattataggcataagccaccatgcccagctaatgttttctatttaccatagcttttcacatatatatgttattatatatgtaatatacatatataatatagtatggatgtgtatatactatattattaacaattagatctaaaatatagaaagaattttaatacctttattttctgtaccttcatagttaatctcatattttccaaatctgttaatgtggcactggtcagttatagctccaaagaatgagcatccacttaatctcataaccaggacccaacctgcaacattagtattacaaattaattcctaattccagtctcactctttcatcaccagttctatctttgcacacttac

SEQ ID NO: 704951 - DNA, 623 bp, Homo sapiens
aaccctgagagaggagtaaaattcacacctgaagaagagatagtcaatctcgtcttcttgtgctgtgtatagttggaagtgtgtgtgtgtgtgtgtgtgtgtgtgtgwgagagagagagaaagtgtatgtttatagaaagtgcactaactcaactgatgtatttgcctgagataaagaaatataaatgataagtggaaggttccttttggagcaggaagctggagagggtagtttcaggccagagcaaagggggatttgaaaacatcaggcttaggagttgggatttgatatcataggtaatggggaaataataggtgtagattgaagaatcaatttcttaggaaacctaggtagaaatacaactgtctattttataggactctaaagctgaatgccagaaatgtgggtattttggctttggtgctatttgattaaagaaaggacacaacttagttgcagaaagttagatgatgactaaatgtggctatgaattcattagtgatagtgagaaagatgtgaccacgagaatataagccccacaaggttctttggatattgtaggaaggccaatagatgtcgtctcacaacagagtaagttaggtaccacaccatggtatttgca

SEQ ID NO: 704952 - DNA, 632 bp, Homo sapiens
tgtggaacaccacaacaggggttgtcagtgggaccttcacccctgaaagacaaactacaacagttgccaagaatcaggcttttcctatgtcaacacaaaaaccctgtgttgaaatattctccttcatctcttgctatataacccagagtgatttttctgtttccttttctttctctaccacatattttgcagcaaattaagaagacacaggctatcacgctgaagtacaatttcccaagccttctctggcatcatttagaattctaacctgattaaaagacctgacttcagctcttaggtgtttaggtataaagaatgccatccccttaaatggtgatttgatcttagttgagtgacatccatactcatagacagttcctatacattcattaggcaagtagactggaaaatgcctcagtctttcgggtttgaggctggtgatagagctccttcaagtggtgcatagcagtaatgtaataccaaacacgtggccctctcacccagcccttgagtgccctccaycagcaaaaggccctttattgaagctaaatggaggagggcatttggaatggctgcctcccaaagacactccagagtgaacttccttctgtttgttcacatgtattcagtca

SEQ ID NO: 704953 - DNA, 1079 bp, Homo sapiens
gtatatcttaaactgaactagaatgcaggagtttttgtgcaatagtcttaatttgatgggagtttggtcaagttctaaaaatgttttataccttcaaccttttagrcagagtaaatccccaagagacttcaccaaggaactttattgcttcttgttcctgatccctttactttttattctctctcttcttctcatttcattcctaccttgagctatttgagttcccacactacaatgacattcagtatctatctggggcaaaacagaaaattttgaacaaagtctttctcaccttaatttttagttcttttgaacaagtctttctcaccttaatttttagttctatttttcagcagaaatcataagtaatcttattgttgacccagttttatctgaaattcaaatttttatatggttgatattccaacatttgggcagtattgcctacatttatatttgtttgttagtgaataaccatttttaggactctggaaacaaatttacataaaaattataaatccctatactttagcagtatagttattccaacaaaagaaatcatttgacagcatttttagagtaaaattcaaggctaaccatttttaaatgctttcataaaattcatgtcttaatatgatcatgtgcactaggataattacccccatatcataaatgaaacatagctttgaaggtttaggtgctttaataaaattgataatgttaacaacctccaacaatcatcactgctgaatgttctttctctgctacgtgctgaactaagtgctttgcaggcatttttaaattgaatcttcctaacaatcctatgaggtaggagttatctttacctgttaataactcttaaactaatttttgattgtgaagaatagattatgtgaagaactaaggtgaacacctttgggcaagtgaatcagactgcataactaacagaaaagactcctttgcactcacgtggattctatctgactctgcctcttctagaaaagtttaaatgaccatggaattttcacttgtcttctctggatttctattctgcttccaaaaatatgatatgaattcct

SEQ ID NO: 704954 - DNA, 855 bp, Homo sapiens
tttctgagcatcccggggatcccagggcccctccaggtaccgggaggcggactgtctactgctcatgcgcgggttagcagcgagtagcctaggttttctaactagcctaggtggagttctcatcacttccctcttgccccccaccgccttcttcagtgggacgggcggagacctccatcccgggaaacactggcccgggcaggtgccaggtctgctcttctttccgcgtctcgccaacctgcatccccaccacaccgtcactcgcctacccttgccccgccagcttcctcggcatcaccgtggagcgcctgatagctaaatgcagacccgagaccccgcgcaaaccggggtgctgccctttctacgcgggagggaactcaggcagagatggggagaggaacggagacagagagggagggagcgatggagggaggaaagaacggatggaccgagggaccttggaaaggatggagggatagaaggaaggagagagggaaggagggagggagggagggaatgrgggggggaggaactgcgggagggacgggggaaagagggagggagggagcaataaacagagagaggaaggcagagagaaaagcagtcttctgcctccaggaccaccaggatcttgcactccgggaaaatgttgggtgcacaatgcaggctaagtgctcggcccacagccgcgtcggcctgcggggctctcaccggccctctggatcgccggcctgggttacttcatccgaaagcgattcagccgaatttcgtctcccaaggaatgagggaattgcccagagagcaatgagccgagactcgggtgattgtccatttttcatccacatggttcacaga

SEQ ID NO: 704955 - DNA, 585 bp, Homo sapiens
tttctttcaaaaacaaygttcaaatgaactgacttgaagaaacatatcaaaaatagatatttgatttgagcctgcccctttattttggaagtcatttcgtttatacagttgggaaactcaaagatgaaacacaggtatactcagcctaatgtgatagagccgcggcctgtgctcctcaggtgtggtccactgaccagcgtctcagcatgccctgggagctggttaaacggtgcagaatctcaggccccactccagagaggcaggggctgaatctgcatttttgaccagatcccctggtgatttgtatgcacatcaaaatttgagaacccctgtttagtgaatatttggctaattttgagccaccctacatgatagtattggctaggaaagccagctgttctggaggaactgctgaaatgaggaggtagttcattgatgagtaccttcaagaagctcagcttcctatcactgactcatctagaatcctgcccaaactggtcaggagtaaatactaaaagtgagggaatggctggctgtggtggctcatgcctgtaatcctagcacttttggcggctgaggcaggtg

SEQ ID NO: 704956 - DNA, 1239 bp, Homo sapiens
tttgataaatcccaacctaacataagcttttttctgcagtgatgtgcagtttgcccccaataaaggtacctaaaaaatacatcacttgagtagtctgatctatcaggacttgcctaggttctggattttctgtgttatttaaggtctgtattttaaccttattaaaatggataagtggagaagaaataatgacagactttcagtgttagaagtacgcaccacaggatttcagaaggttaaagcactgccagaaccaaggaattatccagccagcccaaattccctgtactacaaatgggaaaactgggagttcatcccatagctgccttcatcaggtagagtatgggacttttatctgattgttgtatatrtggggctgggggtgtttctccatttcagttgtaaactccttttgggcaagatctgaatctcatatttttctgccctgctcagtgtgtagaaaaataagaagtaagattttgaataaataattgattgattgggccctcttcatctagcaaaactgcttcgatcatgtcggtagttaagggtcttaattttttatatgcagacctccagaggaaatctaataatgtccctcatcacttgaatcctaggcttaacaataatcattgtcaaggagttcctcctaaaaaataacccagctttacagaatagccccaaaatgtcataaatatgcacataatttgtactagcccttttctttgtaagtagttcgcagataataaagcatgttggaaataaaatcagtactttttaaaatttgaaatgtttaaatagctacttaaccattatttttactccacctcattccataaaggatccaaggtcacttacaattagacacacatttcaatattttaaaaaataaacatgatgtgagaaaactgaagtagaaaataagataaagtacagggtaatgttaatatccaaagttcataaattgctagtaggaggcctgaaacttggctctgagcattccaattaattaataataactgcttttctagaaggcaatagagtggtccaagttcctagtcatcagagtctacttcatccgagataataaatctaagtcaatcacaataatcttacctcttgttagtaagtgttttaagaatctgtacatgactgaattctgataaaacagacacaggagaaagtctgtgggggaggagagatttccaggaagtctcctcatttttttttgtctcctaa

SEQ ID NO: 704957 - DNA, 650 bp, Homo sapiens
tgagccaccatgcccggcctgaagtgtttttaaattactactaggaataagatcttttcttccagtttaattttctacctgattgttcttcagtatgcaggaaaattatgagtttttaaaatattaaataggtaactggttacttccctgaattacattgtttctaatggctttgcagttgtttctcttgggatttcaagtrtattgtcacatcatctgcagtaactataattttgttccctctcttacaatatttatatcttttattggttatcttatctaattataaagtttttccagaaaaaatgttagttaatagcagtaatagtgaacatgcttgtcttattcctgatttaagcagaaacctttctattgtttgtctgtcaactgtgatgttggtttatgatttaggatacatctgtctattgtattatggaagtattcctatattcctattttgacacagtcattaagaacataagaacatgccacttactagctgtatgcaacccactacctaatatgtgacctgaggcaagactgttaaccttgctaggctttagtgtccttatctacagactgaatgggaaaggtagtacctccctcattatgtgatggttgaggactaaataagaaaacgcacacaaagc

SEQ ID NO: 704958 - DNA, 623 bp, Homo sapiens
ccagtttagttgctgagaatgataaccttaaaaaggtgaggcagattgtaaaaatcagaagctttgctgccagagagggcagactagacttgggacaggaagcaaaaggcattggaagcatggcagcattgtcagtcaaaaaaaaaaaaaaaaaaaaaagcaagtttggtaggaaatgaagaggtaaaactcacaaccctgttagcctgagtttctgatcacagttgggtcaatcagtgagaaaaggtagacaaggagatcctagaaatgccatagccacagatgatctagattagccctccacccatccctgactgactagaaaacaatacacatacacagggaaaacccaagcgagccccagtggaaagaaaaaagtcaaggcacacttgagaactagctgaactttgaatgtacccactcctcaatctacagatagataggccagcagaagggtaagtgaatgcctgtggactcaaggtgtttaagcaaaatctctgctcaaatcattggctgaccactaagctatgctgatacagtgatgaactctagttagmctcgataaagaataaaaatcagaataaaaaatctgagcagagacatcagcagtggcctgaaaccca

SEQ ID NO: 704959 - DNA, 868 bp, Homo sapiens
tgcgccgtttcttaagccggtctgaaaagcgcaatattcgggtgggagtgacccgattttccaggtgcgtccgtcacccctttctttgactcggaaagggaactccctgaccycttgcgcttcccaggtgaggcaatgcctcgccctgcttcggctcgcgcacggtgcgcacacacactggcctgcgcccactgtctggcactccctagtgagatgaacccggtacctcagatggaaatgcagaaatcaccatcttctgcgtcgctcacgctgggagctgtagaccggagctgttcctattcggccatcttggctcctccctcctcccgcttgttttcttatgcatataaagggataggaaatatgtatgtatgtatgtatgtatgtatgtatgtatgtatgtatgtatgtgtgtgtataggatcatgcactatatatagcttgcttctttttccactatgataattttcccatgtcatgaattacggcttgcaagtgcttattcttaacaggctgcattatttttcattatttggatttattgttatttaattggagctctattattgaacatttagattgcttccaaaattttttgctcttgttaatatattgtaataaacttctgtgaaacacatactcttcacctgctacttacatatgacttctgtaagccgagacctctgtatccccaggacctagaaggttacctggacatagtagtttcttaattaaaaaaaattattgattgaatgaaagaagactattaaatgttcagttcttctttttttattctgattccctgtgtatccagaggcctcttatttgtctgcatgtatgagtttggctgtaatgaaagtattggcca

SEQ ID NO: 704960 - DNA, 868 bp, Homo sapiens
tgcgccgtttcttaagccggtctgaaaagcgcaatattcgggtgggagtgacccgattttccaggtgcgtccgtcacccctttctttgactcggaaagggaactccctgaccccttgcgcttcccaggtgaggcaatgcctcgccctgcttcggctcgcgcacggtgcgcacacacactggcctgcgcccactgtctggcactccctagtgagatgaacccggtacctcagatggaaatgcagaaatcaccrtcttctgcgtcgctcacgctgggagctgtagaccggagctgttcctattcggccatcttggctcctccctcctcccgcttgttttcttatgcatataaagggataggaaatatgtatgtatgtatgtatgtatgtatgtatgtatgtatgtatgtatgtgtgtgtataggatcatgcactatatatagcttgcttctttttccactatgataattttcccatgtcatgaattacggcttgcaagtgcttattcttaacaggctgcattatttttcattatttggatttattgttatttaattggagctctattattgaacatttagattgcttccaaaattttttgctcttgttaatatattgtaataaacttctgtgaaacacatactcttcacctgctacttacatatgacttctgtaagccgagacctctgtatccccaggacctagaaggttacctggacatagtagtttcttaattaaaaaaaattattgattgaatgaaagaagactattaaatgttcagttcttctttttttattctgattccctgtgtatccagaggcctcttatttgtctgcatgtatgagtttggctgtaatgaaagtattggcca

SEQ ID NO: 704961 - DNA, 1225 bp, Homo sapiens
ttttttttttgagatggagttttgcttttgtcacccagtctgcagcaatggcgtgatcttggctaactgcaaactctacctcctgggttcaagagattctcctgcctcagcctcctgagtagctgggattacaggcacctgccaccatgcccagctaatttttgtatttttagtaatgacgttgtttcgccatgttggccaggctgttctcgaaatcctgacctcaggttatccgcccaccttggcctcccaaaatgttgagattacaggcatgagcagctgcacatggccaactttcagtcttaagtaccattttttgctgctgtttctttttttgaaccccaggaaaaaattaactcatttaatcccctattcaaactgctacaattttattttcagtgttgtcgcctggttgtagatgcatttgtctctccaaatgcactgtgattatttcaaagacaaaacatttttggcattgtgatatatatatacatatatatatatatatrtatgtatatatatgtatatgtatgtatatatatgtatataatatatattgtataaatatttatattttatatatcatataaaaattatatataaaaattatatatatatatatataaatgccacttatccctaatatagggactcgattagtttctgctagtgtggggacaagtcttatcatggctaggggccacgatggtaggagcagtcagaggatttcttgcattgtgatgagtgcatatatgttaaatgagccacttatcagtagatttgatagcaggataacagttatatcactgatacctaggcagtacatgacactctctaaagaatagattaatcctcatgctcttcatcttcctcctaatctctttacctgtgctgccctccagctttcaaagtgctctgagtcatcacttacacagtgttccttagctgccccttcagtgggccagtgtttctgtgccccagtgttcctgagagttagaacacagaaaacagagcaggctcttgcccacatcacagaacatctttgtctccctgtggatcccgcacatttgttcattagagctcaggaattgccagagactggcttttctggcaatggacactagattcttcagaagaatattggttgaaatcttcagtgatggggtctatgaggtaattcagtcaaatgaggcaggtgagttccttctggaaggcttctgggaag

SEQ ID NO: 704962 - DNA, 1225 bp, Homo sapiens
ttttttttttgagatggagttttgcttttgtcacccagtctgcagcaatggcgtgatcttggctaactgcaaactctacctcctgggttcaagagattctcctgcctcagcctcctgagtagctgggattacaggcacctgccaccatgcccagctaatttttgtatttttagtaatgacgttgtttcgccatgttggccaggctgttctcgaaatcctgacctcaggttatccgcccaccttggcctcccaaaatgttgagattacaggcatgagcagctgcacatggccaactttcagtcttaagtaccattttttgctgctgtttctttttttgaaccccaggaaaaaattaactcatttaatcccctattcaaactgctacaattttattttcagtgttgtcgcctggttgtagatgcatttgtctctccaaatgcactgtgattatttcaaagacaaaacatttttggcattgtgatatatatatacatatatatatatatatatatgtatatatatgtatatgtatgtatatatatgtatataatatatattgtataaatatttatattttatatatcatataaaaattatatataaaaattatatatatatatatataaatgccacttatccctaatatagggactcgattagtttctgctagtgtggggacaagtcttatcatggctaggggccacgatggtaggagcagtcagaggatttcttgcattgtgatgagtgcatatatgttaaatgagccacttatcagtagatttgatagcaggataacagttatatcactgatacctaggcagtacatgacactctctaaagaatagattaatcctcatgctcttcatcttcctcctaatctctttacctgtgctgccctccagctttcaaagtgctctgagtcatcacttacacagtgttccttagctgccccttcagtgggccagtgtttctgtgccccagtgttcctgagagttagaacacagaaaacagagcaggctcttgcccacatcacagaacatctttgtctccctgtggatcccgcacatttgttcattagagctcaggaattgccagagactggcttttctggcaatggacactagattcttcagaagaatattggttgaaatcttcagtgatggggtctatgaggtaattcagkcaaatgaggcaggtgagttccttctggaaggcttctgggaag

SEQ ID NO: 704963 - DNA, 1851 bp, Homo sapiens
atttcaaaaaagaagaaatttcacactgacagagacattgttattatagcactaaatacttttacactcttcaaattcctttgagrctaactgaaatttctgacagccccacattctacaactttattgtaaattttctgccaaaagtgatgcttccctatacactcctaatacaggtataaatatattatttaatctaggcttaggttgatttaaaattttgaaaattcactccaaaaatatgttctgtaaccgtatggccaccaatgagaaatgtattctttcaaggtaaatctgtgctgccctggtctgacctgggactctggggatactgcgcccctgtgctgagttactgaaatgagccagccccgcagctgtgctcagcctgccccatcccctgctgatttgcctgttcctaaagcacaaccccctgccctgaagactttttataggctggtcacacccggtgcaggagtcagtcccagtcaggacacagcacagacgtgagggcccccactcagctcctggggctcctggtgctctggctgccaggtaaggaaggagaacactaggattatacttggtcagtgtgctcagtactgtctggaacttcagggaagtcctctgataacatgattaattgcaagaatatttgtttttatgtttccaacttcaggtgccagatgtgacatccagatgacccagtctccatcctccctgtctgcatctgtaggagacagagtcaccatcacttgccgggcgagtcagggcattagcaataatttaaattggtatcagcagaaaccagggaaaactcctaagctcctgatctatgctgcatccagtctgcaaagtgggattccctctcggttcagtgacagtggatctgggacagattacactctcaccatcagcagcctgcagcctgaagattttgcaacttattactgtcaacagagtgacagtacccctcccacagtgttacaagtcataacataaaccccaaggaagcagatgcatgaggctgggctgccccaatgctccttctggtgcctctgtctgctgagggaagttctcaaactcagtcaggtttggaaagtcatagggagattttcctagaggaggccagggaggttcctctgaaccctaagcctctttcatcctcatccccagcagaaaagacgtgacaatgactgtcctgactgaataaagaagagagataagtccagctgaggagtctgtgttatgggataatcggaatttgtacagcaaaagagaagctattctcagtatttcaaggagaaattattcaagttgaataaattagagtctaaaccacagtctttctgaagcctatggagtgttattcatgaagcaggtactagacacaggggattctcaggtgttacttcagaagccagggttcacctgcccctggtggtatgtgctgaacaccgtgtgatgatcctcagtcctgtctgggaagcccagagctgggggtgctgatgctctcagctgcctgcagcacatctccaggtgattctccagtccacacctaacagcatgtgctttacttcaggtgtcagtgtacatgaatccaccactctgacttcccaatctcatgacagtaattagttgtaacttattgtgacctcgtggagcaactctaaagaaaccatagagagaaaaggagttttggaaaatgtgctcccagaagtgatagtagtgatggggaattgacagctgacggggaagtaaggtgactctttccacaaggctcaacattttgccagttacgaattgttgcaaaatacatttgaatgtgctttcaagtattaacagtttggggtc

SEQ ID NO: 704964 - DNA, 1851 bp, Homo sapiens
atttcaaaaaagaagaaatttcacactgacagagacattgttattatagcactaaatacttttacactcttcaaattcctttgaggctaactgaaatttctgacagccccacattctacaactttattgtaaattttctgccaaaartgatgcttccctatacactcctaatacaggtataaatatattatttaatctaggcttaggttgatttaaaattttgaaaattcactccaaaaatatgttctgtaaccgtatggccaccaatgagaaatgtattctttcaaggtaaatctgtgctgccctggtctgacctgggactctggggatactgcgcccctgtgctgagttactgaaatgagccagccccgcagctgtgctcagcctgccccatcccctgctgatttgcctgttcctaaagcacaaccccctgccctgaagactttttataggctggtcacacccggtgcaggagtcagtcccagtcaggacacagcacagacgtgagggcccccactcagctcctggggctcctggtgctctggctgccaggtaaggaaggagaacactaggattatacttggtcagtgtgctcagtactgtctggaacttcagggaagtcctctgataacatgattaattgcaagaatatttgtttttatgtttccaacttcaggtgccagatgtgacatccagatgacccagtctccatcctccctgtctgcatctgtaggagacagagtcaccatcacttgccgggcgagtcagggcattagcaataatttaaattggtatcagcagaaaccagggaaaactcctaagctcctgatctatgctgcatccagtctgcaaagtgggattccctctcggttcagtgacagtggatctgggacagattacactctcaccatcagcagcctgcagcctgaagattttgcaacttattactgtcaacagagtgacagtacccctcccacagtgttacaagtcataacataaaccccaaggaagcagatgcatgaggctgggctgccccaatgctccttctggtgcctctgtctgctgagggaagttctcaaactcagtcaggtttggaaagtcatagggagattttcctagaggaggccagggaggttcctctgaaccctaagcctctttcatcctcatccccagcagaaaagacgtgacaatgactgtcctgactgaataaagaagagagataagtccagctgaggagtctgtgttatgggataatcggaatttgtacagcaaaagagaagctattctcagtatttcaaggagaaattattcaagttgaataaattagagtctaaaccacagtctttctgaagcctatggagtgttattcatgaagcaggtactagacacaggggattctcaggtgttacttcagaagccagggttcacctgcccctggtggtatgtgctgaacaccgtgtgatgatcctcagtcctgtctgggaagcccagagctgggggtgctgatgctctcagctgcctgcagcacatctccaggtgattctccagtccacacctaacagcatgtgctttacttcaggtgtcagtgtacatgaatccaccactctgacttcccaatctcatgacagtaattagttgtaacttattgtgacctcgtggagcaactctaaagaaaccatagagagaaaaggagttttggaaaatgtgctcccagaagtgatagtagtgatggggaattgacagctgacggggaagtaaggtgactctttccacaaggctcaacattttgccagttacgaattgttgcaaaatacatttgaatgtgctttcaagtattaacagtttggggtc

SEQ ID NO: 704965 - DNA, 1851 bp, Homo sapiens
atttcaaaaaagaagaaatttcacactgacagagacattgttattatagcactaaatacttttacactcttcaaattcctttgaggctaactgaaatttctgacagccccacattctacaactttattgtaaattttctgccaaaagtgatgcttccctatacactcctaatacaggtataaatatattatttaatctaggcttaggttgatttaaaattttgaaaattcactccaaaaatatgttctgtaaccgtatggccaccaatgagaaatgtattctttcaaggtaaatctgtgctgccctggtctgacctgggactctggggatactgcgcccctgtgctgagttactgaaatgagccagccccgcagctgtgctcagcctgccccatcccctgctgatttgcctgttcctaaagcacaaccccctgccctgaagactttttataggctggtcacacccggtgcaggagtcagtcccagtcaggacacagcacagacgtgagggcccccactcagctcytggggctcctggtgctctggctgccaggtaaggaaggagaacactaggattatacttggtcagtgtgctcagtactgtctggaacttcagggaagtcctctgataacatgattaattgcaagaatatttgtttttatgtttccaacttcaggtgccagatgtgacatccagatgacccagtctccatcctccctgtctgcatctgtaggagacagagtcaccatcacttgccgggcgagtcagggcattagcaataatttaaattggtatcagcagaaaccagggaaaactcctaagctcctgatctatgctgcatccagtctgcaaagtgggattccctctcggttcagtgacagtggatctgggacagattacactctcaccatcagcagcctgcagcctgaagattttgcaacttattactgtcaacagagtgacagtacccctcccacagtgttacaagtcataacataaaccccaaggaagcagatgcatgaggctgggctgccccaatgctccttctggtgcctctgtctgctgagggaagttctcaaactcagtcaggtttggaaagtcatagggagattttcctagaggaggccagggaggttcctctgaaccctaagcctctttcatcctcatccccagcagaaaagacgtgacaatgactgtcctgactgaataaagaagagagataagtccagctgaggagtctgtgttatgggataatcggaatttgtacagcaaaagagaagctattctcagtatttcaaggagaaattattcaagttgaataaattagagtctaaaccacagtctttctgaagcctatggagtgttattcatgaagcaggtactagacacaggggattctcaggtgttacttcagaagccagggttcacctgcccctggtggtatgtgctgaacaccgtgtgatgatcctcagtcctgtctgggaagcccagagctgggggtgctgatgctctcagctgcctgcagcacatctccaggtgattctccagtccacacctaacagcatgtgctttacttcaggtgtcagtgtacatgaatccaccactctgacttcccaatctcatgacagtaattagttgtaacttattgtgacctcgtggagcaactctaaagaaaccatagagagaaaaggagttttggaaaatgtgctcccagaagtgatagtagtgatggggaattgacagctgacggggaagtaaggtgactctttccacaaggctcaacattttgccagttacgaattgttgcaaaatacatttgaatgtgctttcaagtattaacagtttggggtc

SEQ ID NO: 704966 - DNA, 1917 bp, Homo sapiens
tctaccacatgaagtttacagaaagaatggggtcttggatcacagggaaaaaaaaaaaaaggttatgtgagaaaacgaccctgactagcaacagtggacttattacataggtggaacctcactgggagcagtcctcagagagaaatagacagaaaatgtttctttcagacctttggagacctcagactctcagttaacctttcctagatccagacaagggggcagaactcagagaaagcctggctgcatcaaggcagattctctaacagtgcaaatctccccaagacagctttgcagctaagtttgcatttccagcccttctcaatagccattttgaaatatatcaaggaaatatatttaggggtaaaatatattagtttccttcatacagctataaaacatacagcaataatttttgtcaatgtctactacaaatccaatataacagtaaatataaaacccaccagatattgaagaaaaaatatgtagagtacctcaattgcaaatgttgatactaaaatgccaaataaaataaaaataattttcaacaatatttgaaacagtaacacaagaaattggcaaaaaaaaaataaaacaaatatccaccttggggatgaaagtgtgcttccaaatttggtaatccaataatattaataatcatattgattagcccaaattaaaaataaataggggattctcagtacatgctaaaatatatttgttaaaaggcaatattcatgtctttaaagattttaaatgctataaagagtctgatattctataggcaaacatgtgtatgtccattagaagaagagaggtctgattttcatatgttactacatagagatagagaagtggatagattaatttgcatatgcatagagaaagcataaaatagaaatttactatcatattaaaggaattttaattcaacaataaaataattcaaaggtaaaattttaaatatttttaacaggtacattattaatattagataatatttataattgtgaaaatattcaatgctaaaataagatgcaatgtctaaacatcagtattaaaactagtataaatatttgcttgtttatacaaggaaaattcaagctcgacctaaaattatataggaaataaaataaaaattttaagggagctctttaataacataaacatatatatatatacacacacacatataacatgtatatatgttatatgggatatagatttaacatgttatatctatatttgtatctataactacagctgtatgtatctacatttctatatatttactcagtgacataaatatagacaggaataaatataaagacacatgattcttggataaaaaggatttagtatcataaagacaaattctttccaaattcacttatgaattcacaacaatatacagtttcattagtataatttaaaatttttaaataaattccaagattcatttaaaggaatatacatgtatacaagcagtcaagaaagaagcaagagtgcactaaactaacttgctattaaaatacatttttaaacttagtaactgaaactgagcagtactgatttgcaatactggaatttaggtatatgggatctcaaaagcacagagctcaaaggagacccctgtatgcatgagagcttaggatgtgctttagaaaatattaccaaaccacgggcaaagttactttagtgtcttagtcttactaggtttgaaaagccagagaaaagactcaagaccaccatataagagcaaaacaaaaggacagggagagaatgtgaagatactgaaacattttacgtaaagttgtataaaacatcytttaaagaaaatgtaaagtttaggatatacatcaaaatcagcagagccactaaataaataaataggcattgtaaaacagcaagagaaaa

SEQ ID NO: 704967 - DNA, 1917 bp, Homo sapiens
tctaccacatgaagtttacagaaagaatggggtcttggatcacagggaaaaaaaaaaaaaggttatgtgagaaaacgaccctgactagcaacagtggacttattacataggtggaacctcactgggagcagtcctcagagagaaatagacagaaaatgtttctttcagacctttggagacctcagactctcagttaacctttcctagatccagacaagggggcagaactcagagaaagcctggctgcatcaaggcagattctctaacagtgcaaatctccccaagacagctttgcagctaagtttgcatttccagcccttctcaatagccattttgaaatatatcaaggaaatatatttaggggtaaaatatattagtttccttcatacagctataaaacatacagcaataatttttgtcaatgtctactacaaatccaatataacagtaaatataaaacccaccagatattgaagaaaaaatatgtagagtacctcaattgcaaatgttgatactaaaatgccaaataaaataaaaataattttcaacaatatttgaaacagtaacacaagaaattggcaaaaaaaaaataaaacaaatatccaccttggggatgaaagtgtgcttccaaatttggtaatccaataatattaataatcatattgattagcccaaattaaaaataaataggggattctcagtacatgctaaaatatatttgttaaaaggcaatattcatgtctttaaagattttaaatgctataaagagtctgatattctataggcaaacatgtgtatgtccattagaagaagagaggtctgattttcatatgttactacatagagatagagaagtggatagattaatttgcatatgcatagagaaagcataaaatagaaatttactatcatattaaaggaattttaattcaacaataaaataattcaaaggtaaaattttaaatatttttaacaggtacattattaatattagataatatttataattgtgaaaatattcaatgctaaaataagatgcaatgtctaaacatcagtattaaaactagtataaatatttgcttgtttatacaaggaaaattcaagctcgacctaaaattatataggaaataaaataaaaattttaagggagctctttaataacataaacatatatatatatacacacacacatataacatgtatatatgttatatgggatatagatttaacatgttatatctatatttgtatctataactacagctgtatgtatctacatttctatatatttactcagtgacataaatatagacaggaataaatataaagacacatgattcttggataaaaaggatttagtatcataaagacaaattctttccaaattcacttatgaattcacaacaatatacagtttcattagtataatttaaaatttttaaataaattccaagattcatttaaaggaatatacatgtatacaagcagtcaagaaagaagcaagagtgcactaaactaacttgctattaaaatacatttttaaacttagtaactgaaactgagcagtactgatttgcaatactggaatttaggtatatgggatctcaaaagcacagagctcaaaggagacccctgtatgcatgagagcttaggatgtgctttagaaaatattaccaaaccacgggcaaagttactttagtgtcttagtcttactaggtttgaaaagccagagaaaagactcaagaccaccatataagagcaaaacaaaaggacagggagagaatgtgaagatactgaaacattttacgtaaagttgtataaaacatcttttaaagaaaatgtraagtttaggatatacatcaaaatcagcagagccactaaataaataaataggcattgtaaaacagcaagagaaaa

SEQ ID NO: 704968 - DNA, 1917 bp, Homo sapiens
tctaccacatgaagtttacagaaagaatggggtcttggatcacagggaaaaaaaaaaaaaggttatgtgagaaaacgaccctgactagcaacagtggacttattacataggtggaacctcactgggagcagtcctcagagagaaatagacagaaaatgtttctttcagacctttggagacctcagactctcagttaacctttcctagatccagacaagggggcagaactcagagaaagcctggctgcatcaaggcagattctctaacagtgcaaatctccccaagacagctttgcagctaagtttgcatttccagcccttctcaatagccattttgaaatatatcaaggaaatatatttaggggtaaaatatattagtttccttcatacagctataaaacatacagcaataatttttgtcaatgtctactacaaatccaatataacagtaaatataaaacccaccagatattgaagaaaaaatatgtagagtacctcaattgcaaatgttgatactaaaatgccaaataaaataaaaataattttcaacaatatttgaaacagtaacacaagaaattggcaaaaaaaaaataaaacaaatatccaccttggggatgaaagtgtgcttccaaatttggtaatccaataatattaataatcatattgattagcccaaattaaaaataaataggggattctcagtacatgctaaaatatatttgttaaaaggcaatattcatgtctttaaagattttaaatgctataaagagtctgatattctataggcaaacatgtgtatgtccattagaagaagagaggtctgattttcatatgttactacatagagatagagaagtggatagattaatttgcatatgcatagagaaagcataaaatagaaatttactatcatattaaaggaattttaattcaacaataaaataattcaaaggtaaaattttaaatatttttaacaggtacattattaatattagataatatttataattgtgaaaatattcaatgctaaaataagatgcaatgtctaaacatcagtattaaaactagtataaatatttgcttgtttatacaaggaaaattcaagctcgacctaaaattatataggaaataaaataaaaattttaagggagctctttaataacataaacatatatatatatacacacacacatataacatgtatatatgttatatgggatatagatttaacatgttatatctatatttgtatctataactacagctgtatgtatctacatttctatatatttactcagtgacataaatatagacaggaataaatataaagacacatgattcttggataaaaaggatttagtatcataaagacaaattctttccaaattcacttatgaattcacaacaatatacagtttcattagtataatttaaaatttttarataaattccaagattcatttaaaggaatatacatgtatacaagcagtcaagaaagaagcaagagtgcactaaactaacttgctattaaaatacatttttaaacttagtaactgaaactgagcagtactgatttgcaatactggaatttaggtatatgggatctcaaaagcacagagctcaaaggagacccctgtatgcatgagagcttaggatgtgctttagaaaatattaccaaaccacgggcaaagttactttagtgtcttagtcttactaggtttgaaaagccagagaaaagactcaagaccaccatataagagcaaaacaaaaggacagggagagaatgtgaagatactgaaacattttacgtaaagttgtataaaacatcttttaaagaaaatgtaaagtttaggatatacatcaaaatcagcagagccactaaataaataaataggcattgtaaaacagcaagagaaaa

SEQ ID NO: 704969 - DNA, 1917 bp, Homo sapiens
tctaccacatgaagtttacagaaagaatggggtcttggatcacagggaaaaaaaaaaaaaggttatgtgagaaaacgaccctgactagcaacagtggacttattacataggtggaacctcactgggagcagtcctcagagagaaatagacagaaaatgtttctttcagacctttggagacctcagactctcagttaacctttcctagatccagacaagggggcagaactcagagaaagcctggctgcatcaaggcagattctctaacagtgcaaatctccccaagacagctttgcagctaagtttgcatttccagcccttctcaatagccattttgaaatatatcaaggaaatatatttaggggtaaaatatattagtttccttcatacagctataaaacatacagcaataatttttgtcaatgtctactacaaatccaatataacagtaaatataaaacccaccagatattgaagaaaaaatatgtagagtacctcaattgcaaatgttgatactaaaatgccaaataaaataaaaataattttcaacaatatttgaaacagtaacacaagaaattggcaaaaaaaaaataaaacaaatatccaccttggggatgaaagtgtgcttccaaatttggtaatccaataatattaataatcatattgattagcccaaattaaaaataaataggggattctcagtacatgctaaaatatatttgttaaaaggcaatattcatgtctttaaagattttaaatgctataaagagtctgatattctataggcaaacatgtgtatgtccattagaagaagagaggtctgattttcatatgttactacatagagatagagaagtggatagattaatttgcatatgcatagagaaagcataaaatagaaatttactatcatattaaaggaattttaattcaacaataaaataattcaaaggtaaaattttaaatatttttaacaggtacattattaatattagataatatttataattgtgaaaatattcaatgctaaaataagatgcaatgtctaaacatcagtattaaaactagtataaatatttgcttgtttatacaaggaaaattcaagctcgacctaaaattatataggaaataaaataaaaattttaagggagctctttaataacataaacatatatatatatacacacacacatataacatgtatatatgttatatgggatatagatttaacatgttatatctatatttgtatctataactacagctgtatgtatctacatttctatatatttactcagtgacataaatatagacaggaataaatataaagacacatgattcttggataaaaaggatttagtatcataaagacaaattctttccaaattcacttatgaattcacaacaatatacagtttcattagtataatttaaaatttttaaataaattccaagattcatttaaaggaatatacatgtatacaagcagtcaagaaagaagcaagagtgcactaaactaacttgctattaaaatacatttttaaacttagtaactgaaactgagcagtactgatttscaatactggaatttaggtatatgggatctcaaaagcacagagctcaaaggagacccctgtatgcatgagagcttaggatgtgctttagaaaatattaccaaaccacgggcaaagttactttagtgtcttagtcttactaggtttgaaaagccagagaaaagactcaagaccaccatataagagcaaaacaaaaggacagggagagaatgtgaagatactgaaacattttacgtaaagttgtataaaacatcttttaaagaaaatgtaaagtttaggatatacatcaaaatcagcagagccactaaataaataaataggcattgtaaaacagcaagagaaaa

SEQ ID NO: 704970 - DNA, 2586 bp, Homo sapiens
ccttaagaaacatacttttgctcaagcagagcgtttagtgcatgtctcctttaatggattcctgctaagagctaacaactggattattgaatcttctccttcaaaaccactctttgacttattacaagattatttttctcagttacatttgattctttataggtaccattttctgcccctggccttgtttaaaattgaattgtgatggctcttcccctgacttatcttttaaagctattgtcatttacttcattttttttaggcttttactggaaaatttctggccgtaacactttcttataatttctatttctattccaggtttctgcttaagcacagtgttgcattaataagggtcaggcgaagtttcaacagcatttaatcttacactttaaatttttgttcacattttatggtcttgacacatttactgtaataaagggaaatcattaattcactaagaaacgtgtaaaaactatagttttgcttttgattaatttccacattcatcattactttgctactgatttaccatgcattgaagagactgagggtgcaaaacatgattttttttcttygtttaaaaagaactgtcttagaaaccaaatgaggctaaaaatgtacctgtgttttggctgtcaaaggggagaagattacttcttcttgaacgtgttttctgtctcatcctcatgtttcctttatttataccaaatacaccataccattctctacttttttttcttgaagtaaaagaaagctatagccatagccactgtcatattaactctgaaaataggtattttcctttatgaagaggaaagaaatcttaatttacctttggcttatggaagaaaatcatctaaaattttataatgccagctacatcttgaacatttttgaatactgttgttatgaaacaaaatcatacttgagcctagaggtcaaatatctcaccaatattggcagcaggcaattgaataacgattttttgtttttgttttgcacttgtataattgatactaaagtggtagtgactactaaaatcaatgaaaaggaatctatagtttttacactataactaggccaagttgggaaggtatcaaaattatagttataaaatgagactgaaagtttaaaacagatcactacctatgacgcacacaattgcaagccctttttcatagatcagtcaatgaagtctttgcaaaaacccaaagagggttattttggattttaggggaggagaaaactgagactcataaagttaaataaactctcctcctttattgtattgttttgttaaatataggtttttattcttatttttaacaacacaaatatttgtagaaaaatttagagaatgcagaataagcaagagaaaaataaacacaatgtattgctatccccccagttttcttaactgtgtattacacatttttgtgtaacctgcttttttgccttaaaatgtcatgatcttttccaaccataagtatgttatttttcatatgtcagttttaatggctataatattctcctcagtgtttttgagggtctttgagagcactcagtaagtagcacctgtcttttctacccaattcaattgaaaaatagacagcaagtggagaaccagaatatcaccctattcctaattaaggcacaattggcaggcacagcttacaatgagagtaacaattggcttgctcactgcatcccttggaagtttgttgagctgtgagaagaacccacttcagggaaagcttaaagccagggagcaggaaatccctgcactgcactggccatggctagaggaaagaagaaaagaagcaacttctccaagcagagaaactttgatcatgtctacccaatacctgtaacacaccaaccactgtaaagctggtggtcctctgctctggggatgaggaagtggtggaaaaggaagccaggcagactgcggaggatgccacaaaacaaaggtgaggaaggaggcattcccctgtgatatatgaagttcctattactcatttaatcaatcccctattgttgtacacttaggttatttcaaaacaacaatgaaattaaatgcatttgtaattaattattgtgtacattatagaaattttctttaaatgaaactataagtaaaatttctgggacaatgtttttaacatgtttaaagcttttgatgcaatttaccacattttactcaggaaaattttgtcaatttacattaccactcagtaatgtataacctcatttatttttaataagtgtatttgaacccagtaaagttggctctggagcccaaattattaatcttaacaaaatcctgctagttactaaattaaaaaaaaactgtaaaattcatgaaatttctctgactccataaactttcaatggataatttctatatctgtccttactgcctgggagtggagaattataatggtcatgaaagtggcctttgcgttgaactcctcctggctttgaattctgaatttgcccttaactagagctgtggcaagttatcatagatgttcaagcaactctgctcctcacagtgctaataaagacaagcgcaagactggg

SEQ ID NO: 704971 - DNA, 2586 bp, Homo sapiens
ccttaagaaacatacttttgctcaagcagagcgtttagtgcatgtctcctttaatggattcctgctaagagctaacaactggattattgaatcttctccttcaaaaccactctttgacttattacaagattatttttctcagttacatttgattctttataggtaccattttctgcccctggccttgtttaaaattgaattgtgatggctcttcccctgacttatcttttaaagctattgtcatttacttcattttttttaggcttttactggaaaatttctggccgtaacactttcttataatttctatttctattccaggtttctgcttaagcacagtgttgcattaataagggtcaggcgaagtttcaacagcatttaatcttacactttaaatttttgttcacattttatggtcttgacacatttactgtaataaagggaaatcattaattcactaagaaacgtgtaaaaactatagttttgcttttgattaatttccacattcatcattactttgctactgatttaccatgcattgaagagactgagggtgcaaaacatgattttttttctttgtttaaaaagaactgtcttagaaaccaaatgaggctaaaaatgtacctgtgttttggctgtcaaaggggagaagattacttcttcttgaacgtgttttctgtctcatcctcatgtttcctttatttataccaaatacaccataccattctctacttttttttcttgaagtaaaagaaagctatagccatagccactgtcatattaactctgaaaataggtwttttcctttatgaagaggaaagaaatcttaatttacctttggcttatggaagaaaatcatctaaaattttataatgccagctacatcttgaacatttttgaatactgttgttatgaaacaaaatcatacttgagcctagaggtcaaatatctcaccaatattggcagcaggcaattgaataacgattttttgtttttgttttgcacttgtataattgatactaaagtggtagtgactactaaaatcaatgaaaaggaatctatagtttttacactataactaggccaagttgggaaggtatcaaaattatagttataaaatgagactgaaagtttaaaacagatcactacctatgacgcacacaattgcaagccctttttcatagatcagtcaatgaagtctttgcaaaaacccaaagagggttattttggattttaggggaggagaaaactgagactcataaagttaaataaactctcctcctttattgtattgttttgttaaatataggtttttattcttatttttaacaacacaaatatttgtagaaaaatttagagaatgcagaataagcaagagaaaaataaacacaatgtattgctatccccccagttttcttaactgtgtattacacatttttgtgtaacctgcttttttgccttaaaatgtcatgatcttttccaaccataagtatgttatttttcatatgtcagttttaatggctataatattctcctcagtgtttttgagggtctttgagagcactcagtaagtagcacctgtcttttctacccaattcaattgaaaaatagacagcaagtggagaaccagaatatcaccctattcctaattaaggcacaattggcaggcacagcttacaatgagagtaacaattggcttgctcactgcatcccttggaagtttgttgagctgtgagaagaacccacttcagggaaagcttaaagccagggagcaggaaatccctgcactgcactggccatggctagaggaaagaagaaaagaagcaacttctccaagcagagaaactttgatcatgtctacccaatacctgtaacacaccaaccactgtaaagctggtggtcctctgctctggggatgaggaagtggtggaaaaggaagccaggcagactgcggaggatgccacaaaacaaaggtgaggaaggaggcattcccctgtgatatatgaagttcctattactcatttaatcaatcccctattgttgtacacttaggttatttcaaaacaacaatgaaattaaatgcatttgtaattaattattgtgtacattatagaaattttctttaaatgaaactataagtaaaatttctgggacaatgtttttaacatgtttaaagcttttgatgcaatttaccacattttactcaggaaaattttgtcaatttacattaccactcagtaatgtataacctcatttatttttaataagtgtatttgaacccagtaaagttggctctggagcccaaattattaatcttaacaaaatcctgctagttactaaattaaaaaaaaactgtaaaattcatgaaatttctctgactccataaactttcaatggataatttctatatctgtccttactgcctgggagtggagaattataatggtcatgaaagtggcctttgcgttgaactcctcctggctttgaattctgaatttgcccttaactagagctgtggcaagttatcatagatgttcaagcaactctgctcctcacagtgctaataaagacaagcgcaagactggg

SEQ ID NO: 704972 - DNA, 2586 bp, Homo sapiens
ccttaagaaacatacttttgctcaagcagagcgtttagtgcatgtctcctttaatggattcctgctaagagctaacaactggattattgaatcttctccttcaaaaccactctttgacttattacaagattatttttctcagttacatttgattctttataggtaccattttctgcccctggccttgtttaaaattgaattgtgatggctcttcccctgacttatcttttaaagctattgtcatttacttcattttttttaggcttttactggaaaatttctggccgtaacactttcttataatttctatttctattccaggtttctgcttaagcacagtgttgcattaataagggtcaggcgaagtttcaacagcatttaatcttacactttaaatttttgttcacattttatggtcttgacacatttactgtaataaagggaaatcattaattcactaagaaacgtgtaaaaactatagttttgcttttgattaatttccacattcatcattactttgctactgatttaccatgcattgaagagactgagggtgcaaaacatgattttttttctttgtttaaaaagaactgtcttagaaaccaaatgaggctaaaaatgtacctgtgttttggctgtcaaaggggagaagattacttcttcttgaacgtgttttctgtctcatcctcatgtttcctttatttataccaaatacaccataccattctctacttttttttcttgaagtaaaagaaagctatagccatagccactgtcatattaactctgaaaataggtattttcctttatgaagaggaaagaaatcttaatttacctttggcttatggaagaaaatcatctaaaattttataatgccagctacatcttgaacatttttgaatactgttgttatgaaacaaaatcatacttgagcctagaggtcaaatatctcaccaatattggcagcaggcaattgaataacgattttttgtttttgttttgcacttgtataattgatactaaagtggtagtgactactaaaatyaatgaaaaggaatctatagtttttacactataactaggccaagttgggaaggtatcaaaattatagttataaaatgagactgaaagtttaaaacagatcactacctatgacgcacacaattgcaagccctttttcatagatcagtcaatgaagtctttgcaaaaacccaaagagggttattttggattttaggggaggagaaaactgagactcataaagttaaataaactctcctcctttattgtattgttttgttaaatataggtttttattcttatttttaacaacacaaatatttgtagaaaaatttagagaatgcagaataagcaagagaaaaataaacacaatgtattgctatccccccagttttcttaactgtgtattacacatttttgtgtaacctgcttttttgccttaaaatgtcatgatcttttccaaccataagtatgttatttttcatatgtcagttttaatggctataatattctcctcagtgtttttgagggtctttgagagcactcagtaagtagcacctgtcttttctacccaattcaattgaaaaatagacagcaagtggagaaccagaatatcaccctattcctaattaaggcacaattggcaggcacagcttacaatgagagtaacaattggcttgctcactgcatcccttggaagtttgttgagctgtgagaagaacccacttcagggaaagcttaaagccagggagcaggaaatccctgcactgcactggccatggctagaggaaagaagaaaagaagcaacttctccaagcagagaaactttgatcatgtctacccaatacctgtaacacaccaaccactgtaaagctggtggtcctctgctctggggatgaggaagtggtggaaaaggaagccaggcagactgcggaggatgccacaaaacaaaggtgaggaaggaggcattcccctgtgatatatgaagttcctattactcatttaatcaatcccctattgttgtacacttaggttatttcaaaacaacaatgaaattaaatgcatttgtaattaattattgtgtacattatagaaattttctttaaatgaaactataagtaaaatttctgggacaatgtttttaacatgtttaaagcttttgatgcaatttaccacattttactcaggaaaattttgtcaatttacattaccactcagtaatgtataacctcatttatttttaataagtgtatttgaacccagtaaagttggctctggagcccaaattattaatcttaacaaaatcctgctagttactaaattaaaaaaaaactgtaaaattcatgaaatttctctgactccataaactttcaatggataatttctatatctgtccttactgcctgggagtggagaattataatggtcatgaaagtggcctttgcgttgaactcctcctggctttgaattctgaatttgcccttaactagagctgtggcaagttatcatagatgttcaagcaactctgctcctcacagtgctaataaagacaagcgcaagactggg

SEQ ID NO: 704973 - DNA, 2088 bp, Homo sapiens
ttacccacagaccatttaatctatatcctcattaatgacattttctcagcttgacatactcttggctttgacaattaacaaaaacagaagaaatggaagaaaaaaaccaatatggtatgcagtactcataattacattttcatttgtgttgctatccttgattactatacatataagaaattatctctcaaggaaataaatgatccttgtattgcttctggagatgaaaatcaatgagtttaccttttgctacaaatatagccactctttttttttcttgtagacattaaacaccaatttgtggagacagttttgcatatacaaaggaatctgagcagcatacctgactcaatattaataaatgaagttgaaataggacctgtgattggtctgtgatgacagaaagcaaatagcttttcctcctgatacaactaaaagattattttgctaagcatttatttcaaggattggcaaagaatgtgttataacacacgtctgtaggcataatggaagaaatgccttgagcgtcattcaaaggaaggatagagaaaaaatatatatagaatcaatgtattttaacggtaacagtcttttaatgtttattaaaaataaaatattttaattttaaaaaatcaatcttttaattttttattaaaatagaaattataagtcaaaagtagtgatggacacattatttagcagaaaattcttcagagaccacaggaaaatccaggttgttggagggttaatgttgagaagtaagaaaggacagaacagtgaatacatcaatttaaccgtaggaaaaaaaatgtttactgctgatgaattaacttggaggccctctatctagaagaggggcattttttccttgcctaataaaagggagtttataaaacttatagcatcattgtaattgagaaatgtattttgaaaaatggaacagaataataggtttttcatagattaaaataaaccacagtgtttaaatattacatgtatttatgtagttttaaagacatggaaaaagtgcatagcaaaattaaagttgacatagaaactatactttacagatcaaacttagaccaactagaatagaagggcaaggagagtctgcaatgagttgattagctctgctgcaggaaattgaccaactgcaagtgaactacttgggggatcgacgttttatatggatctttgtgaagcacaaaacaagatcagcaaatcataaagaaacaaataatgaaagctgacttagttggttcaggctgctataacacattactgggtggcttaaacaacagaaatgtatttcttacagttctggaggctgaaagtctgaaagcagggtgtcagcctggttaggttctgatgatcaccttcttccatggcttcctcacatggtggaaaaagataaagaggaagcacactctatcctgtgtcttcttataagggcactaataccactaatgagtgctccactctcatgacctaattacctgtaaaggatctacctccaaatgacatcacattgggaatcaggctttaacatataaatgttgggggcatacaagcattcagttcataatgaaagcaaaagaaacattgaaagaaatcagcattttcttattcttctatcgcttagcctaaaaagtaggcttgattttaaataccagaaagcaaccaactatttatgcttcaaagttatttatagcttcaggtacatgtgtagtcatgcatcacttaatgacagggaaatgttctgagaaatgagtccttaggtgatttgttgtgtsaacatcataaaatatacttatgctctatgtatacctgcatgatatagcctactacacgcctaggctatgtggtatagagcctattgctcttcacttttaagcctgtatagcttgtgattgttccaaatgctgcaggcaattgtaacacaacggtaagtatttatgtatataaacatgtcaaaataaaaaatgtacagcagtaatatgatattacatccttatggaaccaccatggtatatgcagaccactattgaactaaattattatataatgaatgactgtatgcatatttat

SEQ ID NO: 704974 - DNA, 2088 bp, Homo sapiens
ttacccacagaccatttaatctatatcctcattaatgacattttctcagcttgacatactcttggctttgacaattaacaaaaacagaagaaatggaagaaaaaaaccaatatggtatgcagtactcataattacattttcatttgtgttgctatccttgattactatacatataagaaattatctctcaaggaaataaatgatccttgtattgcttctggagatgaaaatcaatgagtttaccttttgctacaaatatagccactctttttttttcttgtagacattaaacaccaatttgtggagacagttttgcatatacaaaggaatctgagcagcatacctgactcaatattaataaatgaagttgaaataggacctgtgattggtctgtgatgacagaaagcaaatagcttttcctcctgatacaactaaaagattattttgctaagcatttatttcaaggattggcaaagaatgtgttataacacacgtctgtaggcataatggaagaaatgccttgagcgtcattcaaaggaaggatagagaaaaaatatatatagaatcaatgtattttaacggtaacagtcttttaatgtttattaaaaataaaatattttaattttaaaaaatcaatcttttaattttttattaaaatagaaattataagtcaaaagtagtgatggacacattatttagcagaaaattcttcagagaccacaggaaaatccaggttgttggagggttaatgttgagaagtaagaaaggacagaacagtgaatacatcaatttaaccgtaggaaaaaaaatgtttactgctgatgaattaacttggaggccctctatctagaagaggggcattttttccttgcctaataaaagggagtttataaaacttatagcatcattgtaattgagaaatgtattttgaaaaatggaacagaataataggtttttcatagattaaaataaaccacagtgtttaaatattacatgtatttatgtagttttaaagacatggaaaaagtgcatagcaaaattaaagttgacatagaaactatactttacagatcaaacttagaccaactagaatagaagggcaaggagagtctgcaatgagttgattagctctgctgcaggaaattgaccaactgcaagtgaactacttgggggatcgacgttttatatggatctttgtgaagcacaaaacaagatcagcaaatcataaagaaacaaataatgaaagctgacttagttggttcaggctgctataacacattactgggtggcttaaacaacagaaatgtatttcttacagttctggaggctgaaagtctgaaagcagggtgtcagcctggttaggttctgatgatcaccttcttccatggcttcctcacatggtggaaaaagataaagaggaagcacactctatcctgtgtcttcttataagggcactaataccactaatgagtgctccactctcatgacctaattacctgtaaaggatctacctccaaatgacatcacattgggaatcaggctttaacatataaatgttgggggcatacaagcattcagttcataatgaaagcaaaagaaacattgaaagaaatcagcattttcttattcttctatcgcttagcctaaaaagtaggcttgattttaaataccagaaagcaaccaactatttatgcttcaaagttatttatagcttcaggtacatgtgtagtcatgcatcacttaatgacagggaaatgttctgagaaatgagtccttaggtgatttgttgtgtcaacatcataaaatatacttatgctctatgtatacctgcatgatatagcctactacacrcctaggctatgtggtatagagcctattgctcttcacttttaagcctgtatagcttgtgattgttccaaatgctgcaggcaattgtaacacaacggtaagtatttatgtatataaacatgtcaaaataaaaaatgtacagcagtaatatgatattacatccttatggaaccaccatggtatatgcagaccactattgaactaaattattatataatgaatgactgtatgcatatttat

SEQ ID NO: 704975 - DNA, 2088 bp, Homo sapiens
ttacccacagaccatttaatctatatcctcattaatgacattttctcagcttgacatactcttggctttgacaattaacaaaaacagaagaaatggaagaaaaaaaccaatatggtatgcagtactcataattacattttcatttgtgttgctatccttgattactatacatataagaaattatctctcaaggaaataaatgatccttgtattgcttctggagatgaaaatcaatgagtttaccttttgctacaaatatagccactctttttttttcttgtagacattaaacaccaatttgtggagacagttttgcatatacaaaggaatctgagcagcatacctgactcaatattaataaatgaagttgaaataggacctgtgattggtctgtgatgacagaaagcaaatagcttttcctcctgatacaactaaaagattattttgctaagcatttatttcaaggattggcaaagaatgtgttataacacacgtctgtaggcataatggaagaaatgccttgagcgtcattcaaaggaaggatagagaaaaaatatatatagaatcaatgtattttaacggtaacagtcttttaatgtttattaaaaataaaatattttaattttaaaaaatcaatcttttaattttttattaaaatagaaattataagtcaaaagtagtgatggacacattatttagcagaaaattcttcagagaccacaggaaaatccaggttgttggagggttaatgttgagaagtaagaaaggacagaacagtgaatacatcaatttaaccgtaggaaaaaaaatgtttactgctgatgaattaacttggaggccctctatctagaagaggggcattttttccttgcctaataaaagggagtttataaaacttatagcatcattgtaattgagaaatgtattttgaaaaatggaacagaataataggtttttcatagattaaaataaaccacagtgtttaaatattacatgtatttatgtagttttaaagacatggaaaaagtgcatagcaaaattaaagttgacatagaaactatactttacagatcaaacttagaccaactagaatagaagggcaaggagagtctgcaatgagttgattagctctgctgcaggaaattgaccaactgcaagtgaactacttgggggatcgacgttttatatggatctttgtgaagcacaaaacaagatcagcaaatcataaagaaacaaataatgaaagctgacttagttggttcaggctgctataacacattactgggtggcttaaacaacagaaatgtatttcttacagttctggaggctgaaagtctgaaagcagggtgtcagcctggttaggttctgatgatcaccttcttccatggcttcctcacatggtggaaaaagataaagaggaagcacactctatcctgtgtcttcttataagggcactaataccactaatgagtgctccactctcatgacctaattacctgtaaaggatctacctccaaatgacatcacattgggaatcaggctttaacatataaatgttgggggcatacaagcattcagttcataatgaaagcaaaagaaacattgaaagaaatcagcattttcttattcttctatcgcttagcctaaaargtaggcttgattttaaataccagaaagcaaccaactatttatgcttcaaagttatttatagcttcaggtacatgtgtagtcatgcatcacttaatgacagggaaatgttctgagaaatgagtccttaggtgatttgttgtgtcaacatcataaaatatacttatgctctatgtatacctgcatgatatagcctactacacgcctaggctatgtggtatagagcctattgctcttcacttttaagcctgtatagcttgtgattgttccaaatgctgcaggcaattgtaacacaacggtaagtatttatgtatataaacatgtcaaaataaaaaatgtacagcagtaatatgatattacatccttatggaaccaccatggtatatgcagaccactattgaactaaattattatataatgaatgactgtatgcatatttat

SEQ ID NO: 704976 - DNA, 2088 bp, Homo sapiens
ttacccacagaccatttaatctatatcctcattaatgacattttctcagcttgacatactcttggctttgacaattaacaaaaacagaagaaatggaagaaaaaaaccaatatggtatgcagtactcataattacattttcatttgtgttgctatccttgattactatacatataagaaattatctctcaaggaaataaatgatccttgtattgcttctggagatgaaaatcaatgagtttaccttttgctacaaatatagccactctttttttttcttgtagacattaaacaccaatttgtggagacagttttgcatatacaaaggaatctgagcagcatacctgactcaatattaataaatgaagttgaaataggacctgtgattggtctgtgatgacagaaagcaaatagcttttcctcctgatacaactaaaagattattttgctaagcatttatttcaaggattggcaaagaatgtgttataacacacgtctgtaggcataatggaagaaatgccttgagcgtcattcaaaggaaggatagagaaaaaatatatatagaatcaatgtattttaacggtaacagtcttttaatgtttattaaaaataaaatattttaattttaaaaaatcaatcttttaattttttattaaaatagaaattataagtcaaaagtagtgatggacacattatttagcagaaaattcttcagagaccacaggaaaatccaggttgttggagggttaatgttgagaagtaagaaaggacagaacagtgaatacatcaatttaaccgtaggaaaaaaaatgtttactgctgatgaattaacttggaggccctctatctagaagaggggcattttttccttgcctaataaaagggagtttataaaacttatagcatcattgtaattgagaaatgtattttgaaaaatggaacagaataataggtttttcatagattaaaataaaccacagtgtttaaatattacatgtatttatgtagttttaaagacatggaaaaagtgcatagcaaaattaaagttgacatagaaactatactttacagatcaaacttagaccaactagaatagaagggcaaggagagtctgcaatgagttgattagctctgctgcaggaaattgaccaactgcaagtgaactacttgggggatcgacgttttatatggatctttgtgaagcacaaaacaagatcagcaaatcataaagaaacaaataatgaaagctgacttagttggttcaggctgctataacacattactgggtggcttaaacaacagaaatgtatttcttacagttctggaggctgaaagtctgaaagcagggtgtcagcctggttaggttctgatgatcaccttcttccatggcttcctcacatggtggaaaaagataaagaggaagcacactctatcctgtgtcttcttataagggcactaataccactaatgagtgctccactctcatgacctaattacctgtaaaggatctacctccaaatgacatcacattgggaatcaggctttaacatataaatgttgggggcatacaagcattcagttcataatgaaagcaaaagaaacattgaaagaaatcagcattttcttattcttctatcgcttagcctaaaaagtaggcttgattttaaataccagaaagcaaccaactatttatrcttcaaagttatttatagcttcaggtacatgtgtagtcatgcatcacttaatgacagggaaatgttctgagaaatgagtccttaggtgatttgttgtgtcaacatcataaaatatacttatgctctatgtatacctgcatgatatagcctactacacgcctaggctatgtggtatagagcctattgctcttcacttttaagcctgtatagcttgtgattgttccaaatgctgcaggcaattgtaacacaacggtaagtatttatgtatataaacatgtcaaaataaaaaatgtacagcagtaatatgatattacatccttatggaaccaccatggtatatgcagaccactattgaactaaattattatataatgaatgactgtatgcatatttat

SEQ ID NO: 704977 - DNA, 2088 bp, Homo sapiens
ttacccacagaccatttaatctatatcctcattaatgacattttctcagcttgacatactcttggctttgacaattaacaaaaacagaagaaatggaagaaaaaaaccaatatggtatgcagtactcataattacattttcatttgtgttgctatccttgattactatacatataagaaattatctctcaaggaaataaatgatccttgtattgcttctggagatgaaaatcaatgagtttaccttttgctacaaatatagccactctttttttttcttgtagacattaaacaccaatttgtggagacagttttgcatatacaaaggaatctgagcagcatacctgactcaatattaataaatgaagttgaaataggacctgtgattggtctgtgatgacagaaagcaaatagcttttcctcctgatacaactaaaagattattttgctaagcatttatttcaaggattggcaaagaatgtgttataacacacgtctgtaggcataatggaagaaatgccttgagcgtcattcaaaggaaggatagagaaaaaatatatatagaatcaatgtattttaacggtaacagtcttttaatgtttattaaaaataaaatattttaattttaaaaaatcaatcttttaattttttattaaaatagaaattataagtcaaaagtagtgatggacacattatttagcagaaaattcttcagagaccacaggaaaatccaggttgttggagggttaatgttgagaagtaagaaaggacagaacagtgaatacatcaatttaaccgtaggaaaaaaaatgtttactgctgatgaattaacttggaggccctctatctagaagaggggcattttttccttgcctaataaaagggagtttataaaacttatagcatcattgtaattgagaaatgtattttgaaaaatggaacagaataataggtttttcatagattaaaataaaccacagtgtttaaatattacatgtatttatgtagttttaaagacatggaaaaagtgcatagcaaaattaaagttgacatagaaactatactttacagatcaaacttagaccaactagaatagaagggcaaggagagtctgcaatgagttgattagctctgctgcaggaaattgaccaactgcaagtgaactacttgggggatcgacgttttatatggatctttgtgaagcacaaaacaagatcagcaaatcataaagaaacaaataatgaaagctgacttagttggttcaggctgctataacacattactgggtggcttaaacaacagaaatgtatttcttacagttctggaggctgaaagtctgaaagcagggtgtcagcctggttaggttctgatgatcaccttcttccatggcttcctcacatggtggaaaaagataaagaggaagcacactctatcctgtgtcttcttataagggcactaataccactaatgagtgctccactctcatgacctaattacctgtaaaggatctacctccaaatgacatcacattgggaatcaggctttaacatataaatgttgggggcatacaagcattcagttcataatgaaagcaaaagaaacattgaaagaaatcagcattttcttattcttctatcgcttagcctaaaaagtaggcttgattttaaataccagaaagcaaccaactatttatgcttcaaagttatttatagyttcaggtacatgtgtagtcatgcatcacttaatgacagggaaatgttctgagaaatgagtccttaggtgatttgttgtgtcaacatcataaaatatacttatgctctatgtatacctgcatgatatagcctactacacgcctaggctatgtggtatagagcctattgctcttcacttttaagcctgtatagcttgtgattgttccaaatgctgcaggcaattgtaacacaacggtaagtatttatgtatataaacatgtcaaaataaaaaatgtacagcagtaatatgatattacatccttatggaaccaccatggtatatgcagaccactattgaactaaattattatataatgaatgactgtatgcatatttat

SEQ ID NO: 704978 - DNA, 2088 bp, Homo sapiens
ttacccacagaccatttaatctatatcctcattaatgacattttctcagcttgacatactcttggctttgacaattaacaaaaacagaagaaatggaagaaaaaaaccaatatggtatgcagtactcataattacattttcatttgtgttgctatccttgattactatacatataagaaattatctctcaaggaaataaatgatccttgtattgcttctggagatgaaaatcaatgagtttaccttttgctacaaatatagccactctttttttttcttgtagacattaaacaccaatttgtggagacagttttgcatatacaaaggaatctgagcagcatacctgactcaatattaataaatgaagttgaaataggacctgtgattggtctgtgatgacagaaagcaaatagcttttcctcctgatacaactaaaagattattttgctaagcatttatttcaaggattggcaaagaatgtgttataacacacgtctgtaggcataatggaagaaatgccttgagcgtcattcaaaggaaggatagagaaaaaatatatatagaatcaatgtattttaacggtaacagtcttttaatgtttattaaaaataaaatattttaattttaaaaaatcaatcttttaattttttattaaaatagaaattataagtcaaaagtagtgatggacacattatttagcagaaaattcttcagagaccacaggaaaatccaggttgttggagggttaatgttgagaagtaagaaaggacagaacagtgaatacatcaatttaaccgtaggaaaaaaaatgtttactgctgatgaattaacttggaggccctctatctagaagaggggcattttttccttgcctaataaaagggagtttataaaacttatagcatcattgtaattgagaaatgtattttgaaaaatggaacagaataataggtttttcatagattaaaataaaccacagtgtttaaatattacatgtatttatgtagttttaaagacatggaaaaagtgcatagcaaaattaaagttgacatagaaactatactttacagatcaaacttagaccaactagaatagaagggcaaggagagtctgcaatgagttgattagctctgctgcaggaaattgaccaactgcaagtgaactacttgggggatcgacgttttatatggatctttgtgaagcacaaaacaagatcagcaaatcataaagaaacaaataatgaaagctgacttagttggttcaggctgctataacacattactgggtggcttaaacaacagaaatgtatttcttacagttctggaggctgaaagtctgaaagcagggtgtcagcctggttaggttctgatgatcaccttcttccatggcttcctcacatggtggaaaaagataaagaggaagcacactctatcctgtgtcttcttataagggcactaataccactaatgagtgctccactctcatgacctaattacctgtaaaggatctacctccaaatgacatcacattgggaatcaggctttaacatataaatgttgggggcatacaagcattcagttcataatgaaagcaaaagaaacattgaaagaaatcagcattttcttattcttctatcgcttagcctaaaaagtaggcttgattttaaataccagaaagcaaccaactatttatgcttcaaagttatttatagcttcaggtacrtgtgtagtcatgcatcacttaatgacagggaaatgttctgagaaatgagtccttaggtgatttgttgtgtcaacatcataaaatatacttatgctctatgtatacctgcatgatatagcctactacacgcctaggctatgtggtatagagcctattgctcttcacttttaagcctgtatagcttgtgattgttccaaatgctgcaggcaattgtaacacaacggtaagtatttatgtatataaacatgtcaaaataaaaaatgtacagcagtaatatgatattacatccttatggaaccaccatggtatatgcagaccactattgaactaaattattatataatgaatgactgtatgcatatttat

SEQ ID NO: 704979 - DNA, 2021 bp, Homo sapiens
  misc_feature 1912: n = A,T,C or G
tggcttgatcttggctcactgcaagttccgcctcccaagttcatgcccttctcctgcctcagcctcctgagtagctgggactatgggtgcccgccaccacacccatctaattttttgtatttttagtacagacggggtttcaccgtgttagccaagatggtctcgatctcctgacctcgtgatccgcccgcctcagccctccaaagtgctgggattacaggcatgagccaccacgccctgccccttttcctgctttttgaataagggagcccccattttyattttgccctgggacttgcaaattatatagtcaccctaccaacaatcaaccttttcctgtctggacttctacagaatgaataaaaataagatagcagaggaaatgatggaacagttaaacagttctaattactgtatctgacttttttttcaggcttcaggaccacaaaacttcattaatgtccaatttatagtacaataagaaaaagctgaccaatgttgtaaatggagtttaaaaagtgcacagggctaggtgagatggctcgtgcccgtaatcccagcactttgggaggctgagatgggaggatcacttgagtccagaagtttgataccatcctgggcaacatagcgagaccctgtctctacaaaaaatttaaaaagtacctggacatggtgcacacgcctgtactcccagcaacttgggaggctgaggtgggaggattgcttgagcctggaaggttgaggtgccagtgagcctccaacctggcactccagcctggcagagcaagatcctgtcttaaaaaaaaagtctccacccacataaagattggaacgatagacactggggactccaaaagcagggagggaagagggcacgggttgaaaaaccacctattgggtactatgtttactatttgggtgatgggattagtagaagcccaaactttagcaccacccaatatacccaacctaatatacccaacccatgtaacaaaccttaactatgaactccaaaaggaaatatatttatctcgtttattgctgtatcaccaatatctgatgttcattaactattaattcataaaataaactatgatcattgctactgcacactcatctacaaatccatatacctagcaaaagacaaattttaggccaggctcagtggctcacgcctgtaatcccagcattttgggaggccaaggcgggcgaatcacctgaggccaggagctcgagaccagcctggccaacatggtgaaaccctgtctctactaaaaaaatatataaaaattagccgggtgcagtggtgcatgcctgtaatcccagttacttgggaggctgaggcaggagaattgcttgaaccagggaggtggaggttgcagtgagccgagatcatgccactgtactccagcctgggtgacagagtaagactccatctcaaaaaaaaaaaaaaacaacccaaagaaacaagacaaattttagctctaaaatgacaataagtcattttattagggcttaaaattatatttctaatcacagtaattataagacttacaaatttggtaaaatgatattcaagtatcatagaaatataaaatatagaaagtaaaagcccttaatatctcacttttttttttttttttgagacggagttttgctgttgttgtccaggctatagtgcaatagcacaatctcggctcaccacaacctccgcctcccaggttcaaacaattctcctccctcagcctcccaagcagctgggattacaggcatgtgccaccacacccagctacttttgtatttttagtagagacagggagtctctatgttggtcaggctggtcttgaactcccgacctcatgtgatcacccgccttggactccaaaagtgctgggattataggcgtgacacncacgccctgcaatatctcactcttaagtgagtgtacatccacataaagtaaaatgttcagtaggtttgaaactttttaaaatataaaaatatgaaatctaaagaatctg

SEQ ID NO: 704980 - DNA, 1418 bp, Homo sapiens
taattatactatgattatataagttgttaaaattagggaatgtatttaactgcaaacatattacaattaaaggtgaagtactgggttcctaaatcacatcccatgcttttctacctctgagccttttatcacatcattccatttagctgaaatgtccttgctctattcttcttggcctaatctttcccgtactgcgaactcaaatagaatgctagccccttcatggttcccatggtcagaagtcatttctctctcctattacccccacagcactttaaccatacccttcccataacacataccacactcccccttgtattttagcaaytgatataaatgactcattaatcctacctgaaaattcattaaatattatcatattatctctgttatgccacacaatgactataattgtatctgacacagatctggggctcagtaatggcttttggaaagtcccttgattacaattgccattgtgaacttcaagttcataaggcatcaataaataatccagattgccaacgtattcatacacaatgagagctaaaactgccaaggcaatagggaactcatctcaggttagccagcatattttttcctattagaggagacatatatggaaagctaaattaggatcagaaggttgcctgggaagcaaggagaacaagttgtgcaattttcgtgaataagagcaacaggctaaatggcttgatcataaaactacactcactacagggccagactctcttgttctcagctctgggcctcatctttgcttagtgctccaccaataatgacaaatttttcctttatgactatttgtctatttccacactaactattctctccttttgaatttttaaaattatttattttgccattctcagccctggctgcattttagaatcacctggagaactctcaaaaccctgatgcctgggccatttccgaggatcaattaaatcagactttccagaggtgggcctcaggcctcaggatttttgatagctcttcaggtgattctaagatgcagccaatgttgagaactagtactacattgataaaatttttatttacctatgttaatgtcaccaagcagaaaatagagaagtccaacatttcctgcctttttccctatcatatgttctctccaccacaaccactaccaccaccctctcctgaagatatgtgatctcacccattctctagtgtgtctactaatttaatgcctaggtttctggagatgccttgtcttcacccaaatggaagactttcaggcagtatctcacaggtctccagtgcagcacattgttaggtatatcagcacagtaaggtaggacaaaatacttttaacatatacaacaggtagaaggattcaatattttatcattaccattagtgtttgacagaaatca

SEQ ID NO: 704981 - DNA, 2361 bp, Homo sapiens
agggaatggcctggggagtgggaggaggataaatcaagaaagtataaaatagggtgttagttacagttttatttcaaagttctcctaacctgggccctttgggtacagtgagactaggttgccccaaaaatctgtgtgaaaaaaaacaacttctgtctgtttcttaaatgccttctggattccgaagaatttaacattttgctataaaaacataatatttagctataatattagagactccaaaaattttgtctgtatcgtcctaaatatcaaggttttgaatgcatcttaatgtgtgaggaaaattttcaagttgatgcttggcaaaggaaaggtgaaatccaagaggtcacacaaatgaacagagaagctggttcaggtgactgtattaatgtggagagccagacaattggctaggtcaggaagccgaatgagtcatactgactcatactttcataccactgcaaagacaatgcatatggaaggactgcgtgatctgttctcagactagattcatttctagtttcataaccttcattgcccttaacacagcagacaggacactgatgtcatcggcaggatgctacagaaaacaggtgaaaataaacattgatgcccttcctccgccaaacagtcaaaccctgaagaaaagaggaggtgcgagtctcattatttcctttcgaagggtaaaaatctaggttactttttccaaacattcattttggtgagaaaatcggtttgatttctaactcagagactcatgtttgatgttactgcaaaatagttaaatgcatagaatacctcctagaaagaaagattccacactgctacctatacgggaatgatgtgtaactcatgtttcatctaaaaactcagctttttattatttatttatttatgggctaaaaagtgcatggctgaaatatccatttaagatgtaaacctttgtcacaataactgttcttccacctagtgaaatcccaaatattccttttttaaaaaaactgcaggccaggcacggtggctcacacctgtaatcctagctctttgggaggctgagaagggcagatcacgaggttaggagctcgagaccagcctgaccaacatggtgaaaccccatctctactaaaaatacaaaaaaaaaaaaaaatagccgggcatggtggcacgtgcctgtagtcccagctactcaggaggctgaggctgaggcaggagaatcgcttgaacccggcaggtggaggttgcagtgagccaagatcgtgccactgcactccagcctgggcgacagagcgaaactccatctcaaaaaaaaaaaaaaaagtkcatagagtatatttgactcagccctctcctaagaaatggagaaaaaacaaaattcatggaaaaggatgcttcttggtggagaggacatgcactggacagatttactactgggagaagtagctttgagaggctaaaaagtcatccttacaggtccctgccaggtgttgaaatcacttctgattgagatttgtctaatttttcatgacccctctcttcccttttcttcattgaaaataacagcaagttgtttaaaaggcataaaacttgccacttcaggaggaaacaaatatctctagttcattccaattatcatttattaattactacatgagtggtttgtttagtttagtcttcagcgtctctggtaatttcctttagagagtcaagctaaaattttttaacaagcaaatagctgatttccaaataagcgtgttcctatgaactttttctgtttcattagtgttcaaaagatgtatctaatgcagtttttaaaataaatgtaagtttctgatatctgatttgtgctgaatttttctctttcttttaaggataatcccctatcatatcccccacaatttaaacctaatcaacctaaggaaaaagaaaagagaaaaaaatagcattgcatttgccttatggatcttttcaggtacttactacaggggtcagaactctatgaggaagccatgttttctcagcattgtcaccagttagctttgtttgacaaatgaaattagaaacaatgtgaacacagttcttctaatagttcataaattcttaaaaaaacaatgacaatttcaaaggatttttatttgaatgttttaagtttggcatggtattgaacttttaaagtatagacttgcatattctttattagctaaaccagccatgactctataattgtaaaaccccgaaacattcagggtgaacccaataggaagaaaaacaaaaaacagccgcattaaactttgtctttattgcatttatttattattaccagataccagtggtattaatgtatcaccagtggtgatagaa

SEQ ID NO: 704982 - DNA, 437 bp, Homo sapiens
cagcaaaacaggaagtagaggagagaaggagatcctttccaatgcaggccttggtctgagaatttttgactctgtaaatatccatgtagcagttgcctgagaaaagacactgtgagctccaggttagatgactctgggtgattacttcaaactggtggaagctgaaaaaaaaagaggagccctaggtattttacataggatagctaccaatcttgcaacaactttgctaggcaagtgacattgcttccactttacagtggaaaacacctatggccaaagaggcagaggccagtgattttcctaagccaaatagataaagggtatgactggaatcatatatcatttgcacaataaagagaagataaacagttctaccttattrttccagactaagttctaagagaacaatctgaagaataaaccattgtccatcatca

SEQ ID NO: 704983 - DNA, 1278 bp, Homo sapiens
  misc_feature 1178, 1179, 1180, 1181, 1182, 1183, 1184, 1185, 1186, 1187,1188, 1189, 1190, 1191, 1192, 1193, 1194, 1195, 1196, 1197,1198, 1199, 1200, 1201, 1202, 1203, 1204, 1205, 1206, 1207,1208, 1209, 1210, 1211, 1212, 1213, 1214, 1215, 1216: n = A,T,C or G
  misc_feature 1217, 1218, 1219, 1220, 1221, 1222, 1223, 1224, 1225, 1226,1227, 1228, 1229, 1230, 1231, 1232, 1233, 1234, 1235, 1236,1237, 1238, 1239, 1240, 1241, 1242, 1243, 1244, 1245, 1246,1247, 1248, 1249, 1250, 1251, 1252, 1253, 1254, 1255: n = A,T,C or G
  misc_feature 1256, 1257, 1258, 1259, 1260, 1261, 1262, 1263, 1264, 1265,1266, 1267, 1268, 1269, 1270, 1271, 1272, 1273, 1274, 1275,1276, 1277: n = A,T,C or G
ggaaagaagatataattcaaacagtgaatttctcatatcttaaaagtataacttgatatgttttacatgagtcagtccatgtaaataccatagggatagagacatataatatttgcttctccctagaaagtgttattaatccatgtttaatcaacgattgattagtttatcttgagttttatttaaacggaaacctatttgtcttccttcacctgacagcaggcctatgatattatccatgttgctgagtgtagcagttccttcttttttactgctattattccattctgtgaatataaagtgttcagcaaattaatgaaaactgatgaagaataagtgttctggtgacttaaagacaccagacaaacttaaataaagacaaactccaaaagttagaaaaaattaagttagctacatactttgcttcctaaacactaaacatggaaaagaacacccatggagctttttaaaaacaaaacaagctgggcacagtggctcacacctgtaatcccagcactttcggatgctgacgggggggtggatcacctgaggtcaggagttcgagaccagcctaaccaatatggtgcaaactcatctctactaaaaatacaaaaattagctagacgtggaggtgagtgcctgtagtcccggctatttgggaggctgagacaggagaattgcttgaacctgggaggtggagattgcagtgagccgagatcgtgccactgcactccagcctgggtgacaagcgygagactccatctcaatacaaacaaagaaacataaaattgtacactacactaagaactctatactgcaaaaagcaacagaagaaagggccacatatatgcaaatgcctggtcactatgtctctaagtatcagctcacacactattaagtaaaaataacattggccaactagatgctgaattttaaaaacacgaataaaaaattatggttaaacacacacacacaaaaaacaaaagaactaatagataacattgaaatctcttgagcatagttaattataaacaactattgcaaatatggcattggtatataatattaatattaattatgtgaatcttaaaacccagattatatcagcaaaatgctgggtaatagtagaggagttttgtggatgaagaataaagaaagctaaggtagaagtgaattcnnnnnnnnnnnnnnnnnnnnnnnnnnnnnnnnnnnnnnnnnnnnnnnnnnnnnnnnnnnnnnnnnnnnnnnnnnnnnnnnnnnnnnnnnnnnnnnnnnnna

SEQ ID NO: 704984 - DNA, 1278 bp, Homo sapiens
  misc_feature 1178, 1179, 1180, 1181, 1182, 1183, 1184, 1185, 1186, 1187,1188, 1189, 1190, 1191, 1192, 1193, 1194, 1195, 1196, 1197,1198, 1199, 1200, 1201, 1202, 1203, 1204, 1205, 1206, 1207,1208, 1209, 1210, 1211, 1212, 1213, 1214, 1215, 1216: n = A,T,C or G
  misc_feature 1217, 1218, 1219, 1220, 1221, 1222, 1223, 1224, 1225, 1226,1227, 1228, 1229, 1230, 1231, 1232, 1233, 1234, 1235, 1236,1237, 1238, 1239, 1240, 1241, 1242, 1243, 1244, 1245, 1246,1247, 1248, 1249, 1250, 1251, 1252, 1253, 1254, 1255: n = A,T,C or G
  misc_feature 1256, 1257, 1258, 1259, 1260, 1261, 1262, 1263, 1264, 1265,1266, 1267, 1268, 1269, 1270, 1271, 1272, 1273, 1274, 1275,1276, 1277: n = A,T,C or G
ggaaagaagatataattcaaacagtgaatttctcatatcttaaaagtataacttgatatgttttacatgagtcagtccatgtaaataccatagggatagagacatataatatttgcttctccctagaaagtgttattaatccatgtttaatcaacgattgattagtttatcttgagttttatttaaacggaaacctatttgtcttccttcacctgacagcaggcctatgatattatccatgttgctgagtgtagcagttccttcttttttactgctattattccattctgtgaatataaagtgttcagcaaattaatgaaaactgatgaagaataagtgttctggtgacttaaagacaccagacaaacttaaataaagacaaactccaaaagttagaaaaaattaagttagctacatactttgcttcctaaacactaaacatggaaaagaacacccatggagctttttaaaaacaaaacaagctgggcacagtggctcacacctgtaatcccagcactttcggatgctgacgggggggtggatcacctgaggtcaggagttcgagaccagcctaaccaatatggtgcaaactcatctctactaaaaatacaaaaattagctagacgtggaggtgagtgcctgtagtcccggctatttgggaggctgagacaggagaattgcttgaacctgggaggtggagattgcagtgagccgagatcgtgccactgcactccagcctgggtgacaagcgtgagactccatctcaatacaaacaaagaaacataaaattgtacactacactaagaactctatactgcaaaaagcaacagaagaaagggccacatatatgcaaatgcctggtcactatrtctctaagtatcagctcacacactattaagtaaaaataacattggccaactagatgctgaattttaaaaacacgaataaaaaattatggttaaacacacacacacaaaaaacaaaagaactaatagataacattgaaatctcttgagcatagttaattataaacaactattgcaaatatggcattggtatataatattaatattaattatgtgaatcttaaaacccagattatatcagcaaaatgctgggtaatagtagaggagttttgtggatgaagaataaagaaagctaaggtagaagtgaattcnnnnnnnnnnnnnnnnnnnnnnnnnnnnnnnnnnnnnnnnnnnnnnnnnnnnnnnnnnnnnnnnnnnnnnnnnnnnnnnnnnnnnnnnnnnnnnnnnnnna

SEQ ID NO: 704985 - DNA, 1278 bp, Homo sapiens
  misc_feature 1178, 1179, 1180, 1181, 1182, 1183, 1184, 1185, 1186, 1187,1188, 1189, 1190, 1191, 1192, 1193, 1194, 1195, 1196, 1197,1198, 1199, 1200, 1201, 1202, 1203, 1204, 1205, 1206, 1207,1208, 1209, 1210, 1211, 1212, 1213, 1214, 1215, 1216: n = A,T,C or G
  misc_feature 1217, 1218, 1219, 1220, 1221, 1222, 1223, 1224, 1225, 1226,1227, 1228, 1229, 1230, 1231, 1232, 1233, 1234, 1235, 1236,1237, 1238, 1239, 1240, 1241, 1242, 1243, 1244, 1245, 1246,1247, 1248, 1249, 1250, 1251, 1252, 1253, 1254, 1255: n = A,T,C or G
  misc_feature 1256, 1257, 1258, 1259, 1260, 1261, 1262, 1263, 1264, 1265,1266, 1267, 1268, 1269, 1270, 1271, 1272, 1273, 1274, 1275,1276, 1277: n = A,T,C or G
ggaaagaagatataattcaaacagtgaatttctcatatcttaaaagtataacttgatatgttttacatgagtcagtccatgtaaataccatagggatagagacatataatatttgcttctccctagaaagtgttattaatccatgtttaatcaacgattgattagtttatcttgagttttatttaaacggaaacctatttgtcttccttcacctgacagcaggcctatgatattatccatgttgctgagtgtagcagttccttcttttttactgctattattccattctgtgaatataaagtgttcagcaaattaatgaaaactgatgaagaataagtgttctggtgacttaaagacaccagacaaacttaaataaagacaaactccaaaagttagaaaaaattaagttagctacatactttgcttcctaaacactaaacatggaaaagaacacccatggagctttttaaaaacaaaacaagctgggcacagtggctcacacctgtaatcccagcactttcggatgctgacgggggggtggatcacctgaggtcaggagttcgagaccagcctaaccaatatggtgcaaactcatctctactaaaaatacaaaaattagctagacgtggaggtgagtgcctgtagtcccggctatttgggaggctgagacaggagaattgcttgaacctgggaggtggagattgcagtgagccgagatcgtgccactgcactccagcctgggtgacaagcgtgagactccatctcaatacaaacaaagaaacataaaattgtacactacactaagaactctatactgcaaaaagcaacagaagaaagggccacatatatgcaaatgcctggtcactatgtctctaagtatcagctcacacactattaagtaaaaataacattggccaactagatgctgaattttaaaaacacgaataaaaaattatggttaaacacacacacamaaaaaacaaaagaactaatagataacattgaaatctcttgagcatagttaattataaacaactattgcaaatatggcattggtatataatattaatattaattatgtgaatcttaaaacccagattatatcagcaaaatgctgggtaatagtagaggagttttgtggatgaagaataaagaaagctaaggtagaagtgaattcnnnnnnnnnnnnnnnnnnnnnnnnnnnnnnnnnnnnnnnnnnnnnnnnnnnnnnnnnnnnnnnnnnnnnnnnnnnnnnnnnnnnnnnnnnnnnnnnnnnna

SEQ ID NO: 704986 - DNA, 1278 bp, Homo sapiens
  misc_feature 1178, 1179, 1180, 1181, 1182, 1183, 1184, 1185, 1186, 1187,1188, 1189, 1190, 1191, 1192, 1193, 1194, 1195, 1196, 1197,1198, 1199, 1200, 1201, 1202, 1203, 1204, 1205, 1206, 1207,1208, 1209, 1210, 1211, 1212, 1213, 1214, 1215, 1216: n = A,T,C or G
  misc_feature 1217, 1218, 1219, 1220, 1221, 1222, 1223, 1224, 1225, 1226,1227, 1228, 1229, 1230, 1231, 1232, 1233, 1234, 1235, 1236,1237, 1238, 1239, 1240, 1241, 1242, 1243, 1244, 1245, 1246,1247, 1248, 1249, 1250, 1251, 1252, 1253, 1254, 1255: n = A,T,C or G
  misc_feature 1256, 1257, 1258, 1259, 1260, 1261, 1262, 1263, 1264, 1265,1266, 1267, 1268, 1269, 1270, 1271, 1272, 1273, 1274, 1275,1276, 1277: n = A,T,C or G
ggaaagaagatataattcaaacagtgaatttctcatatcttaaaagtataacttgatatgttttacatgagtcagtccatgtaaataccatagggatagagacatataatatttgcttctccctagaaagtgttattaatccatgtttaatcaacgattgattagtttatcttgagttttatttaaacggaaacctatttgtcttccttcacctgacagcaggcctatgatattatccatgttgctgagtgtagcagttccttcttttttactgctattattccattctgtgaatataaagtgttcagcaaattaatgaaaactgatgaagaataagtgttctggtgacttaaagacaccagacaaacttaaataaagacaaactccaaaagttagaaaaaattaagttagctacatactttgcttcctaaacactaaacatggaaaagaacacccatggagctttttaaaaacaaaacaagctgggcacagtggctcacacctgtaatcccagcactttcggatgctgacgggggggtggatcacctgaggtcaggagttcgagaccagcctaaccaatatggtgcaaactcatctctactaaaaatacaaaaattagctagacgtggaggtgagtgcctgtagtcccggctatttgggaggctgagacaggagaattgcttgaacctgggaggtggagattgcagtgagccgagatcgtgccactgcactccagcctgggtgacaagcgtgagactccatctcaatacaaacaaagaaacataaaattgtacactacactaagaactctatactgcaaaaagcaacagaagaaagggccacatatatgcaaatgcctggtcactatgtctctaagtatcagctcacacactattaagtaaaaataacattggccaactagatgctgaattttaaaaacacgaataaaaaattatggttaaacacacacacacaaaaaacaaaagaactaatagataacattgaaatctcttgagcatagttaattrtaaacaactattgcaaatatggcattggtatataatattaatattaattatgtgaatcttaaaacccagattatatcagcaaaatgctgggtaatagtagaggagttttgtggatgaagaataaagaaagctaaggtagaagtgaattcnnnnnnnnnnnnnnnnnnnnnnnnnnnnnnnnnnnnnnnnnnnnnnnnnnnnnnnnnnnnnnnnnnnnnnnnnnnnnnnnnnnnnnnnnnnnnnnnnnnna

SEQ ID NO: 704987 - DNA, 1044 bp, Homo sapiens
ataattacaatattgtcacgtaaaaacataatatttagatgaaaaaccatttgttgatgtacagaggcagatgcctataaagagaaagaagatctcaaaagagggagctgtcctttaaattgtgaagaccaaatgggatttgccaattgtgtaagggttgaasagtattcctgggaatgggtatgacatggggcagcaaaggcttgaagtctctgctttatattttatttagattataggatgactgcagtgggagggggaataaaaggtgagactgaaaaaatatttggagattagattgtgtgtgctgaagtgcctcatgctgaacagatacctggagccaaggaaacactttaggcaggtgtctggttagtgatataactaaacaccttcttcctcatcctcaggctggagttcccatccctgtactcctgtgtctatgacagcaggatgctctcaggctttcatgtcctcttcatagctgtcccttcattatatgctggtaccaatattaggatctttgctctaggctgatcctttttatttatttatttatttatttatttatttatttatttggagatagagtcttactctgtgacccaggctggagtgcgtggtgtgatcttggcttactgcaacctccacctcccaccctcaagcaattcttttgcctcagcctcccaagtagctgggactacaggtgcatgccaccaagctctgctatttttttttttttttattagagatgggattttaccatgttggccaggctctgctcttgaactcctgacctcaagtgatcctcctgcctcagcttcccgaagtgctgggattacaggcatgagccaccatgcccagcctgaagttttctgaagagttcttaaaatcaggatactaggctcctagtaaaggcaacagcagcggaaaaaaaggaatgaattagatactatttaggaggcacaactgatagagaattgtaactggctataggtagagatggagtttttgggctggatgactcagaacaaaatgatgattaca

SEQ ID NO: 704988 - DNA, 1044 bp, Homo sapiens
ataattacaatattgtcacgtaaaaacataatatttagatgaaaaaccatttgttgatgtacagaggcagatgcctataaagagaaagaagatctcaaaagagggagctgtcctttaaattgtgaagaccaaatgggatttgccaattgtgtaagggttgaacagtattcctgggaatgggtatgacatggggcagcaaaggcttgaagtctctgctttatattttatttagattataggatgactgcagtgggagggggaataaaaggtgagactgaaaaaatatttggagattagattgtgtgtgctgaagtgcctcatgctgaacagatacctggagccaaggaaacactttaggcaggtgtctggttagtgatataactaaacaccttcttcctcatcctcaggctggagttcccatccctgtactcctgtgtctatgacagcaggatgctctcaggctttcatgtcctcttcatagctgtcccttcattatatgctggtaccaatattaggatctttgctctaggctgatcctttttatttatttatttatttatttatttatttatttatttggagatagagtcttactctgtgacccaggctggagtgcgtggtgtgatcttggcttactgcaacctccacctcccaccctcaagcaattcttttgcctcagcctcccaagtagctgggactacaggtgcatgccaccaagctctgctatttttttttttttttattagagatgggattttaccatgttggccaggctctgctcttgaactcctgacctcaagtgatcctcctgcctcagcttcccgaagtgctgggattacaggcatgagccaccatgcccagcctgaagttttctgaagagttcttaaaatcaggatactaggctcctagtaaaggcaacagcagcggaaaaaaaggaatgaattagatactatttaggaggcacaactgatagagaattgtaactggctataggtrgagatggagtttttgggctggatgactcagaacaaaatgatgattaca

SEQ ID NO: 704989 - DNA, 1990 bp, Homo sapiens
ggcaaaaccctgtctttactaaaaatacaaaaattagccaggcatagtggtgcccgcctgtaatcccagctgctggggaggctgaggcaggagagttgcttgaacctgggaggcggaacttgcagtgggccaagattgcaccactgcactccagcctgggtgacaaagtgagaccctgtctcaaaaaaaaaaaaaaaaaaawaataataataataataatccagtgggtgatgaaatcaatttagatggtcacaagtatttcttaaataaaaaatatagaatagaaagtacattgcatatagtaggtgctaattatggtttactgaatttatgctaaattaatgtgggtgtacgaggatgcagtataaaattatgaagggttactataaaaaaattttaaagctatgttctgaggcattcatattattgccaactagaggtgatttggtttttggacatgttctcaatgagtggctcctgtatgaaacaagctgttttcctgtaatcgtgtctcatcagtcagcagttggaggaaaggattctttccttgacctttctctcttctcttgttttcaattgtttgcataagagttctttttagaaagtactaaatcatgatttttcttttcaaaccctcttctgcttaggatttttttccagacttttcttctttcctcttcagcattcctctagctttgtggccttgtcacctaatactcagtgcatccaccccaacttcttgtcttgccatcagagactgcctgtttacctgcatatcctcccaccccctccttctgcactgttactgttgctgtagcaactgccatctcagtctccctccttccccttgcttttttccttcttgccaacgactattcattgaactcttcccagttttatgcactgtgaggtcagggctgatactatgtaaggtgaagattaaatggctatttatgaaaattgttatttcaccagcttttgggtagagggcgtttttgaataagccaggccatctgataaactcaaatgactaaatgttgagtcccttattttgtggaaagtcatgataataaatctgttattatactgcctcttaatttgctttgagatcttgattggttctgtggggcttttggaacctgtgggccaaaaaagttgaagcgttctgggctctagaacacatccactctgggcatgttcctgttctggaagataatgattagaaacactgcagtgcccgccatccatatgtgcttcatgaaagggctggatatgccatttgattatataaagatttctttacagaaatttagtcaagcctttctgccaacttcagtcaaacttaaatttatggagattcaaaaagtatactgaattcatctgtatatcaagccagagaaatgtggcagtgaatcatgttctggggaaaataaatgtgttcattcacagatcgcaatgtgtcttccttgggttggttgtccgacagttctggttccctctggaggtttcagtcttgggactgaggagtgcattaggaaaacaaaagagaaagcccaggttcttcatctcccttccaactcacataaaataaatggttaatggattatcgggactctaaacatacttgaatgcgaccagtgtggactgtgactccctgaacttgctgactttttacctagttctagtatcttctaggatttgtcatattctgtgggttgtattataggaaatacaaaacatcccatattccttatagatcatcctgccttaaatcagaaactgtgatggggagagactttctcccatagaaaggaccttgcttttctctctctacttgggatacgacaccagctctgatgtctgtgagttaggatagtagtgcctcgaccccaagcattccaccggtcttatagagctttcacgtggaaacaatgaggaaattcatgccagtggtctttggaaaatcttgttggtaccaccaggtgtatca

SEQ ID NO: 704990 - DNA, 619 bp, Homo sapiens
caaatgcctcctttctgtgaagcagctcctgggcactgggaaggaaatcaaagacaaatactggcctaccgggagacaagacatagcatatgaataactaatgatggcaaaagcagcaactgaaatgtgcaacatgaatgccacagatcataagtactttacagagattctgaatggagagatcctttcctctagaagttagggacagctgcattcattcaacatacactctgtgccaaaatagtgccaggtgccgggggacatggtgagtaaaagcatctttaagagtatgtaacagagagrtctagcaaggaagttttccctgatggattaccatttgatcttggtaactatgacatgaacacgtaaagaaaaatcaagaaaacaggagaaagcatcctctatgtgtatgtgttttggggggtggtgcaaagggagaagagacgcaagctaaggagccagtgcagtcagaaccttatggagagacggaaatgggtatgaaatggggtagggatttaagcaatgaaaagagtggccaagcactaacacagagcaaagatgtttatggcagagggagggagaggcagaagaggcaaatggactttgagatttcagccag

SEQ ID NO: 704991 - DNA, 619 bp, Homo sapiens
caaatgcctcctttctgtgaagcagctcctgggcactgggaaggaaatcaaagacaaatactggcctaccgggagacaagacatagcatatgaataactaatgatggcaaaagcagcaactgaaatgtgcaacatgaatgccacagatcataagtactttacagagattctgaatggagagatcctttcctctagaagttagggacagctgcattcattcaacatacactctgtgccaaaatagtgccaggtgccgggggacatggtgagtaaaagcatctttaagagtatgtaacagagagatctagcaaggaagttttccctgatggattaccatttgatcttggtaactatgacrtgaacacgtaaagaaaaatcaagaaaacaggagaaagcatcctctatgtgtatgtgttttggggggtggtgcaaagggagaagagacgcaagctaaggagccagtgcagtcagaaccttatggagagacggaaatgggtatgaaatggggtagggatttaagcaatgaaaagagtggccaagcactaacacagagcaaagatgtttatggcagagggagggagaggcagaagaggcaaatggactttgagatttcagccag

SEQ ID NO: 704992 - DNA, 607 bp, Homo sapiens
attaaagcctttctttgaggtcgctgggtgaaaggtgggggcttaggccaggtgtggtagctcacgcctgtaatcccagcactttgggaggccgaggcaggtggatcacttggggtcaggagttcaagaccagcctggccaacatggcaaaaacccgtctctaccaaaaatacaaaaattagccaggcatggtggactacaagctggtagtagtcccagctactagggaggctgaggcaggagaatcacttgaacctgggaggcagaggttgcagtgagctgagattgcaccactgcactccaggctgggcaacagagtgagactccaactcaaaaataaagmaaaacaaaaagaaagatgggggccttaggatcagctaactctttttagcaatgtgacttcagacaagttaacctgtcagagcttcggtttacttgtctgcaaaaatagagagaataaaactagctgtctctctagtggttctgagggttaaagaaataatttcacaaagtacctagtccagtgtctagtatacccttaaggataagtaaaagtacatttccttttctttctcctcgccacctcggttctctctaccttggtatg

SEQ ID NO: 704993 - DNA, 604 bp, Homo sapiens
aacagaacttgaataaaaatgtgaagtaattcttgatgtaaaaaaagtcatttttctccacaatttgatcttttagaggcatcttattgaacttattttgaaaagaaaccattattttaatgctaccctattctgcatatgctgccttctcatttaaatgtgatgatgctatagattttaggggctgtgagcatatatttatgtttaattataatgcatgttccagtattcagcatggtacttggaacatagtagagcttggttagctattagttcaatcgacatgcttaaacctcacttaaaaatagaaaataatacctttgctcaagaatataccctcgctcaacatagtgaaatcaartggaaattctcatagacttttagcatgaagaatatgttttcctcagaccaactaatttaaaatgaaagaaggaatttgatgattcagaaataaaaaagactgggaggcacgatgaaaaaagcatgtgcaagataacttacccctgaaactcttccccgaactgggatgcaacaacagaaagcattttccgaaggagccattctttttttttttttttttacacaaacgaaccatattctatat

SEQ ID NO: 704994 - DNA, 626 bp, Homo sapiens
ttcagatttaaccttatttcaacctaagagagctgtaagcccccaaaatagtctattaaataggacgttataatgcccaaaattttatcaaagaaaagccaaaacgattttcaaagatataataaaaatatttcagagtagtatggtaaaatattcctgtctctgcctagatccattctgttagtgtcaaaacagtgtaagacacaaagaaaagcacacacaaaccgcgatcttgtagacccctagaacataaaatattgctttcccccaataagaaccacaaaatggtgtggaattaaaggagcattttaaatgaacagctttttccagccaaattacttagcaagtcaacctcttttagacagaagcaatacactcttctctgaattcagaaacaatctcatagtaaaacaaacgtgtcaattcctttaaaacaataaatatctgtgcttagctttatamtgtaggtaataaaatttcaagatctttcaatcagttttttaattcaatcaccagcgtctttaaatgtcatttttgcaactgcatgactatggtgttcattcaccttttgtaatatagtcccataacaaaaatgtagacacccaagaaaccacacagttttggca

SEQ ID NO: 704995 - DNA, 1445 bp, Homo sapiens
  misc_feature 3, 4, 5, 6, 7, 8, 9, 10, 11, 12, 13, 14, 15, 16, 17, 18,19, 20, 21, 22, 23, 24, 25, 26, 27, 28, 29, 30, 31, 32,33, 34, 35, 36, 37, 38, 39, 40, 41, 42, 43, 44, 45, 46,47, 48, 49, 50, 51, 52, 53, 54, 55, 56, 57, 58, 59, 60,61, 62: n = A,T,C or G
  misc_feature 63, 64, 65, 66, 67, 68, 69, 70, 71, 72, 73, 74, 75, 76, 77,78, 79, 80, 81, 82, 83, 84, 85, 86, 87, 88, 89, 90, 91,92, 93, 94, 95, 96, 97, 98, 99, 100, 101, 102: n = A,T,C or G
aannnnnnnnnnnnnnnnnnnnnnnnnnnnnnnnnnnnnnnnnnnnnnnnnnnnnnnnnnnnnnnnnnnnnnnnnnnnnnnnnnnnnnnnnnnnnnnnnnnnctttaactattatcttcatttgtctttaatatgcctttagtattcaatggctgtttttcataatccacgtgctgtattaagtgtgaaaagatatgcctgatccagaggcaatgagctaaaagaatcatctgtacaatctaacaatgcttttgaggatggatctggagggcttaaaatacacattattaatgggaaaatcttgggctgaaactaatctgtaggaatatttcatataaagttgatttggagaaaatttttaagtggttcattttgagaaaaggaaccaatgtaattacagtgttccatgtaattttactgcacaatcttccaaacccaaattttcggaccttttctgcagactggtgaacttagtacttaaatatgaaacgccagttctcgtctagagaacaaaatgagtttaatgcatagactcacctgttattactcttcacaccaatgtgtaaatgactgtttgctcttctattaaatatattttccgtaacaccattcaaataggcctacttcatttccactgagataagcattttggtattcagcttttatattcactaagaattaagaaatgctgattttaaaagcttaggaaatgtatatagaaaatatatcccaatgttctcatatatgtgtttcagacataggggaggaattagaataaattttctaaataaacaaattatttgcctacttaaaattgcaattaaaaaatgaagctttccttcgttagctgtaaactacattgagaaattgtaacataaaaaagaatggatttttaaaacttcttgagtagatcaagtgtcttgtacaatatcattaaatttgtatcagaacacataaatggaaatgaggtggggaagcaattgcagtactttctagagtctaggttttgaaattctttttggtgaacatttactaaatcagctaaacatttcaactcatttaaacacaaacctaaattattattaccctagacagagagatgatatagcaacgggacctcgaaaaggtgatcttttgtggctgcatgtagtgcccagatggaaaaatcttaggaccactaaaaggcctcttgaccactaggcggcaaaaactaattttgaactacttgcctactcggtagcaggcctctttcaatagacattttaaatatcttggctttgagaaaataaaaatttcaccatctcacaaaaatataaattacygaacagtacatcatttgttgtttgcaaaaattttgcagatgcttagaaacttattatttatttactcaattactggcaaactatcatactaattgtcaagaactaaagttgtatttaaccaca

SEQ ID NO: 704996 - DNA, 375 bp, Homo sapiens
cacatcatycccatgttacacaaacagtagactttgcctaggcctatgtcctcaagatcatcacaatttgggtccatttttgccttttcagtcaccggtaaagaaggagaacagctagcttctctcctttgtatattcatcttttatatacttagagatcaggcccatctctcagtgtttaacgaagactaaacatgaaaaggttctttggaacttactcatcacttttattcccagttaattaattatcatgtcgatgacccctgaaacttttccaaatttttttcctcttcagttgtaggattataagcgggcacaaaagtcttgaaagaactcagccgttactgaagaacatatgttgaaagtattttgtta

SEQ ID NO: 704997 - DNA, 375 bp, Homo sapiens
cacatcattcccatgttacacaaacagtagactttgcctaggcctatgtcctcaagatcatcacaatttgggtccatttttgccttttcagtcaccrgtaaagaaggagaacagctagcttctctcctttgtatattcatcttttatatacttagagatcaggcccatctctcagtgtttaacgaagactaaacatgaaaaggttctttggaacttactcatcacttttattcccagttaattaattatcatgtcgatgacccctgaaacttttccaaatttttttcctcttcagttgtaggattataagcgggcacaaaagtcttgaaagaactcagccgttactgaagaacatatgttgaaagtattttgtta

SEQ ID NO: 704998 - DNA, 1276 bp, Homo sapiens
tgatgattgagaagtgtgactggaataaggaaagggaagtagctgagtctagaagaacaggaatgtgctagtttgtggatactcaggattcaaggttaaatagaatttagccattagaaaattatgaattaggtaagtcgtggttaattttatgggtcaacttgacagggctaagagatgctccaatagctggtaaaacattatatctgcatgtgtctgtgacagtagttttagaatagcttatcaattgaatcagtagactgagtaaaaagtatctgccctcaacaatgttggtgggcatcatccaatccattacgagcccaaagagaacataaytgtggagaaagggtaaattttctccatcttcttgagctgggacagctatctcctcctacccttgaagttaccagttcttggagacttagacaccaacgcctctgcctcatatcctcttaagtttctcaggcctttagcttttaagtaggaattatgccattaactctctcggttttcagatcttcagactgaattacacaactgtctttcctggttctccaccttgcagatgttatatcaatccaatattcagaaaactcattctcaaaattttcttctagaacccctcttggtaccaaaaatctgtgctattgagggttccccaaataaacagtaccaataagatatatgtagatatgtaataagagacttattagaaaatggctcatgtagttgagttttctgaactgaatttggagcttctggatgtgactctctaatctgattataaaaatgcaaagcagtgactgatagttcatggcaggaactatttttagagatatgcaaaatatttatattagctatttctaacccactacttataagaagtaaagagctaaataactttgaatatgatactttaaaacatttttggaaaactaaggaatagaatgatgctgattggttgctcctaatgtcactggacaaatgatgagatcaaagaattagcttagaaattctaaatcccagatcaagggctgcacaaatgacctaagagcttctaagtgtgccctgagtgagagccttatctcctgtagcggaagggctgatattgctgatactcagattattgaccttatcctgtaattggcttaattgcaatacaagttgtactcccagccttgaaggatgtgtactgttaaaatgagggcaccgattggggaaaaactgaaacctataagctgggatggggatgtctggaaagctcctgatgaagctg

SEQ ID NO: 704999 - DNA, 601 bp, Homo sapiens
tagtttcttgcacaaattgctcttaatgatgatcttttattttattttttaaccaatgttataagaatgaggattgcatttagattctaaaactttaaaatgtccatataaaacatgtttctgttgaagcagaatgggggaaaaattccttaccacttacatttctgttataaaactaagtattatgtcattctcatataacactgcaagaagagcaaaaataaaaatagtgtatttgaaagctctaatactcatgcaggcatgataattacactatcaaaaatgctatttaatggtgcaaaaaagacttatttccaaaaatatcataatgtagactaggcttctgaaatcaaagaataccatttaatccttctgccactttgattagttatgagtttagtttatccctgcaattaattgggtgtatctctatctcccctgctaatctgcataattttgttttactttatgttcctttttagactgcaaggtgcttgagtatayagaaaacctactttatttggtttctgcctcatggtgcctcatgtataatacttatgtgctattttataatcacctttcaaatatggcctttgaaaac

SEQ ID NO: 705000 - DNA, 614 bp, Homo sapiens
aaaaacaggggcattttggaagttttgagaactttggtgggacaagattaataaaagctgaagagccagtgagagtttctttggtggagaattttaaaaattggaagaagagaaggtaggatgaagaaagcagggaaggaaacacatttaagttatcaaaaataatagaaataaagatgaatggattggtaatttcatatgtcaataaactttaaggaaatgaacctcatatagttaattttctgccttatttggttgttaatcaccagctcagataattcaggtcctcagttatgtttttttgttctaattaaatggagtttgctattaataataaagttaagtcaattatttaattttatttgcctatatttaattttctatttatataatatcaatttacatgtagtatagatgtattcagttttaaagtgtaaataactaaaaacattctaattattacaaagcatgtttttaatccttatatcttttgtgtttaaaaatacttaagaaacayggaattatgtcaatgtttatcttggttttggaggctttaaatagtataacatcccattccttttgtataaaaatgtatctctaaagtgcagactgaa

SEQ ID NO: 705001 - DNA, 612 bp, Homo sapiens
aaagagaaaacggaaatgctttcaaacagaagtaatgaggcttgcstaatcttaacaacaaaagctacaagtttatgacaaagaagtaaatttatagatcaatataattcataacaggcaaaattctaacaaatagtagcaaagcctagtaagcaatatatttaaaagacaatacattattattcagctggaaacattatggaaatacgtgttttagcactgaaaatcaagcatgtatttcaccttcatgacaaaataaaaatcatataattatctgaataaatgcaaacacatggaaattttacccatgggatcaagaacaagaacgcctcctgtcggccgggtgcggtggctcacgcctgtggtcccagcactttgggaggccgaggcgggcggatcacaaggtcggagatcgagaccatcctggctaacacggtgaaaccccgtctctactaaaaaatacaaaaaaaattagcctggcatggtggcgggcgcctgtagtcccagctactcaggaggctgaggcaggagaatggtgtgaatccgggcgatggagcttgcagtgagccgagattgctccactgcactccagcctggacgacagagcgagac

SEQ ID NO: 705002 - DNA, 632 bp, Homo sapiens
ttgcgatcatatatgcttgagtaaagtagtcttttgggaattcaacctgtcagagataatctattctattatattcatatgaccaaagtacaggtaaaattattaccaaatataattggaaagttaaattgcaaatttcagactatgttatgaagatttatagatttttacttgtcattatacaaagggttttttsttggcttgttttatttttgatcttaccattatgtgttatggatcacaatggctgagtgaaacagtgtgacaagtaaagtttatgattaagaatactaatctcagcggggtgcagtggctcatgcctgtaatcccagcgctttgggaggcagaggtgggtggatcacctgaggtcggtagtttgagaccagcctgaccaacatggagaaaccctgtctctactacgaatacaaaattagctgggcgtgatggcacatgcctgtaatcccagctactctcgggaggctgaggcaggagaatcacttgaacctggaaggcggaggttgcaatgaacagagatcgcaccattgcactccagcctgggtaacgagtgaaagttcgtctcaaaaaaaaagaatactcatctgtcctattgtttatagaaatcctttattttg

SEQ ID NO: 705003 - DNA, 954 bp, Homo sapiens
ttccccacaaaacctgctctgaggatgcaagttgaaattttacttatatgtgtgcacatgtgtgtatgcaatatatatgtgtatatatttgtatatacatatatacacacatatgtatatatatacacctatagagatgtatgtatatattacaattacaatgtatatattacaattaatttggcttatttgctcccattctagcatttttaggatagaaacaatagatgacataaatcccttttctgccacaatataatatcacctaaagaatcatgtttcattagctagaagtgggatttgctttcattattgcagtacatttgataatataaaaatatttctgatgattttttcttatgtgaatttcatagcatcttcatctaaaatttactttggagattcagaccaaatgtcatatcaatttcctagactgcttaatatgtaattctgctacagattttaatctcaatgtaacaagggggaaaagcagagagaaatgaactaggtgtactcaggatcactatctgctattgaaatttccccaaacctaagaggtttcatctgtacatagaaatattttcaccatggaatgtatagtggttgaacttttgaagaaaagttgacttattgtctaaaagttttccatttgccctcttctaggtttgcactcaagactgacatttaccgtaatggaagctgttcatatgcccccaggaaagaatgaacaatttaatagaaaatgctaaaggagtgatattaggtgagcatctcatgtcatccgaagaaaaacataggcagattttctactctttaccttatttcccactttattttcaggatgtggggataaaaatgtagggtctgatgaatttttcaacagcttataattattagtgttattgttagaataccagaatataactaataaccaaaygtaaaatgtttggtaag

SEQ ID NO: 705004 - DNA, 782 bp, Homo sapiens
aagtcagctccgactccttcaactggctacaagtataaaatctctaaatgagctctatctgtatattaccaataaatactgtgaaaaaagtggttaattatatcataaaccaacataccctatataaaacaataaaagaaataaaaaataaatgcttgaaaaatattaatgctacaacacaatgattaggaaaatacaggtagcwttatttgtgctgttcattataagcccgtaatagctgacttgcgttaacaatcctcctctattatgcatttcatacttttgtgtttagccaataccacaaataagctgtgttctttatgtaaaacttcatttctgtgtgatattagcttttgagagaactgcctgggcaggctttacattttcccatcttttggactttaatggctcccattatattttacaactgagatggggtacaattatatgtatatatttttcaaggtagctaaggtgaaaattaaccctattttatcttcacagtttcaaaaattgcaggcaaactgtaatacccatcttttgtcaatttttttattcttatgaagagactgaagtggccagatataaatgtcaactctgaattgaacaggtccattttttaattgcttgatgaaagtattcccccatttagacacaaaaacaatcaaaccagtagagtgcataatcataagaatgggaagcaaaactattacaaagtagaatcttaaatactacctacaccaacttggtccccaaacctatgtgttttgacgatgctacaa

SEQ ID NO: 705005 - DNA, 782 bp, Homo sapiens
aagtcagctccgactccttcaactggctacaagtataaaatctctaaatgagctctatctgtatattaccaataaatactgtgaaaaaagtggttaattatatcataaaccaacataccctatataaaacaataaaagaaataaaaaataaatgcttgaaaaatattaatgctacaacacaatgattaggaaaatacaggtagctttatttgtgctgttcattataagcccgtaatagctgacttgcgttaacaatcctcctctattatgcatttcatacttttgtgtttagccaataccacaaayaagctgtgttctttatgtaaaacttcatttctgtgtgatattagcttttgagagaactgcctgggcaggctttacattttcccatcttttggactttaatggctcccattatattttacaactgagatggggtacaattatatgtatatatttttcaaggtagctaaggtgaaaattaaccctattttatcttcacagtttcaaaaattgcaggcaaactgtaatacccatcttttgtcaatttttttattcttatgaagagactgaagtggccagatataaatgtcaactctgaattgaacaggtccattttttaattgcttgatgaaagtattcccccatttagacacaaaaacaatcaaaccagtagagtgcataatcataagaatgggaagcaaaactattacaaagtagaatcttaaatactacctacaccaacttggtccccaaacctatgtgttttgacgatgctacaa

SEQ ID NO: 705006 - DNA, 782 bp, Homo sapiens
aagtcagctccgactccttcaactggctacaagtataaaatctctaaatgagctctatctgtatattaccaataaatactgtgaaaaaagtggttaattatatcataaaccaacataccctatataaaacaataaaagaaataaaaaataaatgcttgaaaaatattaatgctacaacacaatgattaggaaaatacaggtagctttatttgtgctgttcattataagcccgtaatagctgacttgcgttaacaatcctcctctattatgcatttcatacttttgtgtttagccaataccacaaataagctgtgttctttatgtaaaacttcatttctgtgtgatattagcttttgagagaactgcctgggcaggctttacattttcccatcttttggactttaatggctcccattatattttacaactgagatgkggtacaattatatgtatatatttttcaaggtagctaaggtgaaaattaaccctattttatcttcacagtttcaaaaattgcaggcaaactgtaatacccatcttttgtcaatttttttattcttatgaagagactgaagtggccagatataaatgtcaactctgaattgaacaggtccattttttaattgcttgatgaaagtattcccccatttagacacaaaaacaatcaaaccagtagagtgcataatcataagaatgggaagcaaaactattacaaagtagaatcttaaatactacctacaccaacttggtccccaaacctatgtgttttgacgatgctacaa

SEQ ID NO: 705007 - DNA, 782 bp, Homo sapiens
aagtcagctccgactccttcaactggctacaagtataaaatctctaaatgagctctatctgtatattaccaataaatactgtgaaaaaagtggttaattatatcataaaccaacataccctatataaaacaataaaagaaataaaaaataaatgcttgaaaaatattaatgctacaacacaatgattaggaaaatacaggtagctttatttgtgctgttcattataagcccgtaatagctgacttgcgttaacaatcctcctctattatgcatttcatacttttgtgtttagccaataccacaaataagctgtgttctttatgtaaaacttcatttctgtgtgatattagcttttgagagaactgcctgggcaggctttacattttcccatcttttggactttaatggctcccattatattttacaactgagatggggtacaattatatgtatatatttttcaaggtagctaaggtgaaaattaaccctattttatcttcacagtttcaaaaattgcaggcaaactgtaatacccatcttttgtcaatttttttattcttatgaagagactgaagtggccagatataaatstcaactctgaattgaacaggtccattttttaattgcttgatgaaagtattcccccatttagacacaaaaacaatcaaaccagtagagtgcataatcataagaatgggaagcaaaactattacaaagtagaatcttaaatactacctacaccaacttggtccccaaacctatgtgttttgacgatgctacaa

SEQ ID NO: 705008 - DNA, 656 bp, Homo sapiens
tctgccaccctagacaaggtttgatgtccctgctttgtgctcctgtagcaccctgtatgcttcctctcatcaaactttatcataatcccttatttaaaaggaatatgtctatcttgcctgatgggctataagctacatacggacaagagtctgtcctcagccttgagcactgcctgggaatctaaagggactaagatagcacaagggtcaatgattctttaatggagatccacagtgcctggcactcaaaaatatttgtttttttaaaatgttgaagaaaaaaaggcattggaacaggaatgcttttatctctgtgtgtgtgtgtgtgtgtgtgtgtgtgtgtgtgtgtgtgtrtgtgtttccagctgggcgtggtggctcacgcctgtaattccagcactttgggaggccgagacaggcagatcacgaggtcaggagttcaagaccagcctggtcaacatgatgaaaacccatctctactaaaaatacaaaaattagctgggcatggtggcgtgtgcctgtaatcccagctactcaggaggctgaggcagaagaaaccccagaggcagaggtttcagtgagccaagatcacgccactacactctagcctggggtacagaccaagactctgtctcaaaaaaaaaaaaaaagaaaaa

SEQ ID NO: 705009 - DNA, 656 bp, Homo sapiens
tctgccaccctagacaaggtttgatgtccctgctttgtgctcctgtagcaccctgtatgcttcctctcatcaaactttatcataatcccttatttaaaaggaatatgtctatcttgcctgatgggctataagctacatacggacaagagtctgtcctcagccttgagcactgcctgggaatctaaagggactaagatagcacaagggtcaatgattctttaatggagatccacagtgcctggcactcaaaaatatttgtttttttaaaatgttgaagaaaaaaaggcattggaacaggaatgcttttatctctgtgtgtgtgtgtgtgtgtgtgtgtgtgtgtgtgtgtgtgtgtgtgtttccagctgggcgtggtggctcacgcctgtaattccagcactttgggaggccgagacaggcagatcacgaggtcaggagttcaagaccagcctggtcaacatgatgaaaacccatctctactaaaaatacaaaaattagctgggcatgrtggcgtgtgcctgtaatcccagctactcaggaggctgaggcagaagaaaccccagaggcagaggtttcagtgagccaagatcacgccactacactctagcctggggtacagaccaagactctgtctcaaaaaaaaaaaaaaagaaaaa

SEQ ID NO: 705010 - DNA, 656 bp, Homo sapiens
tctgccaccctagacaaggtttgatgtccctgctttgtgctcctgtagcaccctgtatgcttcctctcatcaaactttatcataatcccttatttaaaaggaatatgtctatcttgcctgatgggctataagctacatacggacaagagtctgtcctcagccttgagcactgcctgggaatctaaagggactaagatagcacaagggtcaatgattctttaatggagatccacagtgcctggcactcaaaaatatttgtttttttaaaatgttgaagaaaaaaaggcattggaacaggaatgcttttatctctgtgtgtgtgtgtgtgtgtgtgtgtgtgtgtgtgtgtgtgtgtgtgtttccagctgggcgtggtggctcacgcctgtaattccagcactttgggaggccgagacaggcagatcacgaggtcaggagttcaagaccagcctggtcaacatgatgaaaacccatctctactaaaaatacaaaaattagctgggcatggtggcgtgtgcctgtaatcccagctactcaggaggctgaggcagaagaaaccccagaggcagaggtttcagtgagccaagatcacgccactacactctagcctggggtacagaccaagactctgtctcaaaaaaaaaaaaaaaraaaaa

SEQ ID NO: 705011 - DNA, 609 bp, Homo sapiens
ttaaagttattgtgattttcagcttcctaaagattctgttatttgtgtggagaagaagtaatattgtaaggtgataggacattgaattttacatttattcaacacaacctagatttggctgcttgttaaggttaaatccgacaagaaaagggacctttcaagccagtctatgaaataagcattattggatgtctcattaccatcagtccctcttcaccaggtcactcataatacctgtagccccagctactgactaggtagtgcttcagttctcttcctctgtgtagggctccacagagtctgtctattttttgacaggaggcatcactcacgatcaagatacactaatgaatctgtgtgtgtttgtttatgtgtgtgcatgtacaacacaggattgggagtcatacaaataatctattgygccttccccttttcccttcctctttgttttgcaattatggtatttgtggcagcacaatcaacctatgttttccatcaaaatattttctaatctaattccttcaagtttcacatattagggaggggatcactcttttaatctctagtgacgatttgaaaatctcccttttacactgtgtgactcattta

SEQ ID NO: 705012 - DNA, 563 bp, Homo sapiens
cactttgaccagaaaagtgagggtggtgatgacaaggctcatataaagagactgtcactcccttttggacaacttagctagatcacagaaagtatccattctccaaataatgagaggctattttagaagtagtgattgcaccaaattgagaaattaattaatgtacggttaaaatttgcaygaagtttcacatacatactaacaatagttttgaattatattactatcaggttggtgcaaaagtaattgcaccaacgcacaattacttcctaataagtgagaaattgagcaaattcttaaagagatatacaagttttgaaaaataatggagtgaaacaaatatatgtgagttccaatgaactaaaagtatcctttgaatcaatagtaggtccaatattatgggtcttttgtcaaatgcatagtttgcaaatattttttgccattctgcaagttgtctcttcactctgtagattaaaagctttttctttaattaagtctcatttatctgtttctagttttttgctttggtttttgaggtatttttcatgtattttttgcctata

SEQ ID NO: 705013 - DNA, 563 bp, Homo sapiens
cactttgaccagaaaagtgagggtggtgatgacaaggctcatataaagagactgtcactcccttttggacaacttagctagatcacagaaagtatccattctccaaataatgagaggctattttagaagtagtgattgcaccaaattgagaaattaattaatgtacggttaaaatttgcatgaartttcacatacatactaacaatagttttgaattatattactatcaggttggtgcaaaagtaattgcaccaacgcacaattacttcctaataagtgagaaattgagcaaattcttaaagagatatacaagttttgaaaaataatggagtgaaacaaatatatgtgagttccaatgaactaaaagtatcctttgaatcaatagtaggtccaatattatgggtcttttgtcaaatgcatagtttgcaaatattttttgccattctgcaagttgtctcttcactctgtagattaaaagctttttctttaattaagtctcatttatctgtttctagttttttgctttggtttttgaggtatttttcatgtattttttgcctata

SEQ ID NO: 705014 - DNA, 1973 bp, Homo sapiens
cactttataagtgtgtyggaagtttgggaaagagcagaacaataaatgtggaattgtcagcttataggtggtgattgaggtaagagaattagattagaattgaagaattattgtattcaataattgtgtgtacatgtagtatataggccttttcccaaggagagggttttaacattccttagattctcaaagggatttgtggcctccaaatagttaaaatccagtggtgtagaatgagaagagggctaggaactgaagtcctggaaacttaagatttggggaatggaaagagacaaagctggcacagagagacaaagcaaaagaggtcagatgggagaagcagcaggaaatacagaatacaaaaaagaacatttcaagaatacagagatgccagtattgccaggtactggtgaagtgtggccctgagagttgaacccagagaggaggtacctgggtggcagtgggttccttggtgaccttggccagagcattttaagctgggagggtggcgggggaaagtggggtagaaaaagtaaatggggactgaggaaatgaacataggcatacagactctttaaggagtttgcctttgaataggaatgaagatacaaaattagagggagtcttggtcaaggagagttttgtttttgctgaactataataaaattagttttcatgacatcttgccccagtattttctttttctttttttttgaaacagggtctcactctgtcacccaggttggagtacagtgagtgactcaatcacagctcactgcagccttggccttctgggctcaggtgattccccaacctcagcctcccagatagctgggactataagcacacaccgccacgcctgactaattttttgtaatttttgcagagaaaggattttgccgtgatgcccaggctggtctcaaactcctgggctcaagcaacctgcttgcctctgcctcccaaagtaatgggattacaggtgtgagccactgtgcctggcccccagtattttctaacctaaccacaatacaagttttatatccagtcgaattgagaaggtcttttatatactctaatgttgagtccattttgtattttaagacttttaatgtgaagtagtaggctatacggactatactcaagggaaagtattgaaaatacagaacagaggaaatgattgatggaacaagtaaccagaaaggtgcataagtggtgagattgggataaagaagtgaaggttgatcagatatgtaaggcaggaggttgagctcaagccttagagcctcgttttatctgaaatggaaggcaaatgcataatcttagagagaatgaaatggggaataggtagtctgaagaaagtaaagatgtggatacaatgttgaagtagtctgtctggtttgtttctcatatatcaaaagtatcctacaattataaatcatttttctttaaataacttatttgtaagttgaatatattatagattcttattttttagatttatgggtcttctgtagcactatttatttatttatttatttatttattgagatagagtttcgctcttgttgcccgggctggagtgcaatggcgtgatcttggctcaccgcaacctctgcctcccaggttcaatcgattatcctgcctcagcctcccgagtagctgggattacaggattactggctaattttgtatttttagtagagacggggtttctccatgttggtcaggctggtcttgaactcctgacctcaggtgatctgcccacctcggcctcccaaagtgctgggattacaggcgtgagccaccacacccggccttctgtagcactttagaaggaagggtttgggaattagagatacgatttcaaaaagagatgtgaatgaggcctaatctgagaaggagagggggtagataggagaaatagcattatgaaagatctggccctttgcgggataggaattcaagtttgcatg

SEQ ID NO: 705015 - DNA, 1973 bp, Homo sapiens
cactttataagtgtgtcggaagtttgggaaagagcagaacaataaatgtggaattgtcagcttatargtggtgattgaggtaagagaattagattagaattgaagaattattgtattcaataattgtgtgtacatgtagtatataggccttttcccaaggagagggttttaacattccttagattctcaaagggatttgtggcctccaaatagttaaaatccagtggtgtagaatgagaagagggctaggaactgaagtcctggaaacttaagatttggggaatggaaagagacaaagctggcacagagagacaaagcaaaagaggtcagatgggagaagcagcaggaaatacagaatacaaaaaagaacatttcaagaatacagagatgccagtattgccaggtactggtgaagtgtggccctgagagttgaacccagagaggaggtacctgggtggcagtgggttccttggtgaccttggccagagcattttaagctgggagggtggcgggggaaagtggggtagaaaaagtaaatggggactgaggaaatgaacataggcatacagactctttaaggagtttgcctttgaataggaatgaagatacaaaattagagggagtcttggtcaaggagagttttgtttttgctgaactataataaaattagttttcatgacatcttgccccagtattttctttttctttttttttgaaacagggtctcactctgtcacccaggttggagtacagtgagtgactcaatcacagctcactgcagccttggccttctgggctcaggtgattccccaacctcagcctcccagatagctgggactataagcacacaccgccacgcctgactaattttttgtaatttttgcagagaaaggattttgccgtgatgcccaggctggtctcaaactcctgggctcaagcaacctgcttgcctctgcctcccaaagtaatgggattacaggtgtgagccactgtgcctggcccccagtattttctaacctaaccacaatacaagttttatatccagtcgaattgagaaggtcttttatatactctaatgttgagtccattttgtattttaagacttttaatgtgaagtagtaggctatacggactatactcaagggaaagtattgaaaatacagaacagaggaaatgattgatggaacaagtaaccagaaaggtgcataagtggtgagattgggataaagaagtgaaggttgatcagatatgtaaggcaggaggttgagctcaagccttagagcctcgttttatctgaaatggaaggcaaatgcataatcttagagagaatgaaatggggaataggtagtctgaagaaagtaaagatgtggatacaatgttgaagtagtctgtctggtttgtttctcatatatcaaaagtatcctacaattataaatcatttttctttaaataacttatttgtaagttgaatatattatagattcttattttttagatttatgggtcttctgtagcactatttatttatttatttatttatttattgagatagagtttcgctcttgttgcccgggctggagtgcaatggcgtgatcttggctcaccgcaacctctgcctcccaggttcaatcgattatcctgcctcagcctcccgagtagctgggattacaggattactggctaattttgtatttttagtagagacggggtttctccatgttggtcaggctggtcttgaactcctgacctcaggtgatctgcccacctcggcctcccaaagtgctgggattacaggcgtgagccaccacacccggccttctgtagcactttagaaggaagggtttgggaattagagatacgatttcaaaaagagatgtgaatgaggcctaatctgagaaggagagggggtagataggagaaatagcattatgaaagatctggccctttgcgggataggaattcaagtttgcatg

SEQ ID NO: 705016 - DNA, 1973 bp, Homo sapiens
cactttataagtgtgtcggaagtttgggaaagagcagaacaataaatgtggaattgtcagcttataggtggtgattgaggtaagagaattagattagaattgaagaawtattgtattcaataattgtgtgtacatgtagtatataggccttttcccaaggagagggttttaacattccttagattctcaaagggatttgtggcctccaaatagttaaaatccagtggtgtagaatgagaagagggctaggaactgaagtcctggaaacttaagatttggggaatggaaagagacaaagctggcacagagagacaaagcaaaagaggtcagatgggagaagcagcaggaaatacagaatacaaaaaagaacatttcaagaatacagagatgccagtattgccaggtactggtgaagtgtggccctgagagttgaacccagagaggaggtacctgggtggcagtgggttccttggtgaccttggccagagcattttaagctgggagggtggcgggggaaagtggggtagaaaaagtaaatggggactgaggaaatgaacataggcatacagactctttaaggagtttgcctttgaataggaatgaagatacaaaattagagggagtcttggtcaaggagagttttgtttttgctgaactataataaaattagttttcatgacatcttgccccagtattttctttttctttttttttgaaacagggtctcactctgtcacccaggttggagtacagtgagtgactcaatcacagctcactgcagccttggccttctgggctcaggtgattccccaacctcagcctcccagatagctgggactataagcacacaccgccacgcctgactaattttttgtaatttttgcagagaaaggattttgccgtgatgcccaggctggtctcaaactcctgggctcaagcaacctgcttgcctctgcctcccaaagtaatgggattacaggtgtgagccactgtgcctggcccccagtattttctaacctaaccacaatacaagttttatatccagtcgaattgagaaggtcttttatatactctaatgttgagtccattttgtattttaagacttttaatgtgaagtagtaggctatacggactatactcaagggaaagtattgaaaatacagaacagaggaaatgattgatggaacaagtaaccagaaaggtgcataagtggtgagattgggataaagaagtgaaggttgatcagatatgtaaggcaggaggttgagctcaagccttagagcctcgttttatctgaaatggaaggcaaatgcataatcttagagagaatgaaatggggaataggtagtctgaagaaagtaaagatgtggatacaatgttgaagtagtctgtctggtttgtttctcatatatcaaaagtatcctacaattataaatcatttttctttaaataacttatttgtaagttgaatatattatagattcttattttttagatttatgggtcttctgtagcactatttatttatttatttatttatttattgagatagagtttcgctcttgttgcccgggctggagtgcaatggcgtgatcttggctcaccgcaacctctgcctcccaggttcaatcgattatcctgcctcagcctcccgagtagctgggattacaggattactggctaattttgtatttttagtagagacggggtttctccatgttggtcaggctggtcttgaactcctgacctcaggtgatctgcccacctcggcctcccaaagtgctgggattacaggcgtgagccaccacacccggccttctgtagcactttagaaggaagggtttgggaattagagatacgatttcaaaaagagatgtgaatgaggcctaatctgagaaggagagggggtagataggagaaatagcattatgaaagatctggccctttgcgggataggaattcaagtttgcatg

SEQ ID NO: 705017 - DNA, 1973 bp, Homo sapiens
cactttataagtgtgtcggaagtttgggaaagagcagaacaataaatgtggaattgtcagcttataggtggtgattgaggtaagagaattagattagaattgaagaattattgtattcaataattgtgtgtacatgtagyatataggccttttcccaaggagagggttttaacattccttagattctcaaagggatttgtggcctccaaatagttaaaatccagtggtgtagaatgagaagagggctaggaactgaagtcctggaaacttaagatttggggaatggaaagagacaaagctggcacagagagacaaagcaaaagaggtcagatgggagaagcagcaggaaatacagaatacaaaaaagaacatttcaagaatacagagatgccagtattgccaggtactggtgaagtgtggccctgagagttgaacccagagaggaggtacctgggtggcagtgggttccttggtgaccttggccagagcattttaagctgggagggtggcgggggaaagtggggtagaaaaagtaaatggggactgaggaaatgaacataggcatacagactctttaaggagtttgcctttgaataggaatgaagatacaaaattagagggagtcttggtcaaggagagttttgtttttgctgaactataataaaattagttttcatgacatcttgccccagtattttctttttctttttttttgaaacagggtctcactctgtcacccaggttggagtacagtgagtgactcaatcacagctcactgcagccttggccttctgggctcaggtgattccccaacctcagcctcccagatagctgggactataagcacacaccgccacgcctgactaattttttgtaatttttgcagagaaaggattttgccgtgatgcccaggctggtctcaaactcctgggctcaagcaacctgcttgcctctgcctcccaaagtaatgggattacaggtgtgagccactgtgcctggcccccagtattttctaacctaaccacaatacaagttttatatccagtcgaattgagaaggtcttttatatactctaatgttgagtccattttgtattttaagacttttaatgtgaagtagtaggctatacggactatactcaagggaaagtattgaaaatacagaacagaggaaatgattgatggaacaagtaaccagaaaggtgcataagtggtgagattgggataaagaagtgaaggttgatcagatatgtaaggcaggaggttgagctcaagccttagagcctcgttttatctgaaatggaaggcaaatgcataatcttagagagaatgaaatggggaataggtagtctgaagaaagtaaagatgtggatacaatgttgaagtagtctgtctggtttgtttctcatatatcaaaagtatcctacaattataaatcatttttctttaaataacttatttgtaagttgaatatattatagattcttattttttagatttatgggtcttctgtagcactatttatttatttatttatttatttattgagatagagtttcgctcttgttgcccgggctggagtgcaatggcgtgatcttggctcaccgcaacctctgcctcccaggttcaatcgattatcctgcctcagcctcccgagtagctgggattacaggattactggctaattttgtatttttagtagagacggggtttctccatgttggtcaggctggtcttgaactcctgacctcaggtgatctgcccacctcggcctcccaaagtgctgggattacaggcgtgagccaccacacccggccttctgtagcactttagaaggaagggtttgggaattagagatacgatttcaaaaagagatgtgaatgaggcctaatctgagaaggagagggggtagataggagaaatagcattatgaaagatctggccctttgcgggataggaattcaagtttgcatg

SEQ ID NO: 705018 - DNA, 1973 bp, Homo sapiens
cactttataagtgtgtcggaagtttgggaaagagcagaacaataaatgtggaattgtcagcttataggtggtgattgaggtaagagaattagattagaattgaagaattattgtattcaataattgtgtgtacatgtagtatatargccttttcccaaggagagggttttaacattccttagattctcaaagggatttgtggcctccaaatagttaaaatccagtggtgtagaatgagaagagggctaggaactgaagtcctggaaacttaagatttggggaatggaaagagacaaagctggcacagagagacaaagcaaaagaggtcagatgggagaagcagcaggaaatacagaatacaaaaaagaacatttcaagaatacagagatgccagtattgccaggtactggtgaagtgtggccctgagagttgaacccagagaggaggtacctgggtggcagtgggttccttggtgaccttggccagagcattttaagctgggagggtggcgggggaaagtggggtagaaaaagtaaatggggactgaggaaatgaacataggcatacagactctttaaggagtttgcctttgaataggaatgaagatacaaaattagagggagtcttggtcaaggagagttttgtttttgctgaactataataaaattagttttcatgacatcttgccccagtattttctttttctttttttttgaaacagggtctcactctgtcacccaggttggagtacagtgagtgactcaatcacagctcactgcagccttggccttctgggctcaggtgattccccaacctcagcctcccagatagctgggactataagcacacaccgccacgcctgactaattttttgtaatttttgcagagaaaggattttgccgtgatgcccaggctggtctcaaactcctgggctcaagcaacctgcttgcctctgcctcccaaagtaatgggattacaggtgtgagccactgtgcctggcccccagtattttctaacctaaccacaatacaagttttatatccagtcgaattgagaaggtcttttatatactctaatgttgagtccattttgtattttaagacttttaatgtgaagtagtaggctatacggactatactcaagggaaagtattgaaaatacagaacagaggaaatgattgatggaacaagtaaccagaaaggtgcataagtggtgagattgggataaagaagtgaaggttgatcagatatgtaaggcaggaggttgagctcaagccttagagcctcgttttatctgaaatggaaggcaaatgcataatcttagagagaatgaaatggggaataggtagtctgaagaaagtaaagatgtggatacaatgttgaagtagtctgtctggtttgtttctcatatatcaaaagtatcctacaattataaatcatttttctttaaataacttatttgtaagttgaatatattatagattcttattttttagatttatgggtcttctgtagcactatttatttatttatttatttatttattgagatagagtttcgctcttgttgcccgggctggagtgcaatggcgtgatcttggctcaccgcaacctctgcctcccaggttcaatcgattatcctgcctcagcctcccgagtagctgggattacaggattactggctaattttgtatttttagtagagacggggtttctccatgttggtcaggctggtcttgaactcctgacctcaggtgatctgcccacctcggcctcccaaagtgctgggattacaggcgtgagccaccacacccggccttctgtagcactttagaaggaagggtttgggaattagagatacgatttcaaaaagagatgtgaatgaggcctaatctgagaaggagagggggtagataggagaaatagcattatgaaagatctggccctttgcgggataggaattcaagtttgcatg

SEQ ID NO: 705019 - DNA, 1973 bp, Homo sapiens
cactttataagtgtgtcggaagtttgggaaagagcagaacaataaatgtggaattgtcagcttataggtggtgattgaggtaagagaattagattagaattgaagaattattgtattcaataattgtgtgtacatgtagtatataggccttytcccaaggagagggttttaacattccttagattctcaaagggatttgtggcctccaaatagttaaaatccagtggtgtagaatgagaagagggctaggaactgaagtcctggaaacttaagatttggggaatggaaagagacaaagctggcacagagagacaaagcaaaagaggtcagatgggagaagcagcaggaaatacagaatacaaaaaagaacatttcaagaatacagagatgccagtattgccaggtactggtgaagtgtggccctgagagttgaacccagagaggaggtacctgggtggcagtgggttccttggtgaccttggccagagcattttaagctgggagggtggcgggggaaagtggggtagaaaaagtaaatggggactgaggaaatgaacataggcatacagactctttaaggagtttgcctttgaataggaatgaagatacaaaattagagggagtcttggtcaaggagagttttgtttttgctgaactataataaaattagttttcatgacatcttgccccagtattttctttttctttttttttgaaacagggtctcactctgtcacccaggttggagtacagtgagtgactcaatcacagctcactgcagccttggccttctgggctcaggtgattccccaacctcagcctcccagatagctgggactataagcacacaccgccacgcctgactaattttttgtaatttttgcagagaaaggattttgccgtgatgcccaggctggtctcaaactcctgggctcaagcaacctgcttgcctctgcctcccaaagtaatgggattacaggtgtgagccactgtgcctggcccccagtattttctaacctaaccacaatacaagttttatatccagtcgaattgagaaggtcttttatatactctaatgttgagtccattttgtattttaagacttttaatgtgaagtagtaggctatacggactatactcaagggaaagtattgaaaatacagaacagaggaaatgattgatggaacaagtaaccagaaaggtgcataagtggtgagattgggataaagaagtgaaggttgatcagatatgtaaggcaggaggttgagctcaagccttagagcctcgttttatctgaaatggaaggcaaatgcataatcttagagagaatgaaatggggaataggtagtctgaagaaagtaaagatgtggatacaatgttgaagtagtctgtctggtttgtttctcatatatcaaaagtatcctacaattataaatcatttttctttaaataacttatttgtaagttgaatatattatagattcttattttttagatttatgggtcttctgtagcactatttatttatttatttatttatttattgagatagagtttcgctcttgttgcccgggctggagtgcaatggcgtgatcttggctcaccgcaacctctgcctcccaggttcaatcgattatcctgcctcagcctcccgagtagctgggattacaggattactggctaattttgtatttttagtagagacggggtttctccatgttggtcaggctggtcttgaactcctgacctcaggtgatctgcccacctcggcctcccaaagtgctgggattacaggcgtgagccaccacacccggccttctgtagcactttagaaggaagggtttgggaattagagatacgatttcaaaaagagatgtgaatgaggcctaatctgagaaggagagggggtagataggagaaatagcattatgaaagatctggccctttgcgggataggaattcaagtttgcatg

SEQ ID NO: 705020 - DNA, 644 bp, Homo sapiens
caccatagttctgcacatatcataggtatacacataataagtatgtgagagtgctacacacgcagtagatatagaagaaaagataacagtgtataattatgaacataattctagagaaaggaactaacactcacatagcacctttcatgtgtcaagagttgtgttattaggttgggacaggacagcatcaaattgatctcaaagtgtgtgatgattcaaacaaaacagacattaatttgtcacttatctaacaatgcaagtggatgttcctggttggcagctagcttccatacatgtggtgattctgagacccaggatccttctgtcttgtggtttggtcaccctcatcatcacatatattccactgacaaagagaggatgaagaggcacccctgcttctgggaaatattggtctaaaagtgacatataaatcactttgttctcagcccaataatgaaaactactcactcacatgggtacagcttattgtaagggagagctaggaaatgtagttgaagctgaacagtcacctctcaaaaatgactctatatcaagaaaggacaacaaaatgttagtgggcagttaactgtccctgctacagtgacttcaaccatattasgccatttaaacctatgacgttggta

SEQ ID NO: 705021 - DNA, 654 bp, Homo sapiens
ttgtatgaatactgtttggaagaacatgaaaaaagtggatagaaggtacaggaaggatgaaaagactcagcaaacactcaaaagcaggcaaatgaaagctagattcagtgaaaatgatcatgtccggcccggcgcggtggctcacgcccgtaatcccagcactttgggaggctgaggcgggcggatcacgaggtcaggatatcgtcctggctaacacggtgaaatcccatgtctactaaaaatacaaaaatattagccgggcgtagtggcgggcacctgtagtcccagctactcggggaggctgaggcaggagaatggcgtgaacccgggaggcggagcttgcagtgagccgagattgagccactgcactccagcctgggcgacaaagccagactccgtctcaaaaaaaaaaaaaaaagaaaatgatcacatcactttgtctgtcacagaggwgtgcttaataaagaagagactggccaggaatgaacagaaaagatgtgaaacttatagcaatgaaaagtgaagttttatcagccagcaaatgaataaaggtatctctgtgaaggccttcccaaccagaagttactatgtttattttccctaaaaccagaaagaaaggaaaatataactctagaagtatacagaaataaatta

SEQ ID NO: 705022 - DNA, 1110 bp, Homo sapiens
actcctattcttctaatcatccattttttgtttttttgtttttgcttcctctatagaaaagtagtgtttcttttttatttgataagttcttccagcccaggatggctttcacaaaaaccttcttttctagaatctccttgagccttatggtttgaatttggcctctttaacccgaggttctgattttgaatctgggtcttatcttcttggtgaggtagataaggatgtgatcgattggggtaaaggcaaatttaatcatatcaaagctaagcaagtgccacagtaaaatgagaccataaacaataggaggagtaggggtgaggggagacggggagttgtagtagagtaatagatggaagtgaagaaagagggcgaggaagaggtaaagggcaggaagaggagagacagaagtgagagaggagagggtatggctatggttgattaattgaggaaggctgttgcagaactcattacacttgaacttctgggaggctactgatagtataatgccccacatctcaacagatatgctcagtttaaagatatcctcttcccactccaacttattgtcagtcattcaccttcacctttgatgtatctagttgctgtgcccttcaagtgaatcttctcaaactaaatgtagctggtgtttgggggagtataatgcttgcagggttccctcagccagaagaaatcctcacttccaaatataggaattgcccttaattttctctttcttggactgagagcccctgggtttatatttcctccctgatattgctccttggtagtttcacccttgagattttattgggtaatcctcccccaagactcttacaattgactcaatttcaaacattttagtagagttgtaatgccctccaagtgcaaattgagttgartgagcagaatgaatgttgatgtggttattgagggaagtggctataggagtgggggtgggacaaggtctctgagctgagaacagcctttacgaccaggtccttgagcagaaatagtggtagaagcccagttggtggtgaaaatccttagttacagctgagctgcagaaaatggagaccagcaaaacaactgagcagccctcctaagcag

SEQ ID NO: 705023 - DNA, 2161 bp, Homo sapiens
tgcatgatcattgcaatgtactgaatgtttgtctcactttcaaattcatatgttgaaaccctaatcccaatgtattaggaggacgggactttgggagataattagtttatggagctcccattaattggattagtgtccttataagaagtggtcagtgatctctctttttctttgcactaagtgaggatacagcaagaggtcagccatctgcaacctggaagagagcccttgccagaacctggccatatgagcaccctgatctcagacttcaagcctccagcactatgagaaataaatttctgttgtttgtaaaccaaccagtctatggtaatttgttatgcagcctgaactgattaagaaataacttcattaaatatttcagaagaataagtatcatatctgtggcaactgaacctctgttgttattttccaccttcttcttccctgactctttgcacacaggaagatgtttcaggaccatccgagttcatatgggtcatatgatgtgttttggtgacacggtgtagtggtgccggtcacctagcttgacttagcttgggtctaagtgctaccttccctatatcttgacagtggctactgctgaatcaacaggtgtgacagtgtaaatggcctaggaggggtggaaggaccttgcacttggccagttcaacaaacagtttgtgtgcagtagtgtaatgtccccttattcacacgtcgggaatccttctatgctccttgggggggcagacctctttctattttccgcgaggactgtggtcagtctgcagaagtccagcactttgtttctcagtccatccctactgatgaggcagcctagactatggggcatggtcttttcttatcgttagttacactattattaccaatatatagtcctttccattatgttggagaccttacgagaaattggaaagaggggtttcaggtactgctagtctaccttgtgatgccttatccgtcatcattggttttattactataataatggaaacatttacaatcttaatgccaatatgtcacttggaggcccaggtctagtgccccaactgtctcccctatagtgaagtcggctagtcaaactccacagacacacacagagcatccaggcagctgtcttggtggtgggaaagacctgacagggatagaacagcaggaaaaactctggctggtcacctggtctcccattaagtataaatgcacaatcaaaaatcatgcattttggatgtaattatccttttaacaacaagactaaataaacagttggcagaagctaggaagtagaatgttcgaggaggagaagaagggtggagctgctaatatatttccctcacatgatagggagttaagagataccagtgtgaaccaagggataaagatataaatttataaaacaacataaatgattggtttgaaataaactttaaattgtactgaacatttagttaattttcctctgctaaacmgtggtaggaaattgtagtaggaagatcagattaattatagacaaaataaataaattagatttcctcattaaatccaaattatagtataaattaagtactaccctgctatatgataattttttaatagacacaaacaaaaccatgtcaatatttccagtcaccaacagaaaatggaagcagttttgagcaggcattttagctttcactattctgaaatatgttagctatagactctgtttgctgagtgtagtgatgtttgtaaaatttttaatatataatctttaatacaatcatgtctgaaagtacaaaagcagagtattacatttgctagtgagaaaaggctgatgattatgatgaaaatgaaaatcaagataattttacacattcaaaacaatgataaaatgccaaattccacatgtaaatatgaaataaattgttcaataagagactgttcctcatgaacaaagtcaatcatgcaaaatgtataaagtgctgtgctcatgcaattgacaataacgaacaggaaatgaataagagtcacagatgaattagaaaattttaagagctgtcatgttagaatattgtcaataacaagactgatgtgcttctctggagtaggctctttaaaaaattccttataataagatatgttggtaattaggccctcaaaggaaaaa

SEQ ID NO: 705024 - DNA, 505 bp, Homo sapiens
ttttagcagagacagggtttcactgtgttagccaggatggtatccatctcatgtcttcgtgatccacccaccttggactcccaaatgctgggatttcaggcgtgagccactgtgcccggccaggagaaatggtgttttcttttcattctcttaactgcccatgtattagtaccctttggttgacatcgtccattataaaatgaagattagagttccaggactcgcagctgttgttaggaagcccaatagtgaaaccgaattcattgtggggaaactttcacaattctgaaagttggagatctcagcttttataggctgtaaagccagtatggctgygtgcctgcactggtgccctctctggtggagatggtctgatgagccttcagccccgggcaggcttttgtttcctgcaggctccaacaaccacattttctttgaatgtagatgaggctgctgtgaagagaggtcatgagtgtctgaaatattttgttgtttttggcatctt

SEQ ID NO: 705025 - DNA, 1204 bp, Homo sapiens
agggaaggacttttacaagttgaggtggtgcttccaacttctcactcacaggtcctttgatgctcttttttgcggggaggagtccatggagttaaggagacaaacattggtccatgtagtggatttgtcttgtgttaacttagctaagctaaaactatgttttccaaaattccctgtctcatagtcctgggttaatatgggccacccttgttcttcatcttttgcatgcaatttggaaggaagtagcagggatattttgcttctttgctgatgtaggaggcaagacgctagtgctgcatggtatggcttgtcatttgtcactggcccaccttgtaggcccccttttggcctgactgtcaggctggttggtggatgatgtgatgcgkttggaggcttggaggtactgagagaaaggtgcctttccattctgtcctcttggtttccagctcctcttcacagtttccattacagaagaagtgtgtacttattatggaaagttttgagcatacagaaaagtaatttaaaaaatttgtaattctaatgccccatcaaacttctctttttttatatattatcttgtcaatcgcaagtatatttacacctgtttattaatataatacataaaatatgaaactaaaaatgtatgtttacctattaaaggtatacatttaatattatataaaatatataaaatgagactatacacaaataagtatatgtatagtattttaaaagcaaatatggagttatattaaacatagatttttaatttgaacttttctcattgcaatttactactagcacttctttatacttgagagcatttttttctttttgatggatcagaaatatatatatatatatatgcatagagagatatagttttgataatttcacaacttattatttgtaaagtcaaataaattgatagaattgttgccagtttgggaaaacctcaatcatggatctttcatatatgaattgtgagatttcaagttttattctgcaaagatttatattctctatttgtttaagcataaaatacattattattagctatattcactatactatgcattaggtcatcagaacttattcattgtaaaactacaagtttgtcctctttgaccaacagcgagagtatgttttgaataatcataaactgcttcatcttttatttacccattcatctactgtgtacata

SEQ ID NO: 705026 - DNA, 621 bp, Homo sapiens
attcaatgtaaaaagtgatttgaatgaaccataacaaaaagtttcaacagactggttttggagacaagatgttctatttttttttttatttgttacaggtaaatacttaaaagcagggtaaagtgttatatagatggttagacttggtgacctttaataatttcaacctgatatctcattcttcccatagtttatagacatttcatccatggctttggctattaytcctttgtctccaaatgattttctccaggtctaactatctatctctccctatgatcatctccggccagatagtgagtcttaaactcaacatgttgcaaactgagcttgtcatttctcccagcaaatccatattcttcttgaattccgtgtctcagtgagcagcactgctttgctctttaaccagtttttagattagttattttagatgaaccctttttccaacttccttctgccatccaactagccagaaagtcttactagttatactttgaaatagctctagattttattctcttttcttttcaccagttgccactgcttagcttgggttgtcattatccctttcctctactgttgctatggtaccagaactattttctgcatagtcatactgtc

SEQ ID NO: 705027 - DNA, 1284 bp, Homo sapiens
taatctcttttaaaggcaaaggctgatggttactttttctttaataagaatcttgatttttcattttgtatatttgatatttatcattttaagaaaaaaaaatcctctatacatagttgttagaaatttatgtagaatggatgttggaacccaatcataaggctgtaaaaccataaaataagtagtaataaattttaaaaaatgaataggatttgtatgaagaaaataacaacacttcattctaggatcaaacaaatgaagagagagctatttttcagaatgaaaaaccaaatagtgttgmatgtagactctattcaaagttctagtctgtaaaattaatagcaattctagtcaaaatagctgttttatcttttgagaagttcgggaagtttgacaatctgattgtcaaatatatgttgtagagtatgttaatgaaactatccagtgtaaaatttaaaaataaagaccagtattgttatattgtactgtattgcttgctatactgtagtggtgtagtaattaaaacaccattctagtgatacaggaatagggtccaaataaataaaaactgagaaggaaattgtatacacatgcaagtgtgtgtgtgcacacacacacacaacacagaaagggtttttttttgttttttgtttttgttttttggagacagggtctcactttgttgcccaggctggagtgcagtggcatgatcatggctcattgcagccttgacctcccaggctcaagcaatcttcccaccttagccttgtgagtagctgggactatgtgtgccactgtttccaactaatttttgtactttttgtagagactgggtttttcatgttccctaggctggtcttggactcctgggctcaagtgatccttcacctcagcctcccaaagagctgggattacaggtgttagccaccacgcccagcctcaaaaagctttttttttttttccctataaagagccatatatctaaaaagggaaacagatttgactctattacaatggaattctgtgagagaaaacattttaacaagatcagactatctagtagaaaaatatttgtaacatatagcaaagttttaacaaacataataaagaccttctaaaaattaataaaattgaaaaaatgggttatgaataagtacaaataattcaaagagtgtacacaaattagttttcatagaaatatgcataaagatatatgtacaagtatgttaattttagcattatttataataccaaataataatattccaacaaaatagttggaat

SEQ ID NO: 705028 - DNA, 985 bp, Homo sapiens
ctgtcacccaggctggagtgcaatggtgcgatctcggctcactgtagtctctccctcctgggctcaagggattctccagcctcagcctcctggctagctgggatcaaaggcgtgcatcaccatacccagctaatttcatatttttggtagagacggggttttgtcatgttggccaggcagattttgaactcctggcctcaagtgatctgcctacctcagactcccaaagtgctgggattacaggcgtgagccactgcacctggcctgtcttttttatgctatgtccacgtgcaacagcccagtggtcagcacacaaatgggtccaaatgtgaaaggaaagggcaaacacaggggaaacataggggtgttcagaaatagttcccaggtcactgcctgtttcaatatgtacagtcctcggccccacccacaagattctgacttggcaggtcagagttggagatgggaagctacctggttatgagggatcccagtgcattttgaggcagctggttgttagactgcattgtaaaaattactccccaaagatgtgaagtgaaacagaaaggcaaaggcaggctagaaaacaacacaagtaaaacatgaacaagttcattccagaaggagattytcaaccacagctgcacatcagaatcagctggggagattttgcaaacccagtgcccaggctctgcaacccagatcaattattacagaatctcttggggatgaaacatgggcatcagtattttgtgtgtgtttgtgtgttgttttttttttttttttttttttgagatggaatcttgttctgtcacccaggctggaatgctgtggtgcaatctcagctcactgcaacctctgcctcccgggttcaacccattttcctacctcagccttccgagtagctgggattataggcatgcaccgccacgcctggctaatttttgtatttttaatagaaatagggtttcaccatattgggcaggca

SEQ ID NO: 705029 - DNA, 985 bp, Homo sapiens
ctgtcacccaggctggagtgcaatggtgcgatctcggctcactgtagtctctccctcctgggctcaagggattctccagcctcagcctcctggctagctgggatcaaaggcgtgcatcaccatacccagctaatttcatatttttggtagagacggggttttgtcatgttggccaggcagattttgaactcctggcctcaagtgatctgcctacctcagactcccaaagtgctgggattacaggcgtgagccactgcacctggcctgtcttttttatgctatgtccacgtgcaacagcccagtggtcagcacacaaatgggtccaaatgtgaaaggaaagggcaaacacaggggaaacataggggtgttcagaaatagttcccaggtcactgcctgtttcaatatgtacagtcctcggccccacccacaagattctgacttggcaggtcagagttggagatgggaagctacctggttatgagggatcccagtgcattttgaggcagctggttgttagactgcattgtaaaaattactccccaaagatgtgaagtgaaacagaaaggcaaaggcaggctagaaaacaacacaagtaaaacatgaacaagttcattccagaaggagattctcaaccacagctgcacatcagaatcagctggggagattttgcaaacccagtgcccaggctctgcaacccagatcaattattacagaatctcttggggatgaaacatrggcatcagtattttgtgtgtgtttgtgtgttgttttttttttttttttttttttgagatggaatcttgttctgtcacccaggctggaatgctgtggtgcaatctcagctcactgcaacctctgcctcccgggttcaacccattttcctacctcagccttccgagtagctgggattataggcatgcaccgccacgcctggctaatttttgtatttttaatagaaatagggtttcaccatattgggcaggca

SEQ ID NO: 705030 - DNA, 985 bp, Homo sapiens
ctgtcacccaggctggagtgcaatggtgcgatctcggctcactgtagtctctccctcctgggctcaagggattctccagcctcagcctcctggctagctgggatcaaaggcgtgcatcaccatacccagctaatttcatatttttggtagagacggggttttgtcatgttggccaggcagattttgaactcctggcctcaagtgatctgcctacctcagactcccaaagtgctgggattacaggcgtgagccactgcacctggcctgtcttttttatgctatgtccacgtgcaacagcccagtggtcagcacacaaatgggtccaaatgtgaaaggaaagggcaaacacaggggaaacataggggtgttcagaaatagttcccaggtcactgcctgtttcaatatgtacagtcctcggccccacccacaagattctgacttggcaggtcagagttggagatgggaagctacctggttatgagggatcccagtgcattttgaggcagctggttgttagactgcattgtaaaaattactccccaaagatgtgaagtgaaacagaaaggcaaaggcaggctagaaaacaacacaagtaaaacatgaacaagttcattccagaaggagattctcaaccacagctgcacatcagaatcagctggggagattttgcaaacccagtgcccaggctctgcaacccagatcaattattacagaatctcttggggatgaaacatgggcatcagtattttgtgtgtgtttgtgtgttkttttttttttttttttttttttgagatggaatcttgttctgtcacccaggctggaatgctgtggtgcaatctcagctcactgcaacctctgcctcccgggttcaacccattttcctacctcagccttccgagtagctgggattataggcatgcaccgccacgcctggctaatttttgtatttttaatagaaatagggtttcaccatattgggcaggca

SEQ ID NO: 705031 - DNA, 628 bp, Homo sapiens
cagctaatttttgtgtttttagtagagacagggtttcacagcctgttacccaggctggtctcgaactccagacctcaggtgatacccccacctcagtgtctcaaaatgctgggattacaggaatgagccactgttcccggcccactccctgctatttttagttctatttttatttttatttttatttttatttgagacggagtttcactcttgttgcttaggctggatggagtgccaaggccccgtctcggctaactgcaacctccgcctcccagttcaagcaattctcctgcctcagcctcccgagtagctgtgattacaggcgcctgccaccacgcccggctaatttttgtatttttagtagagatgaggtttcaccatgtmggtcaggctggtctcaaactccctacctcagacaatccactcgcctcggcctcccaaagtgctgggattacaggcgggagccaccgcgcccggcctttagttctatttttcaaaaatgtttagcaactgggacttgctagactgagccaccatcttttgggagcagcgcctgaggagcctgctccccttcaggccataaagggagacagacccatcatctggagaacagggtaccaaacagccc

SEQ ID NO: 705032 - DNA, 818 bp, Homo sapiens
taggatttaaatttggttttggaacttgacaaaagtctcttaagttgatgagaaagaattatgccaataaaagcaaaagcaataatagtgaataagagtttaataaatattaaaacacattgtaaatattctgtgacataaagttggatgctgacatagaaaccagtgagatctaataaaaaatgcagacacaaatcacaattcatgtgaaaatttaatgtatgataagcgtgatattttcaaaagtgcttccacaatggacggtacgtctgaaaagaaaagaaagttggaatgctaccttgaactataagtaaaagaaaaaattcagataaattgagaacttgaaaaagacaactgaaaagaagctctgagactgtatgtacaaaaattgagaaaggagaagacctttatcaagacagaaaattaagaaactataaaagctataaaatgataatatttttctacaaaatgatataaactagtgtatgacaaatatttactatataaaatcctagttaaattatacacatttgaattatacatgacagagaaaatagtaatatttaacatgagaccacttaaaaattcacatgaaaaactaatgaaaacaagcaaaactcacaaaatagtaaacccaaataaccaataaatgtgtccctaaaccaaccagtagtcagataaatgaaaagtatgatgccaataaaattttacatatagttcaattggcacaaattaaggcaataatcrgtgttgcttgttggaatatgggaaaaataaccttctcttaatttgctggtgaacatatgacagtctttgaa

SEQ ID NO: 705033 - DNA, 1943 bp, Homo sapiens
ataaataaaatgtatgtacttatttattacatatatgtgtgtgtctcatatatctaatggaacactgttaaaataaaattaatgataagtaattaataaaaactaacaaaaatttaagagagaattattagttttagacaaataaaatatacaaaaaaatgtaattgctggttctatgttgagcagtattttcaaagtcttagtaatatgaacaatgctggtgaaatgacaaggtttaaaatttgtttaaaataattgagaggaggaagagacagtgtgggaataattaaacacgaatgagaagactgatggttgttgaagctagatgaagactaaatggkcattctttatatcattctgtctgttttgtttgcataagaaaattgccaaaatgaaaagtttcaattataacatctcattgtaaacaatgatttctgatgtaataaaattggactacattagatagatttggggggagcagaaaaatgtatctggggaaattcattaaaaacaaaccaaataatcacttgcctcaagaaatataagtatgacaattacagctagatagaaggaataagttctcatgttctaaaccactctaagatgactatagttaacaataatatattatacagtttcaaatagccagaaggatattgaacattcccaatacaaaaaaaaaagatagatgtttgagatgatagatttgctaactaccctggtcacattatatgtatcaaaacatcactacgtatcccatgaatatgtaaaattatttgtcaatttaaaaagagaaaattaaatttaaaaaaagaaaaaatatatatatgttcatattaaatagaaatacaaatgtaaattcagaagacactataggaaagacaggtgggaagaagaagggacaagaacttcctttttgtgaaagaaatgttaatactatttaatttttaaaatttttatcaaattattactttgataaatattaacaaaattcttcatcctcaagatattttttatgatgacatataatttgaatatattttccctttatctatggaatgaaatgaaaagacttcagagctgacatttgaattttaaaaagcattaattggaaatgggaattcagtcttgttccattgcaaggttttgctatatgcactgccctctagtgtcactttgtgggacaagcatcttgaatttcataaactagaaatttaactaaatcttcaaatgccatattctctcttcttggatcttccatctcctccatgtggtcatatcctattaggatatgacctacgacccagaattcagggcaaggctactagttttataggatggttcgttatggattcaaaaggttttaatgggagggccttggaacctgatcttgattaatggggaaatgtgtctgagttctaaacaaatgtttattcgcttgagggaaagaacccatctgtttgtctttgactccttgagagtactgtacatgcctcgaatcaaatgcagtgctggacagaagtctgatatgcggtggatgctcaaaggaacattaagtgagtctggcaatgactgttcagaactcgttttgttatttggaggcagtctgaagtattcttttaagcatgaaatgccataaaggagagtgatcattgtcatcattaataactgcccaagccaaatctctaatgaatatggacaaatcaacacagattatagaatctaaatcatttctggaggggaaaatggagagattaatgggtgaaaggcccaccttgatgccttccatcacctcctaaaaggaaaaaagaacaaactttttaggccaacttccctagatcaaatggtttttgtctaaaaaaaaaacaaccacacagaaaacaaaaacaaaaacaaaaacaaaaacaaaaaaaaaccctgcttttccctcacagtcttttctt

SEQ ID NO: 705034 - DNA, 1943 bp, Homo sapiens
ataaataaaatgtatgtacttatttattacatatatgtgtgtgtctcatatatctaatggaacactgttaaaataaaattaatgataagtaattaataaaaactaacaaaaatttaagagagaattattagttttagacaaataaaatatacaaaaaaatgtaattgctggttctatgttgagcagtattttcaaagtcttagtaatatgaacaatgctggtgaaatgacaaggtttaaaatttgtttaaaataattgagaggaggaagagacagtgtgggaataattaaacacgaatgagaagactgatggttgttgaagctagatgaagactaaatgggcattctttatatcattctgtctgttttgtttgcataagaaaattgccaaaatgaaaagtttcaattataacatctcattgtaaacaatgatttctgatgtaataaaattggastacattagatagatttggggggagcagaaaaatgtatctggggaaattcattaaaaacaaaccaaataatcacttgcctcaagaaatataagtatgacaattacagctagatagaaggaataagttctcatgttctaaaccactctaagatgactatagttaacaataatatattatacagtttcaaatagccagaaggatattgaacattcccaatacaaaaaaaaaagatagatgtttgagatgatagatttgctaactaccctggtcacattatatgtatcaaaacatcactacgtatcccatgaatatgtaaaattatttgtcaatttaaaaagagaaaattaaatttaaaaaaagaaaaaatatatatatgttcatattaaatagaaatacaaatgtaaattcagaagacactataggaaagacaggtgggaagaagaagggacaagaacttcctttttgtgaaagaaatgttaatactatttaatttttaaaatttttatcaaattattactttgataaatattaacaaaattcttcatcctcaagatattttttatgatgacatataatttgaatatattttccctttatctatggaatgaaatgaaaagacttcagagctgacatttgaattttaaaaagcattaattggaaatgggaattcagtcttgttccattgcaaggttttgctatatgcactgccctctagtgtcactttgtgggacaagcatcttgaatttcataaactagaaatttaactaaatcttcaaatgccatattctctcttcttggatcttccatctcctccatgtggtcatatcctattaggatatgacctacgacccagaattcagggcaaggctactagttttataggatggttcgttatggattcaaaaggttttaatgggagggccttggaacctgatcttgattaatggggaaatgtgtctgagttctaaacaaatgtttattcgcttgagggaaagaacccatctgtttgtctttgactccttgagagtactgtacatgcctcgaatcaaatgcagtgctggacagaagtctgatatgcggtggatgctcaaaggaacattaagtgagtctggcaatgactgttcagaactcgttttgttatttggaggcagtctgaagtattcttttaagcatgaaatgccataaaggagagtgatcattgtcatcattaataactgcccaagccaaatctctaatgaatatggacaaatcaacacagattatagaatctaaatcatttctggaggggaaaatggagagattaatgggtgaaaggcccaccttgatgccttccatcacctcctaaaaggaaaaaagaacaaactttttaggccaacttccctagatcaaatggtttttgtctaaaaaaaaaacaaccacacagaaaacaaaaacaaaaacaaaaacaaaaacaaaaaaaaaccctgcttttccctcacagtcttttctt

SEQ ID NO: 705035 - DNA, 1285 bp, Homo sapiens
atcttttgttttgatgtgacttggtgggcttctggatagcctcagaatggggtctggttttcaggcgaaccaaccaagttattagagggttgaaagtttcagccccacttctgaccttcaagaagcaaagaggaggttgaagaggagttgatcaccaatggcctatgtaatgaaacctctataaaaaacccaaaaggatgggggtttggaggagcttccagatarctgaacgtgttgaggttcctggaggttggtgagcctggagagggcatggaagccctgtgccccttcccacatgcttgctctatgtgtttcttcataatagtctttgtgataatgggtgaacaaaagtaaaacgtttccctgagttctgtgagctgctttagcaaattaattgaaccgaagaagagagaacttagcctgctgggatttggtattaggccaatcagagaggtaaaggagcatccacgctgagctcaggatccaagggctcccatctgagaaggatggggcagcaggagtcttcagtcacaacatggccagattgtgcatccttattgtgttctttttagtctggaatagaccagtcattcaattaataagaacccaaatgtatagctggttggtcagaagcagaggttgctggagaagtatctcttggtagaatgtgacagaattgaactaaattgtcggatacccatatggtgcccaccggagaactgattgcttggtgtgtgaggaggaatctccacatgtctggtgtcagaagtgctgtgttgagtgactgtgtgagaatagagaggaaaagtggtttgttttccttagacttccagtctgggatctctgttccttttgttcccacatagtgtgttctttacacaaaatccagatggacctttaaaataactcaattagtttttgtcactccctgttcccaaaccttcttgtgatttcccattatattaaaaatccaaattccttactatgacctgaaaaaccttgcaggctctggttgccccttcttcagttatctctagctccctgttttccaccactttactccacccacatcaacttttttgtttctaatcactccagtgtattcccacttcagggccattgcactcactatttcctttgcctttaactcaagtccaccagagtgttagtgcaatctgggtataatttactaccaaactcatgtaatttattttcccaactgggataattttgggtgtataatgagttgttattaacgattgtgtcaggaaatgatagtaaactg

SEQ ID NO: 705036 - DNA, 1285 bp, Homo sapiens
atcttttgttttgatgtgacttggtgggcttctggatagcctcagaatggggtctggttttcaggcgaaccaaccaagttattagagggttgaaagtttcagccccacttctgaccttcaagaagcaaagaggaggttgaagaggagttgatcaccaatggcctatgtaatgaaacctctataaaaaacccaaaaggatgggggtttggaggagcttccagatagctgaacgtgttgaggttcctggaggktggtgagcctggagagggcatggaagccctgtgccccttcccacatgcttgctctatgtgtttcttcataatagtctttgtgataatgggtgaacaaaagtaaaacgtttccctgagttctgtgagctgctttagcaaattaattgaaccgaagaagagagaacttagcctgctgggatttggtattaggccaatcagagaggtaaaggagcatccacgctgagctcaggatccaagggctcccatctgagaaggatggggcagcaggagtcttcagtcacaacatggccagattgtgcatccttattgtgttctttttagtctggaatagaccagtcattcaattaataagaacccaaatgtatagctggttggtcagaagcagaggttgctggagaagtatctcttggtagaatgtgacagaattgaactaaattgtcggatacccatatggtgcccaccggagaactgattgcttggtgtgtgaggaggaatctccacatgtctggtgtcagaagtgctgtgttgagtgactgtgtgagaatagagaggaaaagtggtttgttttccttagacttccagtctgggatctctgttccttttgttcccacatagtgtgttctttacacaaaatccagatggacctttaaaataactcaattagtttttgtcactccctgttcccaaaccttcttgtgatttcccattatattaaaaatccaaattccttactatgacctgaaaaaccttgcaggctctggttgccccttcttcagttatctctagctccctgttttccaccactttactccacccacatcaacttttttgtttctaatcactccagtgtattcccacttcagggccattgcactcactatttcctttgcctttaactcaagtccaccagagtgttagtgcaatctgggtataatttactaccaaactcatgtaatttattttcccaactgggataattttgggtgtataatgagttgttattaacgattgtgtcaggaaatgatagtaaactg

SEQ ID NO: 705037 - DNA, 1285 bp, Homo sapiens
atcttttgttttgatgtgacttggtgggcttctggatagcctcagaatggggtctggttttcaggcgaaccaaccaagttattagagggttgaaagtttcagccccacttctgaccttcaagaagcaaagaggaggttgaagaggagttgatcaccaatggcctatgtaatgaaacctctataaaaaacccaaaaggatgggggtttggaggagcttccagatagctgaacgtgttgaggttcctggaggttggtgagcctggagagggcatggaagccctgtgccccttcccacatgcttgctctatgtgtttcttcataatagtctttgtgataatgggtgarcaaaagtaaaacgtttccctgagttctgtgagctgctttagcaaattaattgaaccgaagaagagagaacttagcctgctgggatttggtattaggccaatcagagaggtaaaggagcatccacgctgagctcaggatccaagggctcccatctgagaaggatggggcagcaggagtcttcagtcacaacatggccagattgtgcatccttattgtgttctttttagtctggaatagaccagtcattcaattaataagaacccaaatgtatagctggttggtcagaagcagaggttgctggagaagtatctcttggtagaatgtgacagaattgaactaaattgtcggatacccatatggtgcccaccggagaactgattgcttggtgtgtgaggaggaatctccacatgtctggtgtcagaagtgctgtgttgagtgactgtgtgagaatagagaggaaaagtggtttgttttccttagacttccagtctgggatctctgttccttttgttcccacatagtgtgttctttacacaaaatccagatggacctttaaaataactcaattagtttttgtcactccctgttcccaaaccttcttgtgatttcccattatattaaaaatccaaattccttactatgacctgaaaaaccttgcaggctctggttgccccttcttcagttatctctagctccctgttttccaccactttactccacccacatcaacttttttgtttctaatcactccagtgtattcccacttcagggccattgcactcactatttcctttgcctttaactcaagtccaccagagtgttagtgcaatctgggtataatttactaccaaactcatgtaatttattttcccaactgggataattttgggtgtataatgagttgttattaacgattgtgtcaggaaatgatagtaaactg

SEQ ID NO: 705038 - DNA, 1471 bp, Homo sapiens
catttgccaatttttgcttttgttgcagttgcttttggcatctttatcataaaatctgtgtccattcctatgtccacaatggtattgcctaggctgtcttccaggttttttatagttttgtgttttacgtttaagtctttaacccatcttgagttaatttttgtatatggtgtaaggaaggggtcttatttcaatcttctgcatatggctagccagtatcccagaaccattaattgaatagggagctctttccccattgcagctttgttgaagatcacatattgtagatgtgcagcctcatatctgggttctctattctgttccattgcaaacccctctcttaggcgttttaccaaagggtcaaggaaccaacaggagacacagagtgaaacaatcacagacgtgtcctgagttgttctttactgacatgaacagagtttcatggagagttaatgtcaggaggcttcattctactcccttctgtatttctcagaggaaaggcatgggctctgcagtcaggctacctgaatgtgattactggctctaccacttattagtggtgagtccttgataaattgtttcactcttgggcttttggtttccccatctgcaaattggagagaataagtgcatccatcatataaggttgagaattaaaagagaggtgtatatgcatatttacaggagctccttattcaataaatgccagttattagatttaattgtggttacaaaagctattttgtaggacattgtatgttaatcatttgatgactctgatattagatcctctaaaattttttgtaagaattgcatataaagagaatagagtatccatcaaaaatcacaactttgtcacattgaaaagctctataatctaatccagttcctattttgcctttgcagaaagtaatttcaaatccaaatgtgaagacagtttatatttgattgaccatgattaacatgtttgtgttaccttctttttgccaggattttgatatccattgtggaacactcaaattccttttgggaagaatctactggacttccagtagcctaggaasatggaacctaccattcccatttgtatctccatatctaagcattgtgcacaaagtagctgtccataaatattaaatgatttgtattttaagaaaatttaagatagcccaaagatagagcctagaatatgaggtgcaatgaaagtaatctgtgccctcctcaaaatgatgtacctttgtgttaactacaattaaaagcacttatcttggtgtatgagtgtctgtttaatctgctgtaataagttacttaagagacttctactttttcatctttctttttctacatctagcatggtggttagcacatttgtgatatgcataatcaatagatgtatatataaatgaatatgagtaatagaaggtcagaaaaatccccagaataaaataaaatttatattttacatcaagca

SEQ ID NO: 705039 - DNA, 1471 bp, Homo sapiens
catttgccaatttttgcttttgttgcagttgcttttggcatctttatcataaaatctgtgtccattcctatgtccacaatggtattgcctaggctgtcttccaggttttttatagttttgtgttttacgtttaagtctttaacccatcttgagttaatttttgtatatggtgtaaggaaggggtcttatttcaatcttctgcatatggctagccagtatcccagaaccattaattgaatagggagctctttccccattgcagctttgttgaagatcacatattgtagatgtgcagcctcatatctgggttctctattctgttccattgcaaacccctctcttaggcgttttaccaaagggtcaaggaaccaacaggagacacagagtgaaacaatcacagacgtgtcctgagttgttctttactgacatgaacagagtttcatggagagttaatgtcaggaggcttcattctactcccttctgtatttctcagaggaaaggcatgggctctgcagtcaggctacctgaatgtgattactggctctaccacttattagtggtgagtccttgataaattgtttcactcttgggcttttggtttccccatctgcaaattggagagaataagtgcatccatcatataaggttgagaattaaaagagaggtgtatatgcatatttacaggagctccttattcaataaatgccagttattagatttaattgtggttacaaaagctattttgtaggacattgtatgttaatcatttgatgactctgatattagatcctctaaaattttttgtaagaattgcatataaagagaatagagtatccatcaaaaatcacaactttgtcacattgaaaagctctataatctaatccagttcctattttgcctttgcagaaagtaatttcaaatccaaatgtgaagacagtttatatttgattgaccatgattaacatgtttgtgttaccttctttttgccaggattttgatatccattgtggaacactcaaattccttttgggaagaatctactggacttccagtagcctaggaagatggaacctaccattcccatttgtatctccatatctaagcattgtgcacaaagtagctgtccataaatattaaatgatttgtattttaagaaaatttaagatagcccaaagatagagcctagaatatgaggtgcaatgaaagyaatctgtgccctcctcaaaatgatgtacctttgtgttaactacaattaaaagcacttatcttggtgtatgagtgtctgtttaatctgctgtaataagttacttaagagacttctactttttcatctttctttttctacatctagcatggtggttagcacatttgtgatatgcataatcaatagatgtatatataaatgaatatgagtaatagaaggtcagaaaaatccccagaataaaataaaatttatattttacatcaagca

SEQ ID NO: 705040 - DNA, 1905 bp, Homo sapiens
tcagatcaggtaagatggtcattatacttaatctttgtttttatgcatataggcaaaaacaagaaaagtagacatcaggcaacaaaagctagaagtcttaatgtgaataaataaatgctatatcagagtccagagatttcaatgttagccccatcctggccttttgctactcatgtgaccttgaagaaatcaatctgagccattatttacttgtctataatctggagatataaatacctattctatcttattgggttgtcatgtgagataatattcttggcatttgtgaagtgctacacaaatatgaggtaaaattatttttaaaattgagctaaattatttttggctgaaaggcaagtcaatagtcaagtaactgtttatgtcagagtatccctttttcagtggaaaatttatcagtgaattctaccatacgtggatacttttattaatcattgcgtttaaataataacacataattatttgctgactttgaggcacatattgtgctgactttgaggttgctggtaataagtgatagtatgagcatctatcattgccagtaaagtgccaagcactgtggctggggcttcacacatattatttctgcttcttaccaaatctctgcaaaccactgatactaagcattaacaatgagtcaatgacttgttcaggccctagaattctcctacacagggtcaggattcatatttggccaggacatatactgggaataatttggaactcgtatattgttatgaggaactggaagccatcttggggaccagcaagaagcccagagagaggaagtgacttgcctatggtcacacagccagctgataaaggttccaggggtacccagatcttttaacaaactatcttcttattttcttaggttcttatttcctttgctttgacagaatcttcctgtgtagcagcagctgttttccttaccaaagtgagaaataagttggctctaatcctcatcttccattgtttgtgaatttggggccctacactaacatctctcccamaatacaaacatttttaattcctagaggaccatggacggtccctcatggtctttttgtgctcttgataagtattttgctgactaattttaagctgatcctgccccctcacaactagtttaaggccagttggctgtgctcctgaagagtgggctttggtgaaaatctcaaagccttaagatggcaatgcaagtccgtagaaatcagaattcgatttacacaaaacattttagtaccctcatatatattaaacatactattcttactccaaaatgttgtgctttttacaacctttctaccatatgtagaaaaggaatgacatataaggacaggattccggtgtgttatttaagaaattaatcattcatatatgagaaaaaattaagaatgtatgtaattttgttttgcttttgtgtctgcctcaccagaattactgcccccgatgtacataccattttctcaaactatcatattgaacagtttctcctgaaaagtgattataaagataagtgtctgtgtgacacacaacatagaaatgtcacaattggcgatggtctattcataaatgtcagcagagtggagtgtcatgcttggaatagaaaaaaaattaatatggaggtcctggtccttctacaatataatttattgctcagatgtgccctttttcatttaaaagtggaattattataatttgcactttgcttctattattgacactcgagtgactcattataatctttaatcaattctatttatcttttcttgaataaaatagtaagatttgaaaaatactaatatattaaaacatttttgttttcattctatttggtgttttaggtttggataggtatgttgtatgtatgtatgtatatatgca

SEQ ID NO: 705041 - DNA, 647 bp, Homo sapiens
tgaaatcactaaaggtaacactgcttttcaaagttttggttttctgaactctcaagccactcctcttcccaaatatcccattgtaagccttcctcaaacttattccacaagtacttccacattctctctcgctcccctgtaaaaaggggrgaggatggagaaaaatacaaaacagacaacagcttcactttctatactactcattagctgagatagtttggaagacaggagactgcagcgtttgggcagcgggaggtgcaggccacgtggtggatctcagggaggctggcaggaaggtaagagcatggctgttggccagtgcaagtgaatcccaaatcccaaacgaactggctgtgggcactgggcaatgataatagccaaccttattgatcatttttcatcctctggtgcagtgttaaaaacactaagcagggaggtggggggctaatttttttattgtacttatttttcttcaaataaactttattgtttatttgagaatattaaatatttgagaattacagcatgacattatgggatacatgtaggtacacagacactaaacataaaaagtaactgagacattgagagcttaatcactattccagaaatcaaagagccagtaagaagcagagctgggattcaaa

SEQ ID NO: 705042 - DNA, 1691 bp, Homo sapiens
ttaagatacatatggaaccataataagtgctatagataaataaaacaacaaaaagatgaaagaaacagagaaagcacatgatatatagaaaacatccaccagaaaaatatagccacagagataaaaattgtgatcaaacattttattagaatgtggctgatatcataaattggctaaatcagtattcactcttattcccttctagcttttctggctggctaagaaaccacacagtataatttctcagacttgtagctcacgttttgcctatgacaaagatccactgaggaaaatcaccacctgagatttggaaaaaaaagaaacagtggaatccacatatggagcactggtcttctggcaagcacgtggatggagggcactggttctggggcaccggagtggagattctagttcatagtcttcattgccctgggtgctgagtatgggtgatagcagcaaaccattcctgctaggacactggggatatgtgtttgggcattgtcccagctgcattgcccctggcaatgtgtagtgttcaagcctagttcactagctccttaggagagtttgtgagttaccaaatactctttaacaaaccccttttgctttaatcatctagtacaaattattttctgtagttaaagacactgatcaatattcacaaattttaaaaaagagaaaatttaatgaagctattttaaaaatgtacaaaacaaagtacacattggggaatagataatgatacaacaaaaagagataaaacatgagccgcacgcatcaagaaggaggagtgaaaaacataaatgaaggaaaaatttaatataaatttaaatacataagtatatatatatacatatatatatgtatgtatatatatttcttggtgttgactattgagtcagtctttccttgaacttatacatcttttaaatctctagacattgacatgttttgaactgtaattttaaaaacctgttctgcttattcatttgagttttcttcttaagaggctctagttacacattgtaaagtcctaacctgtataaccatgtagggaaatatgtctagttacgcattgtaaagtcctaacctgtataaccaygtagggtctatgttgaagacttattgcctgttttttatggctcttttgttcttttatctttctctctctctttagtgatatagatcagtttctctttaaaatattagtcatcattcatcactagaagaagcaatacatttaaaatattcaagaaaaagatgtacaacataaaaatgttatatccagccaaactgtattcaagtataaaagcaaaatataaatgtttttgtttttgttttttgagacagagtttcgctgcatctcctaggctggagtgcagtggcgcgatctcggctctctgcaacctccgcctcctgggttcaagtgattctcctgcctcagcctcctgagtagctgggactaaaggcacgtgccaccacacccagctaatttttgtatttttagtagagacagggtttcaccatgttggccaggatgatctcaaactcctgacctcaagtgattcacctgcctcggcctcccaaattgctgggattacaggcatgagccactgcgccctgccccacacgactgtttttaaacatgaaacacatcagagaattatttccattagtcctcaaggaaaatc

SEQ ID NO: 705043 - DNA, 645 bp, Homo sapiens
taatagcaacaccaaggggtggatttggggaattctttataccctcagtaatttccatcaatatccccagctgcctcacacagaaagaaaaaaatttatagatatatatatgattttatatactttaatgttatttatatgtttatattatataaattataagtgtataatatagatcatattstataaattatacatgaagcagttttagggaaccttattaatatatcccaaataaaaactgcacatgtatttcagaagtcacttagcattttcttccaagcagatcgttttgtgtttaacttttacagaaattctggaatatctcttgattcaatgacaaaagttacaaaaagtgttctttctaattgctaggatgtatttgcattttgccatcattggaaatatgcccttacccagaattcattccaaagtaaagtcagaggtaaaagcttttgttcgttgtttttcttctgagctatcagagtacttaccataaaaatctcaaactaaatgatgtagtgccatgtctattagtaatcatgtgcctgtcttttgcttccctccctctgagtgtagcataaggaaaatagaagttctcggtgatgctggcagagtgaatagattacatccatgttattatga

SEQ ID NO: 705044 - DNA, 645 bp, Homo sapiens
taatagcaacaccaaggggtggatttggggaattctttataccctcagtaatttccatcaatatccccagctgcctcacacagaaagaaaaaaatttatagatatatatatgattttatatactttaatgttatttatatgtttatattatataaattataagtgtataatatagatcatattctataaattatacatgaagcagttttagggaaccttattaatatatcccaaataaaaactgcacatgtatttcagaagtcacttagcatyttcttccaagcagatcgttttgtgtttaacttttacagaaattctggaatatctcttgattcaatgacaaaagttacaaaaagtgttctttctaattgctaggatgtatttgcattttgccatcattggaaatatgcccttacccagaattcattccaaagtaaagtcagaggtaaaagcttttgttcgttgtttttcttctgagctatcagagtacttaccataaaaatctcaaactaaatgatgtagtgccatgtctattagtaatcatgtgcctgtcttttgcttccctccctctgagtgtagcataaggaaaatagaagttctcggtgatgctggcagagtgaatagattacatccatgttattatga

SEQ ID NO: 705045 - DNA, 645 bp, Homo sapiens
taatagcaacaccaaggggtggatttggggaattctttataccctcagtaatttccatcaatatccccagctgcctcacacagaaagaaaaaaatttatagatatatatatgattttatatactttaatgttatttatatgtttatattatataaattataagtgtataatatagatcatattctataaattatacatgaagcagttttagggaaccttattaatatatcccaaataaaaactgcacatgtatttcagaagtcacttagcattttcttccaagcagatcgttttgtgtttaacttttacagaaattctggaatatctcttgattcaatgacaaaagttacaaaaagtgttctttctaattgctaggatgtatttgcattttgccatcattggaaatatgcccttacccagaattcattccaaagtaaagtcagaggtaaaagcttttgttcgttgtttttcttctgagctatcagagtacttaccataaaaatctcawactaaatgatgtagtgccatgtctattagtaatcatgtgcctgtcttttgcttccctccctctgagtgtagcataaggaaaatagaagttctcggtgatgctggcagagtgaatagattacatccatgttattatga

SEQ ID NO: 705046 - DNA, 602 bp, Homo sapiens
taaacccaggcaacaggcgaggcaggacagaggctgagtggaaaggtggtctggagccccttccctctccctgctgacctgggagtcgcaggcacccaccagctgccaagagaatccctggaccggctcttcctggatgggtccaagaattggacagctcagatggagtgagggcctattttccaacagctcttcgcagacccaagagcttggcacatttccgggttagggtggaatgggctttgcagggaagagggccccctgtgcacgcaytccacagcctgtcggtcagaacttgctagttgcaggagacgggtgttacacgcagtcatcagacctcaccctcacagaggcacaaacccacatagttgtggacgcctgcagagactcaaatattgagaggacttctcctttttctctccctccagagctcccacgagctgatgcacccccaggcttcaaaccacctggaatgcacagctcagggaagctggtggatgcctagaggctgaaggacagggaactctccattattggggcaggactcagggaggacacttggggccatgtgtctggagagagggcataggttacaccctaca

SEQ ID NO: 705047 - DNA, 640 bp, Homo sapiens
aggaacgtaggatatggaaagagtcacaagaccaggaaatggtgtgcagagagaggtcctttcattcttatttctatattctttagatgagcgttggtaggctcaatggatatttattatattaatgtccatcattttaggtatcaaaatacttcataattttaaaaaagttaaagggtctgtttgggtaagttatacaaattattcataattgcccctaattatcagattttatacatatgtaaactgtaaaataatagacaaaactgtattrttaacttcttcccaaattctttgtgaatgtcctctttctacataaaacacaacctcatcactcccactgtaacttgcatgcttggcatcttccagttccccagacatgtcactcactatcttccccaccacctccaaagagtgagttgtttcagcaggttaatttgttcctgtgcttgtaaataggcttacaatgtggcatagtcatttctcatgactttaacacatctgccccactggactattccctgaaggcaagtactcttttattcattttccattccctttacctaacccaaagtaagtgctcaactaatgctgtagatctatctcatatatttctctttccttctttttaaaaaactgc

SEQ ID NO: 705048 - DNA, 1733 bp, Homo sapiens
cagtgggtccttggtcctggagaacagctggatggaccgtccctcctgggaatactcgaggcaaaaggagggcgaggcctcaagaggaccacgcagagcaagaaatacctggggagaaccctagtgcccggacccctttgaacacaagggaagatagtctcccctcagccagccctccagggctccttcattttccacagctgcccaagggcagcaggctcccccggacaagggaccatgtgtgttcagtggggcccacagcgaccatcaggacccagcttagggcacagaggtgttctgaggaccgtcagtggatctgtaccagtggctctataccagtggctctgccaggaccaggctctgccccatcgggatgggaaacctgggcagatttgggatctagggcagggaggtcacagggttcaggcctgaattccagcacagcacacggcagggctgagagcaaaactcagggtcatgtccggattcccaggccggttactgcctctctgaccccagacgtctcatctgtcgaatggggacatttgggaacagcacccactctacgaagccaccatggagacgaaagagccaatcgtctacacgggcagtgtagaacgggcgcctggtgagtgctcagggatgaccctcctcggtagctgccccacagaggccaacaccgcccgcaccgtagccactgyccccaagtccgcctggagggaagagagcaggtcacgctcacctgattctgatgaatcagctggcctgggtcatgcctctcagggagaaaacctttgagtccacagagctgctcacagataccactgcctgtgtgtaactgctgtagaccactgaggcaggccagagagcagataggtgctaagcaccagtgacattctgaggtcatggcacgaatcacagtggggccttgcccgggtcagcagcgcccagagtcagggtcctccgctgcctgaggcgtcaacatgcctgcctgcaacgtgtttgtgcacgtgcgtgcacacgtgtatgtgggtaaacatgtctgtgcacgtgtgtgttgcttctctggccaggcccggctgccccactcatgtgtgcacccagttcctcatcactgtcacccccgaggcccagggccagcatcagagcatccatggctgctccctaacctcagccctccccgcccagggtggtcctgggatacacataggggtggagggaagtgactgctgctgttggatctcagaatacaaaagctaatactattacctaatggtctttttagtgtatctaatggtatcgctttttcatttctgatattttaactgggtatttctctccatgacccttggatattctagctagaggatcctgtggggaaagtgccgagcacacagtaggggctcactcttctagacatgttatctaaaacctggttcatctgtccttccacgcagggcctaggggatgccaaattccagggtccagaaagagcttgggataaaatgaaacttcaaggggacggctttgacctgggctgagtctgtctgtgccatccaactggagtctcaagtcctgaggcaggacgtccagatgccccagtgcagggccctcctgatcaacacctgctcccctgtactcattagcaacctcacccaccctactctcaaagcacacttggctctcgtatccaggagctctgcatctatagattcggcaacagcagatggaaa

SEQ ID NO: 705049 - DNA, 1733 bp, Homo sapiens
cagtgggtccttggtcctggagaacagctggatggaccgtccctcctgggaatactcgaggcaaaaggagggcgaggcctcaagaggaccacgcagagcaagaaatacctggggagaaccctagtgcccggacccctttgaacacaagggaagatagtctcccctcagccagccctccagggctccttcattttccacagctgcccaagggcagcaggctcccccggacaagggaccatgtgtgttcagtggggcccacagcgaccatcaggacccagcttagggcacagaggtgttctgaggaccgtcagtggatctgtaccagtggctctataccagtggctctgccaggaccaggctctgccccatcgggatgggaaacctgggcagatttgggatctagggcagggaggtcacagggttcaggcctgaattccagcacagcacacggcagggctgagagcaaaactcagggtcatgtccggattcccaggccggttactgcctctctgaccccagacgtctcatctgtcgaatggggacatttgggaacagcacccactctacgaagccaccatggagacgaaagagccaatcgtctacacgggcagtgtagaacgggcgcctggtgagtgctcagggatgaccctcctcggtagctgccccacagaggccaacaccgcccgcaccgtagccactgtccccaagtccgcctggagggaagagagcaggtcacgctcacctgattctgatgaatcagctggcctgggtcatgcctctcagggagaaaacctttgagtccacagagctgctcacagataccactgcctgtgtgtaactgctgtagaccactgaggcaggccagagagcagataggtgctaagcaccagtgacattctgaggtcatggcacgaatcacagtggggccttgcccgggtcagcagygcccagagtcagggtcctccgctgcctgaggcgtcaacatgcctgcctgcaacgtgtttgtgcacgtgcgtgcacacgtgtatgtgggtaaacatgtctgtgcacgtgtgtgttgcttctctggccaggcccggctgccccactcatgtgtgcacccagttcctcatcactgtcacccccgaggcccagggccagcatcagagcatccatggctgctccctaacctcagccctccccgcccagggtggtcctgggatacacataggggtggagggaagtgactgctgctgttggatctcagaatacaaaagctaatactattacctaatggtctttttagtgtatctaatggtatcgctttttcatttctgatattttaactgggtatttctctccatgacccttggatattctagctagaggatcctgtggggaaagtgccgagcacacagtaggggctcactcttctagacatgttatctaaaacctggttcatctgtccttccacgcagggcctaggggatgccaaattccagggtccagaaagagcttgggataaaatgaaacttcaaggggacggctttgacctgggctgagtctgtctgtgccatccaactggagtctcaagtcctgaggcaggacgtccagatgccccagtgcagggccctcctgatcaacacctgctcccctgtactcattagcaacctcacccaccctactctcaaagcacacttggctctcgtatccaggagctctgcatctatagattcggcaacagcagatggaaa

SEQ ID NO: 705050 - DNA, 603 bp, Homo sapiens
ggggagacaggttagcaatttctaagccttccattaggtttaatcttacaattagatgacatcatgttttttgatgtttttgtttgtttctctggcctatgatcatccttcctatgcttataaacaatctttacttcagggctatccaataaagaaggactattaaaaaagcatatatatatatayacacacacacacacacacacacacatatacatatgatatagtcatcatctgctaactactctctatgcaaactgtagctttctaaaatgaatgcttccttgactctgaagaatacaagcttctaccccaaaaaagttcacaaatccctttgctgccacaatcttcacatttctgaaaacttattaaaaggtaattttaacaaaacatgtcagtgaaatgatgagttaacgcatgttacagaagaaaatattagcagtcaaaaatataaaaataggatacaatgatttaaattttacaaaaactggccactggccagggatgctggctcacgactgcactttgagaggctgagataggaggattccttgagaccaagagttagagaccaccctgggcaacatagggagatcctgtttc

SEQ ID NO: 705051 - DNA, 634 bp, Homo sapiens
ccatttaattgtctactcaaattgatcattaggcactttctgttgatcaggtgcattactaaaccctttggttaaactatttgacgtagcagttcctgcccttagtttgcatgacctggatttcactctcagaatttagtcctcatcagcctacacctagagataacaaacactctttctgtgcacgctgtataatggcatctttccaacaatgctaggagtaggcaatacagagtgcctttatgttttgtggttatttggaagcttaggaagggaagaaaattaacattttctgagcatctgttattatccatatatactctgtattttttaacttgaaaagctctcactgtccttatattagactctgtttkttgatgtaccttcctgtatcatagaacatattttactatattataatcagtagtttaaatgtctgtttcccctactagagggtaagctctgtgagggcagaggccacatctctttggttcatttctgcatcctcattacccagcacagtggatggcacatagtaggaacacaattaatattgttaaagaatgaaaactttgcaatcctatttcatcttctcattaataattgtaacctctctgcactttaaaattgccaa

SEQ ID NO: 705052 - DNA, 2457 bp, Homo sapiens
aattcttaatattgagatagagcaaaggtccggggatcacaaatggaactgtgcatttaatcccagaactggctggctcaactacctaccccttatactcacaaccccgcttgcatgctccttcccatgacaactcctctaagtcttcctgttaatttcctgtgtcatagtgtgtgtgtgtgtgtacatagcgatggctgggaaatcacggacaaggagttaaacgagaagagttagtcttttcaatgccacttccccacatgcaacccccagagttggttcattcttttttgagacagtcttgctctgtcacccaggctggagtgcagtggcacaaacacggctcactgcggcctcgacctcctgggctcacctgatgcccctgcctcagcctcccatgcagctgggaccacaggagtgagccatcatacccaactaactttctgaatttttctgtagagacagaggtcttacattgttgcccaggctagtgtcgaactcctgggttcaagcaatcctcctgcctgagcccacagaagtgctgggattacaggcatgagccaccaagcctgccttcactgctgtgttttttttttttaattcaaacatgaacttgaaccagacactgtttctttatataaaaccgtaaaactgttttatttttcaaggatccccatataaagtttctttaaagaggcaatgtatttgtagtgccaggctcagttcatatcctggagtatataatataagaagtctattactcacctcgagtaacatctgtcagaaacaaaatgttgttggttgagcacccaatgctgtctgcaatctttcggtaactttcactctctactttgtgtccaatcttggtatcaaagtgaccatcaacaagctgaacaaagagaaggggaaagactggcaatacaaatacacttgcatgcccctcatgcctttctctgaaatacatgacaatcacaattacttcattcgttcagtattttctgaaaatctacttaatagggaactttatggaggctatacaaagtaaaaataaagattttatagcaacagacatttggaagaagaaaactaccagctcaacatacataagatcatttcataatctacctggttttcactaccgttcattttacatctgaaatagtttaaaataaacatgccctacatcctacccttaaagatgatttgcactcaaactactcactggattgaattttactcctgatgaaagattctgaacactgtcctttaatcttacgatgaaaaaatttctctaacctgcctcatgaataagctattattttacttacaagaaattctcattttctagttaaaacgttttgaaattctacccaagggctcgtctatgtctctgccctcttggaaacaattggagtcaaatctgtaacttgctaatttgaccaacagtaattaaaataagtccatatttagggtcagttactaagatgtgatcttttgaatgttttcagaacttttcacaaactaaaaacaagcatagtaagcactcaaactgggtttggccaatgggaaggtaaaaaaaaaaaaaaaagtaattttaagttttttttttttaaagttaaaactgattttgcttattttctttttcttgcagtttgcctcacttggtaactagaagatgtaaaattcttattagtgaactcagtaggtacttttgtcctgtcatgattgtcagagagagcagaaaagaagttgtatctgtattaagagaacagtcaccaatgattaaagggtttcattattaatatttgatttaaaaataagacagaaagtaggaaaatactaaaattagaatattacaacctccaaagccaaagtgttctttgcacatggtaggtgctcaatacatatttattttaaaaacttgtctggccaagttacctattgtaagtaacctattataagttcggtctatattcaagttacctattgtaagttaaaataagtaaatttttttttttttgagatggaatctcactctatcgcccaggctggagtgcagtggcacgatctcagctcactgtaagctccgcctcctgggttcaagccattctcctgcctcagcctcccgagtagctgggactacaggtgcccgccaccacgtccggctaattttttttttttgtatttttagtagagacggggtttcaccatgttagccaggatggtctcgatctcctgacctcgtgatcygcccaccttggcctccaaaagtgctggaattacaggcgtgagccactgcgcccggccggtaaatatttatttttaaaaagtatctggtcaagttacctattgtaagtaacctattttaagttaagtctatattccaagttacctattgttaagtttggtctatattcagctaatcagcacttctttttaaaaccctaaatgtagtca

SEQ ID NO: 705053 - DNA, 665 bp, Homo sapiens
tttttttttgcatagtcttactctgtcacccaggctggaatatagtggtgcaaacatggctcactgcagcctckacctgcctggctcaagccatcctcctacctcagtctcccaagtagctgggaccacaggtgtgcacctccacacttggctaatttttgtattttttgtgcaaacaaggttttgccatgttgcccaggctggtctcgaacccctgggctcaaggaatccacctgcctgggcctcccaaagtgctgggattacaggcatgagccactgtgctcggccatacattttgatcttaatgatactggtcaactctggcgcctatgctgggtcaggtgggcagggccttctgttgtgttgggcccatcaggcatgttcaataaatacctgttaacttccttaataaccctgctagttccctgttatcaaacttctcttccttaaattcatccactttgacaggctgggacaagagttctttaacagcaaaggaggcctctattatcaccctccaagtcatgcgatagtgactagctgctcacactacatgtatgattgaccttgaacaggacccttatgggaaataaaaacaaatcaaaagatctgctaccgacatggcaccctagggtgtttaagcaccttagtaggtgaaaacttaa

SEQ ID NO: 705054 - DNA, 665 bp, Homo sapiens
tttttttttgcatagtcttactctgtcacccaggctggaatatagtggtgcaaacatggctcactgcagcctctacctgcctggctcaagccatcctcctacctcagtctcccaagtagctgggaccacaggtgtgcacctccacacttggctaatttttgtattttttgtgcaaacaaggttttgccatgttgcccaggctggtctcgaacccctgggctcaaggaatccacctgcctgggcctcccaaagtgctgggattacaggcatgagccactgtgctcggccatacattttgatcttaatgatactggtcaactctggcgcctatgctgggtcaggtgggcagggccttctgttgtgttgggcccatcaggcatgttcaataaatacctgttaacttccttaataaccctgctagttccctgttatcaaacttytcttccttaaattcatccactttgacaggctgggacaagagttctttaacagcaaaggaggcctctattatcaccctccaagtcatgcgatagtgactagctgctcacactacatgtatgattgaccttgaacaggacccttatgggaaataaaaacaaatcaaaagatctgctaccgacatggcaccctagggtgtttaagcaccttagtaggtgaaaacttaa

SEQ ID NO: 705055 - DNA, 849 bp, Homo sapiens
ctgtctagtgtctagaaggaaagaaaatttctgtaaccagcagcccagctcactttgtaatgatagaaagggtaaaattaaaacttacataaccaactttgaaattaaaaatgtatgtgtaaatctgatttgtccaactataggcaaatttcagtcatttaggaactgcctagctttattttgtgattatgcctttcccccccacctcatttgcatttagacggttaagagcttatattaaacacccataccaccaaagaaggaaaagggtagcatgatataaatgactaattttataaccagacccaatgaaagattgaaatagaaaataggtgaaatccttttactccatgaaaatggccttgctgtcatttcaaactatgcactttatatgtgtttatcaaaaaaagtcagaatagagaaaagtaatgaaagaaaataaaggagatctgaaatcacactattgagaaagaacttttacattctggagacccttcttttatatccgtctgttgatctactggttactcactagctatatttgtatttaaatattttcccttcctcagtcattaaaaaatttttgcgttaccttccctcttctttttttcccccttttcttttaaaacattgccccctttctctgtgacttcagtgttaactgcatattataatgtgtcttttccctgttcatgtatggaatcttacattactcttgtgacagtacattgtggagattccttccagtgtaacaggtttaactgaactcattcattttcatggatagcwtaaatatgggacatgtgtagtacagttaaattaacatattctcttattaatgggcatttg

SEQ ID NO: 705056 - DNA, 1098 bp, Homo sapiens
aaacaaacaaacaaacaatcaaacaaaacctcaagccatttctttccacagcaccctccccagggatcctcagagatggcaccctgcatccttgcttaaggcctgggctcctccctgccgtacagatgtgggaatagaggacaaagggggcttcctggccaaggatggtggaaggtgaggacagagccacaggccctgcctactagttgtggcctccctcggagtgcagcggcatgatcacggctcactgcagcctccacctcccatggctcaagtgatcctcccacttcagcctcccgactagctgggactacaggctgacgccaccatgcccagctaartttgtacattttttgtagagacaaggtctctgtttgttgccacagggaacacctcttcccaccacagggaggcccttcctccacgagaagcggggcggggaagctgcccagcaagccatctgaccaccagtcaccaatgtaggcagaaatcactgtgtgctcaggggtttaggtggaaaggaccgttgtgctcgggagtttgccgacgtctggaatccttggggttttactcaagggcaaggtgtgtgagaatttgcagcaaagccgtcaagaaacacaaagtgcagcgtctcaatatcaagcacgcccaacttccagggaagacttccgcaaaatcaagggcgctgttgtcctagtcctagggtcaacacatgttctcattttcaaaactttcctggtcactgggacccaaggcctgggagcagcatttaacctgcggtgccactaaatgagagccggccttgagtgagtgtgcctttaacccgggctgccctgggctactgccatatcacctgaccttgcagcttcaggctgcactccgcttccctttgtggggctggcaggggcactctgctctcagccttctagctctgagaggagaaaaccagaagtggccccttcctgtgcctctgtgtgttcctttgcaagccgttgtgtgccttttctgcaggcgcttatggagagtgaggtgtgtttgtaccatctccccgtcagattaggaatcctcaaggtcagagacaagttccctcctccctcc

SEQ ID NO: 705057 - DNA, 1098 bp, Homo sapiens
aaacaaacaaacaaacaatcaaacaaaacctcaagccatttctttccacagcaccctccccagggatcctcagagatggcaccctgcatccttgcttaaggcctgggctcctccctgccgtacagatgtgggaatagaggacaaagggggcttcctggccaaggatggtggaaggtgaggacagagccacaggccctgcctactagttgtggcctccctcggagtgcagcggcatgatcacggctcactgcagcctccacctcccatggctcaagtgatcctcccacttcagcctcccgactagctgggactacaggctgacgccaccatgcccagctaaatttgtacattttttgtagagacaaggtctctgtttgttgccacagggaacacctcttcscaccacagggaggcccttcctccacgagaagcggggcggggaagctgcccagcaagccatctgaccaccagtcaccaatgtaggcagaaatcactgtgtgctcaggggtttaggtggaaaggaccgttgtgctcgggagtttgccgacgtctggaatccttggggttttactcaagggcaaggtgtgtgagaatttgcagcaaagccgtcaagaaacacaaagtgcagcgtctcaatatcaagcacgcccaacttccagggaagacttccgcaaaatcaagggcgctgttgtcctagtcctagggtcaacacatgttctcattttcaaaactttcctggtcactgggacccaaggcctgggagcagcatttaacctgcggtgccactaaatgagagccggccttgagtgagtgtgcctttaacccgggctgccctgggctactgccatatcacctgaccttgcagcttcaggctgcactccgcttccctttgtggggctggcaggggcactctgctctcagccttctagctctgagaggagaaaaccagaagtggccccttcctgtgcctctgtgtgttcctttgcaagccgttgtgtgccttttctgcaggcgcttatggagagtgaggtgtgtttgtaccatctccccgtcagattaggaatcctcaaggtcagagacaagttccctcctccctcc

SEQ ID NO: 705058 - DNA, 1526 bp, Homo sapiens
tttaagttcttcctggattttttttttttttttttttttttttagacatagtcttcctctgtcgcccaggctggagtgcagtggcgtgatctcaactcactgcaaccttggcctcctgggttcaagctrttctctcgcctcagcctcctgagtagctgagattacagacacgtgccaccacgcctggctaattgtttgtatttttagtagagatggggtttcaccatgttggctaggctggtttcaaactcctgacctcaagtgatctgcctgcctcggcctcccaaagtgctaggattacagacatgaaccaccttgcccggcctccctggcttcttaagtggaggagctgtgtctccattttgcttggatcagtgctaccaatacaactatacatgtttggcctcacagaaaatatgtttctgttaagtttgtcaaatttaatagttatccctatgtcctgggtgagtctttcactgagggatgagacaggagagtggactttgttttgaagatgggagcaaggcctttggggtcagcaagggatgttgggcagtttgactgagtcgtttcaatattttatcaggttccctagtgagtcagcctcagtccgaatatcagaggcaggtgggaaaaattataataggagaactttctacaatgagagtacagggctcacaaggagacccgaaaagtagccagcatctccgcaggagaagaggccactgcagagaaaagcaagcaatgatgttcccactgagaaaattataatgttgagaccctagccaaggttcaccagggtatttcccagcagccaaggaatattgacagaaagggataatttgttattacctcaatgagagcctagtcgattttcctccctcactgatttttcctcgaggatggcaggtaataaatatgtggcagccttatgaaataagaacaaggtgatcaggtgcttttagtagctttttgaagggtcctttctcctgctatttttttgtctcgtattttaatattatcttgccacctatagttcttggtgaagaaatgcaaatcccacaaaacaaaaaaaatgagggggctgaaatagttgactctaaagcagcaatgttaattttcagaagagcatttttttctagtgactgctaaagtcctctttgttttatccttgtcatatttaaagatttattttattcattgatgaattagtcagtgatgagctaagtatcataaaaaataacagaaagcataactcaacagaacaacacatacatttttttctctgttctccatttcaaagaaaaaaatgaccacaaaacaggttgacatcagtataccattttatttaaaaaaatttttaaaaccacttttgatgtctgctctattgccagcacagaaagtagagttcataacaaggcatcacattctatatacattggagatatatatttaaaataatgacccaaagccacatataagatcttcaaataaacagctaagatagacattttttctttactcat

SEQ ID NO: 705059 - DNA, 730 bp, Homo sapiens
aattcatggaagtacagagtatttcaaattttcaaacctatggaacagaaaaggcagaaaaggaaaattcaggctaaaatgaaatgagacactttaagaaatgcaaggagaaaaaatagtttattcactttgttgtcaaagaacaataatcaaatatgattaatttttttttgaattttgtgaaaatgagaaatctcatcagtaaaatatgtacctggcacagaggcaagtgaaaccctaccttatgacatccagacttttaatattggatttctaaggaatttgacgactgagtacagatgctactacctcttccttgattctcttcccccatytctgtcttagtcagttgcgtatccctgtgatggttagtattaagtatcaccttgattgaactgaaggatgcaaagtattgttcctgtgtgtgtctgcaagggtgttgccaaaggagtttaacatttgagtcagtggactgggagaggcagacccaccttcagtgtggtgggcaccatccaatcagctgccagagcagctacaataaagcaggcagaagaaggtgggagaagtcaacttgctgagtcttccaggccttcatttttttcccatgctggatgcttcctgttcttaaacgtcagactccaagttcttcaggttttggactcttggacttagaccagtggtttgcctggggctctcgcgtcggccacagactgaaggctgcattgttgac

SEQ ID NO: 705060 - DNA, 635 bp, Homo sapiens
tgagtggggcctcactaggttaagatcaaaatgtctgcagggctgagtttctttctggaggctctagggaagaatccatttccttgctcattcatgtttcacagaattgagtttctcgcagttgtgggactgaggtctccatrtgcttgctggttatctgctgaaggctgttctcaacttctagaggctacagtcctcggccaaggcgctcttcttccatgttcatgctttgaacctctcctgcctcttcttttcattgcatctttctgccttactcttctgctttcctcttgcattttgaaggaattgtgtaattagattgggcccacagaggtaatacaggatcatcttcccatctcaaggtcccttaaccatagtctcatctgaaaagtctcttttgccatgtaaggtaacatattcacaaattcttagaactagagtacacatgttttggggtggggggggggcatttttctgctgatcaccgtcaaacgctattgttaccatccttatttttctagcaagggctactctttgaaataatgagaaaatggctgtttctctttgttctttctttagtttacaatggcagggccctctcctaccaaatccactttcaagaagaatctgacatc

SEQ ID NO: 705061 - DNA, 635 bp, Homo sapiens
tgagtggggcctcactaggttaagatcaaaatgtctgcagggctgagtttctttctggaggctctagggaagaatccatttccttgctcattcatgtttcacagaattgagtttctcgcagttgtgggactgaggtctccatatgcttgctggttatctgctgaaggctgttctcaacttctagaggctacagtcctcggccaaggcgctcttcytccatgttcatgctttgaacctctcctgcctcttcttttcattgcatctttctgccttactcttctgctttcctcttgcattttgaaggaattgtgtaattagattgggcccacagaggtaatacaggatcatcttcccatctcaaggtcccttaaccatagtctcatctgaaaagtctcttttgccatgtaaggtaacatattcacaaattcttagaactagagtacacatgttttggggtggggggggggcatttttctgctgatcaccgtcaaacgctattgttaccatccttatttttctagcaagggctactctttgaaataatgagaaaatggctgtttctctttgttctttctttagtttacaatggcagggccctctcctaccaaatccactttcaagaagaatctgacatc

SEQ ID NO: 705062 - DNA, 598 bp, Homo sapiens
tataagccaagaaacccaatgacccttccattttacctcaccataaccaattacaccattacaattcagttatgatattttcattgatatttcaattactgcactgtagtaaagttctaccacattcctgataacataagtttacaagctctatggaagttaggagacaacctggtgactaaaggaataaactctcagtccacagtagctttttcttggaaatctacatttcaaaaaggaagattatccagagaaccctaccaaatcaacatgtaggtaggtaatastactgtggcacattttataactacattgtcacttcctcagaaggaataggttcagtattttcagtgttgtttttgttttttctagtggtattaatagtacttaatacaaacattatttcataatatacatgcatttacaatttttaaagtgaccctattatattcaatgaaacaacatgacctaaacaccagaagtggcagacacttttgtaggtgatagggattatattagtcagggttctttagagaaacagaactaataggatagatgtatatatgaagtgcagtttattaaggagtattgactcaca

SEQ ID NO: 705063 - DNA, 1219 bp, Homo sapiens
ccctgtacattgctggtggagatgtaaaatggttcagcagctgtggaaaacatcatagcagctcctcaaaaaattggacataaaattacctcaaaagtattgaaagcaagaacttgaacatatatttgtacatcagggttcatatcagcattatttataatagccaaaaggtagaaacaacccaaatatctatcaatggatgaataaataaaatatcatacatacctacaatggaatgttaatcagcctaaaaaaagaagtgaaatttttatatatgctacagcatagatgaaccttgaggacattatgctaagaaaaataagccagacaaaagacaaacattgtatgattctgtttatatgaggcaccaagaatagtcaaatttatagaggcagaaagtagaataacagttatcagggactgtgggagggagaatggagagttactgtttaattggcacagagtttcagtttgagatgataaaaaatttctggagatggatagtggtgatagttacacaacaactgaactgtgtacttaaaaatggttagaatggtgacttttatgttatgtatattttaccaaactaaaaaaggattaaaaagtaaattttcagataaacggaaacagaaaggattttccatcagcagagttgcactaaatgatagattaaacagagtttttttaagaaggaagaaatggaccccagaccaaaacacagaactacaaggaccgaagagcaatggggaaaaaaatggaaaaagatatgctatacagaccaaacttctaaccaaagaagaaaagtaatttcaaattacagttatatgtaacaaattaacttccttaacctgataagaattatttacaratcagctactctaagcatcatacttaatgctaaatattgagagattttttctttgaattcagaaataaggcaaatatagtaaacagtaatatgttgtgtacttaaaaattgctaagagagaagatcttaaatgttcacaccacaaaagaaaaatgataacaagttaaggcaatgtatatattaatctttattgttttaatcgcttcacagcatatacatatgtcaatacatataaattttatttgttaattacaactcagtaaaactggaaaaaagtaatgaaaatattttaaaataaaagatatttagtattgtcacatatttagtattatatataggataatgtaaaag

SEQ ID NO: 705064 - DNA, 640 bp, Homo sapiens
ggatcagtgagacagatattttccaaagagagaggaattttcttcttttacttctctatttcccacatataaatctctacaactagggggaagtatccaaaaactcaacaattagaatagcaaatagatttcaattctgatgctaagagatggggagtggctgcttgaaacaatgtactaagaaacatgtttgccttttgccattgcagacctacatgatccttgaatcaagtcagcatgtaataaagaaaagtaccctggtcccaccaggcaagaggaacctctaggccccatagtctctttcttggtcttcccttctctcctttctacctatatattctctgtttaccttttaaggcccaacccaaactctaactttctctaaagcctccctgatgtcacacattattttgtcctcagaacatttattctatatatgtcacataagtcagtgttttattagatattttattgttttctagcaaaaatctaacttcaataaaatgaacaaggtcttgtatttctttctttatatattacagggtcggggatgctgttagccacacaatatgtgctttgtaaatgtttgatctgttgctgaagggaaggtcttgaatgmcaagctgttggcaagctactt

SEQ ID NO: 705065 - DNA, 1179 bp, Homo sapiens
ctttttaacttcagctactaatagccaatacacactactaccattctgttttccaaccatctcccctagaggtatgggctacatgggcacattgccttccaagttatcacagacaacgttttaccaattgtcttgtcactgcataacatgctcctgtttttcctgtctctgacattcatttcctcaaatcccacctcttgccaccttccaccaacctctaagccaatttcacaccttttaggttgtcttaaggcagaacaacactttgtgtcacagaatataaattatgataatgctacctacataataatacttttcagtggcttaaccagtggtgtgctggtaaaatgactctctgcaataaaagccctgatgtatagcacttgccaacctctgtattgtaagtgctccaatcacactgattccaagctatcaacttgatgtcaactggcttacacaattcctgcaaatttaacagtcagctcttgccagccagtgaaagccagatagttaatttaagcacactagtgagctgaacccagtgtataaaatccaatcaacagtgggagggtctgaaaaagggagtttgcttcagagggacccagggtgataaaggctctggcacatacaacacatggttttcaaggtcatttggtgccaaaatttatccagcagacagggaggaaggatgatggagaatccccagggaggattttataggccaggcctggaagtgatgtacataactttcagtcacattccatttgccaaaatctagtttatgactactcctaaccacaaggaacggaggaatgtagtctagtcgtatgtcctggtgcaaagggaaacaggtttatctaacacctgtccagtctctgccactgaaccccagacccaagttccagcccatcatggtatcatgaataycttatcaagtcactctgcacgggtcagttttgagaaggaaatgatggccatcacggtataaagcaaggcctaatgttgtcaggaattatacagtaattgtagctgcaagcacttaagcaggcccagctctgattggcatcttctaccaggttcatggtagaggtaagttgttcaagttaagtaacagaaccctagtttccttatctgtttatatgatcttgaacacccaggatgacaagaaaaacattgaac

SEQ ID NO: 705066 - DNA, 1247 bp, Homo sapiens
tccaccattgccctgagtcacctttggctttcaatcaaccattgggtggactaaagccaacacaaaatttagaaaggtgaggccaaggtgaatctcatttatgactactatggagagaagcctgctcgagtcataaatatcttcagcaaagtcagataggaaaatcatcagtagcagaaatactaaactgggtttggaaggtttgcaaggggggcagtaaaaccagcattcgtgaaactcactatgagccatagattgtgctggcccttcccatggctatattatttaatgtttattctataggtttgttatttaaccctgagtgagagactggattggagtattccattagaaaagtacaaaaaagaacagatttcgtcaacggtaggctaaccccaatccctgctcagaaaatgccaatccaataaacattttggcacagtgaaatcatgtgccaaaatcccctctatgtgggttgtaaggattctccatctgcctttttggggggtcagaaaactaaatacaggaagtcagagcatgcccagagtcgaggaagtactaataccatcaaattaggaagcagacttcctagatgaaattacaacagttgcttacattcgcattgtgcattttattcattcaataaatatttacggagctgcacagaaaagagagcaagacattctcccacccctcccagagctaacagcttsatgtgaaatgtcacacacaaacaagagacaactgcaatgttgtgcgtgaaggaaggagaggctgatgggaaggaaccctggagagtgcccaacccagacttcccagggggctcctgtgaacttccaagaacctttctagcagcaggcatcattgtcaattttaccgatgaggaaaccaataattagagaggctacgtgccttgcccaagtcaaatacatacatttagaaggggaatcctgatcatattacaccatacagcatctaggcatgaaattttttatccctaaagcaataatttattgaacaggacacagaagactggaaagggctggagttttcaaaagtccctaacctaatctcagggactagttttagaactgaaagaatttgattcaacaattttaagtctctgttttagtcttaccttttagccccacaaaataatgggtctggctcaaattccctttggagaaaccactggggactctacctctgtacccgaggacctttctattaatagaaactacagctga

SEQ ID NO: 705067 - DNA, 1464 bp, Homo sapiens
agatttgagggggagaagttaacaagctcttacttcattagaagaaaaactgtcagttcaattagtatttatttcatttctgcaggaggtaggacaccgccatatgtaatcaaaataccgaagaggatttatttcatgcattaaataaattcaagctaattagcaatcatgttcacttccttccaaaactgtaccatactatggctcataacaaaatatgtcatattccacaattggaaagtcccttagctccaagaattctgttgccacccaaactcaacacttttacttacaggaaaaattattttaaaattatatttaaaatgtgttctctgtgtctaatcattttacttcattttgtacacccacttaaaatttgaatcatgactaggaagagggtggtctttctcactctgcagttttttagtaggttattttaaagatatttacgctgtataaaataaaaaggaaatagacaatgctgacagtttgcctggtcaatgtgaaatgttggcataattccactctcggctctgcaggattctaaaaagatgagctcatgtatttagtgtaggatttaaccttcacttctgtcccctcagggattcttccattcatggagttccttctgaaatcgggacagaagatgagtttgtgcaacaatacctaagaatgtatgcggtgaagtgggtggtattgaataatcagcttgttaggtattctcaggcttgtacaaaagctggttaggtctggcttgagggaatattaggttaaaacaggccagtttagacaacttcatgtagttgctctgtaacataaaaataatgtccatctccttgctggatgctcaaagggtagaggggaaacaagtgaatttgctactctgtgtgtgatttcaatcaacaaggaagaactggtgatatggaagctactaaaaccttggaagagatagtgttagcttcaagttgaacaaaaacaaagaaagagagaatagatacatgtgtgttctcttagactctagatagaatattttaaaatcagagaaaagagcctatggaagatgcaactataaaaagaaacacatctcaagaaactctaaaaattacaatctctactaaaaaaaaawtcctgagcaatctttaggtaaagaagaactgaattaaagactgtgattgcacaggctgcttgtttatgagtttcaattttagaagaacttgaacacaagcagtccaaccagctccacagcctggctcccgcttgccctgccagaatgcctcctccatatcctgcaccctcacaacacagctaagagcttttacttatcgagcatttactatgagtcagggcaagttgttaactgcttttaaatatcatttaatcctcaccatgactctgcaaagtaagtactgttatctctaatctaaagatcagacaactgaggttcagaaagattaggtacattgc

SEQ ID NO: 705068 - DNA, 598 bp, Homo sapiens
tttctagtataataatttatattataattcatattattcaatcatacacttaggtggttataatgtaagtataacaagtaaaatcaacttattcattgagattctggcctaaatattagttggatgtgtctaataattcaagccatctaccagcaaaccttagttgacaggctcatatcatgtcaaattcctcctaaaactcagcagctattaggagctaaaagtattttgtaaacattctttaaatattttgcttcagtgatctggggattgtgggcaagagaaaaaggctttacagagttaggtcagcgaaccaacagtaaaggatggaaaaatccagtgctttgactgtgctgcaatatcctccataaatttacataaatgtgtcaggaatgatttatcacacacaacaacttcagccaaatccktggtccatagattttgcaagccagttggtgttgaacatgtagtcccacctgtggaaagtgaagagaatggggcccccactggcccaccaacaatgcagattttaatttttaagttgctttagaattaacttagaccaggcgcggtggctcatgcctgtaatcccagcatt

SEQ ID NO: 705069 - DNA, 662 bp, Homo sapiens
ttggtaaaatgacagagtgttcacaaaatgatgtgatattacaaattctttaacctttcctcttttgttaatctaagtatatacctctttccctttaaggaatgtgctcagtatttcttagaagtgaaagataaagatataaaacatgcacttgctggtttatttgtggagattcttatccctgtagctgctgtaagtatttttcttattttcataccatttgtgtgttatacaagaaccttatcaaccttatacttttattttttgtcctaaaaatacttacatgacaataagctgtggccatgggaaggctcgtctcatttgctccctgttgctcagaggtctcttccttttgttgatcatacaatgttttagagatcrtttcatgtattttgttttttggttgttgcagatggtaggggaaatccagctccatcttggctagaaatggagattaattacattctttttgttcagattttattctaattaaaatctcaaaaatgaagaaatgtattacatgttgaaaaattgaactgttttggctttcatttttaaacattgaattcacttacttgtgacctatgggcttatatgaattggtttgtagtattcaggtcctacctttagagcatgttttgaaaaggtgaacagagaattgt

SEQ ID NO: 705070 - DNA, 1903 bp, Homo sapiens
ttagagttcttatgacttactgggggtaatggcatattcagggcattaaatatttgatcgccaggtagcagaaaatggtcaataaaataatgaatgtgtaggtatttgaatgcacctctgcttttatctgagatacctttggactcattgtccgcttagctgacttcttagcgtgtatctttctagagtaaatgtaatagtctgtctattgacaaggattagtttacttgattctcatacttgattttgttaatagatcagcgccagccagcatgtttcttttgtaaagggaagggtactaatattatttactgcctacaacttgcaaaatgatttcatatactctctttttaaaaatccttacaggtttccttctgtctctctcttattcaatttttccttcactcccttctttttcctctccttttcttcctataaatgaggttaagtgattttgtgtgggtaactgtggcttagtattgtgtaactatactgcatacattgtgtwgccttctcatatgaaatcatttctctgaaattacattggaaatggggtttttacagatttgttgtggatatgactttacagatattaatctaacttttagtttctttggatcacctcttgaattaaatagttgtttttgtctcctaatacatattgatgcaataaaagagttgggcgatgataataattttggtcctatactgaatttttgttatctgaaatatagtagaaactaaaccttttaaacccatttaaaagtcaattttctaaagtcacatttaacagttttggtgtttcaataatattaactaatgaaaactattttggttgtattattttaaggtagaagtatcttaatggaatttttaaatgagcttgcctaagattaaataagcaccttgagtctagtttctgcaatgtgattttaagttttttttaaaaattactttgaaacagtaactagggcaagtacttacaggtaagagtgaaattatttggtacagtaagcttcaattataatgcatttagtttggagtgatgaaagtttttttttttttttaatttaatttttttgagtcagggtcttgctttgtcacccaggctgaagtgcagtggtgcaatcatagctcactgcagccttgacctcctgggctcaagcgatcctcccacctcagcctcccaagtagctgggactacaaacacacaccaccatgcctggctaggattttgattttttttagagatggggtcttactatgttgcccaggctggtcttgaactcctgggctcaagtgatcctcccacctcagcctccccaagtactgggattacaggcgtgaccactgtgtctagctgaaagttactatttttaaaactgagaatctataaaagcaaaaatattcattgtagctcatggtttgacaggtttatgaaaggcttaaaatgtaaaattgtcataagtaaaatactgcatttcacgtaggatttatgtaactagtagtgatggtgaaaaaaacctgatgaggtgggagaaatgacccagtgtctcactttgccctcccggtgtcttatttcccctctcattttaagttctacgtgagtattacagcttcaaatataatcatggcattaattcagaagcctgatatattaaaaaaaaatcttttgtttttctgtaataactgcatttgtaccgtattagaactttctaccacaatctccttctgagacagtatagagctagctgggtgagtcacaccacaccacaaattccttaaggtggtaggtggtgtcttattcatcattcgtgtctctcactgcctagtgcagtgctcgataggcagtcggactctgttcctttattatactatacctggtgttaggtttttagagcac

SEQ ID NO: 705071 - DNA, 1903 bp, Homo sapiens
ttagagttcttatgacttactgggggtaatggcatattcagggcattaaatatttgatcgccaggtagcagaaaatggtcaataaaataatgaatgtgtaggtatttgaatgcacctctgcttttatctgagatacctttggactcattgtccgcttagctgacttcttagcgtgtatctttctagagtaaatgtaatagtctgtctattgacaaggattagtttacttgattctcatacttgattttgttaatagatcagcgccagccagcatgtttcttttgtaaagggaagggtactaatattatttactgcctacaacttgcaaaatgatttcatatactctctttttaaaaatccttacaggtttccttctgtctctctcttattcaatttttccttcactcccttctttttcctctccttttcttcctataaatgaggttaagtgattttgtgtgggtaactgtggcttagtattgtgtaactatactgcatacattgtgttgccttctcatatgaaatcatttctctgaaattacattggaaatggggtttttacagatttgttgtggatatgactttacagatattaatctaacttttagtttctttggatcacctcttgaattaaatagttgtttttgtctcctaatacatattgatgcaataaaagagttgggcgatgataataattttggtcctatactgaatttttgttatctgaaatatagtagaaactaaaccttttaaacccatttaaaagtcaattttctaaagtcacatttaacagttttggtgtttcaataatattaactaatgaaaactattttggttgtattattttaaggtagaagtatcttaatggaatttttaaatgagcttgcctaagattaaataagcaccttgagtctagtttctgcaatgtgattttaagtttttttwaaaaattactttgaaacagtaactagggcaagtacttacaggtaagagtgaaattatttggtacagtaagcttcaattataatgcatttagtttggagtgatgaaagtttttttttttttttaatttaatttttttgagtcagggtcttgctttgtcacccaggctgaagtgcagtggtgcaatcatagctcactgcagccttgacctcctgggctcaagcgatcctcccacctcagcctcccaagtagctgggactacaaacacacaccaccatgcctggctaggattttgattttttttagagatggggtcttactatgttgcccaggctggtcttgaactcctgggctcaagtgatcctcccacctcagcctccccaagtactgggattacaggcgtgaccactgtgtctagctgaaagttactatttttaaaactgagaatctataaaagcaaaaatattcattgtagctcatggtttgacaggtttatgaaaggcttaaaatgtaaaattgtcataagtaaaatactgcatttcacgtaggatttatgtaactagtagtgatggtgaaaaaaacctgatgaggtgggagaaatgacccagtgtctcactttgccctcccggtgtcttatttcccctctcattttaagttctacgtgagtattacagcttcaaatataatcatggcattaattcagaagcctgatatattaaaaaaaaatcttttgtttttctgtaataactgcatttgtaccgtattagaactttctaccacaatctccttctgagacagtatagagctagctgggtgagtcacaccacaccacaaattccttaaggtggtaggtggtgtcttattcatcattcgtgtctctcactgcctagtgcagtgctcgataggcagtcggactctgttcctttattatactatacctggtgttaggtttttagagcac

SEQ ID NO: 705072 - DNA, 1189 bp, Homo sapiens
caagccatggtctgacttacagtatggctgtgtgtatatttcttttattagattgtggagtttgctaaaattaacagaagttagagccctttcatttttactgttgcctaaagtacttgggcagttttaatagcccaccagtattctagaaaatcacttactgtaaagaagtttaaatttagttttatttgggtttggaaagtgtgtatttatgtttaaaggagaaaaagtttttgcttatcaaagtttcacatgcttgttgtaaaatattaatatgaaagaaatgcataatttcaaaattaaaagtggctgggtatggtggctcatgcctgtaatcccaggactttgggaggctgaggcgggaaratggcttgagcccaggagttaaagagcagtatgggcaacaaagggagactctgactctatttaaaaaaaaaaaaaagaaacgaaaagtgtcacataacactgctcctatcacattgtaacattgttagtggttgtttattctttcaggttttttttttcctttttttctttttctttttttttttaacctctgtataggactgtcttaaactgtctctcatgcttgcaaattttagttagtaaattacatttattgggagtggggaaaactaatcattttttatatacttatctttaaaaataatttctccaggcctagtaattctggcaattctggttccttttaccttttcttaggatacaaagctgccactagtatgtttgtgttcaaaatgtagacttcatactctgcaaaaattgatcaaaacctgtgtgcctgaacagtttatctgcctttaccccagaatatttttggagtacatactttaatttcttcttatttcttgattattcttctcaagagagagaggattaaaaattgctttgagactcccagcgggcactcctcatagtagcccaaggagaaatgtagatttgttcatggtggaatcactcaaacgttaagttgctaattataaaaagggggctacagtttaggctggtgaagtaggtgagaagagtctgttgttccacgtccttctttaagctaccccagagggcagaaagggtttccaaaggatcctaaatagaaaacccagctgtaagcagccaggcggcctaatcagctgaaaaaaaaatctttcatttagcagacttttgagaa

SEQ ID NO: 705073 - DNA, 1189 bp, Homo sapiens
caagccatggtctgacttacagtatggctgtgtgtatatttcttttattagattgtggagtttgctaaaattaacagaagttagagccctttcatttttactgttgcctaaagtacttgggcagttttaatagcccaccagtattctagaaaatcacttactgtaaagaagtttaaatttagttttatttgggtttggaaagtgtgtatttatgtttaaaggagaaaaagtttttgcttatcaaagtttcacatgcttgttgtaaaatattaatatgaaagaaatgcataatttcaaaattaaaagtggctgggtatggtggctcatgcctgtaatcccaggactttgggaggctgaggcgggaagatggcttgagcccaggagttaaagagcagtatgggcaacaaagggagactctgactctatttaaaaaaaaaaaaaagaaacgaaaagtgtcacataacactgctcctatcacattgtaacattgttagtggttgtttattctttcaggttttttttttcctttttttctttttctttttttttttaacctctgtataggactgtcttaaactgtctctcatgcttgcaaattttagttagtaaattacatttattgggagtggggaaaactaatcattttttatatacttatctttaaaaataatttctccaggcctagtaattctggcaattctggttccttttaccttttcttaggatacaaagctgccactagtatgtttgtgttcaaaatgtagacttcatactctgcaaaaattgatcaaaacctgtgtgcctgaacagtttatctgcctttaccccagaatatttttggagtacatactttaatttcttcttatttcttgattattcttctcaagagagagaggattaaaaattgctttgagactcccagcgggcactcctcatagtagcccaaggagaaatgtagatttgttcatggtggaatcactcaaacgttaagttgctaattataaaaagsgggctacagtttaggctggtgaagtaggtgagaagagtctgttgttccacgtccttctttaagctaccccagagggcagaaagggtttccaaaggatcctaaatagaaaacccagctgtaagcagccaggcggcctaatcagctgaaaaaaaaatctttcatttagcagacttttgagaa

SEQ ID NO: 705074 - DNA, 609 bp, Homo sapiens
tttgggattgcaaacactgctgttcctgtggggcgaaatatttctgaaattctgcaaacgtaattgtgtctttccttatactttacaggtatcgtgcatttcaaagaatatcattatgagactacatgggtatcctagcaaataactcatattttgctgacatagtagtaatacattcttttaagctcaaaatgctataataaatacatgtctttaccaggatttgtgctttttgttacgaaaaatattattttgaaaaatcattggctggacgcggtggctcacgcctgtaatcccrgcactcggagactgaggtgggcggatcactgaggataggagttcgagaccagcctggccaacatagtgaaaccctgtctctacttaaaatacaaaaaaattagccgggtgtggtggcacatgcctgtagtcccaggtactctggagtctgaggcaagagaatcgcttgaacccaggaggcggaagttgcagtgagccgagatcacgccactgtgctccagcctaggtgacagagcaagattccttctccaaaaaaaaaaaaaaaattatttgtattaaaattcagtgtgaaatatttttaactttgacaaa

SEQ ID NO: 705075 - DNA, 1282 bp, Homo sapiens
caaaatcgaccttgtaaggaattttgcccaggctggcccagaacaagaaaatcttacaccatttattttaggaatgtaaagtgtcagtgactcaatgagctaaagcaacagcattactacacttcttcatctttggcaacagtttaatgctttgaaaaaataaagccatcattatctgcataaatccttttaggaaattcaattatgggtcagatcccaaataagcagtaatctatattagttactagattcagcaattgaagactggaccagcatcattaacttatcacttataatcttctttttcccttaccaaatgtcacctctccatttccactcttgtcaaacaactggaaagccactatgaacatggaatctggagcacataaaacagattcaaatgccaaaaactcttgataggagatcaacctggaataaaatataaaacgycattggctggtgaagaaagggaaagcatcaggcatttaatctgcctttactatataaactgtagctcagggtaaccaaataattgataaagggtagtttgtttttatagaggtacttcagataaggaaggaaaggagaattagaatatcacccttttgtaagcccctagaaaatcaatgaaactgggcaataatcaatagctcctaacatcatgaagagagagaaccaggcaaaatataattaaacctgaatctgatcaagtctctggatcagtttctcaacctcagtactggtgacattttaagttggataattctttgttgtgggggtttcctgtgctttgtagcatgtttagcagcatccctggcctctacccactagatgccaatagcatccccaagttgtgaccagcaaaaatgtctccagacattgccaaatataccctggtgagcaaaatcacccctattgagaaccactgctctagaactattcactaatttacagaaaacacaacaaacaaaggaacatgttcactaccaccacataaatgcagactgtaggaaatgacagaagaaacattccatagctgcagaaaaataatttttaatgaagctatgaagaggattcttcttttttttaaggggccatgctaatctctgtatcattccaattttattatatgtgctgctgaggcaagcacagggaatctcaatcttaaaagacctaagagatataacaatgaatcacaatatacatccttatttggattccaatttaaacaaagtaaaaaaaaaaagttttttaatttacaagataatccgggaaatggaaa

SEQ ID NO: 705076 - DNA, 2657 bp, Homo sapiens
tcttgaatgtttgtcatgttgactaaaggtgaatggatggtaatatcttcgtatatctaagttacatgatgccatagaaagcataccatatgatatggtttggctgtgtcgccacccaatctcatcttgaattcccatgtgttgtgggagggacctagtgggaggtaattgaatcacgtgggcaggtctttctcatgctgttctcgtgatagtgaataagtctcacgagatctgatggttatataagggagagtttccctgcacaagctctctctttacctgctgacatccatgtaagacatgacttgctcctccttgccttctgccatgattgtgagtcctctccagccatgtggaactgtaaatccattaaatgtctttcatttataaattgcctttatcagcagcatgaaaatggactaatacagaatattacaggcacgtcttgtagagaaccagataaataagtctgctttgatgtgattctttaatggttgtgtagcaggcctagagtatgtcatccttgtagcagctacagaagctctgaaaccagagtagaggtcactcttttgtaagagaagtatatatctattaaaaaaacctcttatctgttggggtgtctccctcactctaccaagaaaagaaggaatgactctagcctccagacactcttagtaaatggagaaggcactgatttaaatccacttaacaaaccttacccttgtttactgtgtttttcctagttacttcctcattactggcctccctacacccttctttgttatagcttaagattgtatttaagcctgaattcaaagtcacctcttggagatttactcatttctctgggtacctcccatcaatacatgaggtatacatgttaataaacttctttgttttcatgttaatctgtcttttgttacagggatcggtcccaaccaagaactcagaaggagagaaaattattttttcctcccctatagttgcaagtttgcatgtacctaagaaagtaaatgacaatagtcttcaaaagcttcttttaagaaaaattttgcataggtgttttctctgaattttcaggtcttctctgattcccagaagaattaatggacactcaaaaggaggtctctgattccctatattagataaaaatttctttgcatttttgtttttgataatgtatgtcttggtttattaagttggtttaattaaggccactaagaagtatcattttctgcctctgagagatggcaaagatttagaaattacaataagtggggcagatacaatataggcatctgggcttggtggagtggaaaagtagtataactgttgttaaacaatatatgaaattaatatcatttcaccaagaaagtctccctctagaaatctgtcctaaggaaataaacatccatccattcaacaactactgattgagcacctattatgtgctatatactatatcaggcatggaagttagcagtaaaaataccaagtctctgactcagtggaattaatcatctagtgggggagagagaaaataagtgtgtgtgtgtgtgtgtgtgtgtgtgtatgtgtgtgtggatttatatatacaaatgtattttaattaatttaaatgtaaatcttaatttataagtctatttattaaataaaaaatgtgcattataataataaatgcataaacttttattatatgtaataaatatcaaagcacatatattcaaaacatatataaaactatatataaattatatatgtaaaaaatatatatagcggccaggcgtggtggctcacgcctgtaatcccagcactttgggaagctgaggcgggtggatcacctgaggtcaggagttcaagaccagcctggctaacatggtgaaaccccgtctctactaaaaatacaaaaattagctgagcatggtggcacgtgcctgtaatcccagctactaggggggctgaggcaagaggattgcttgaacctgggaggcagaggttgcggtgagccgagatcttgccactgcactccagcctgggcaacagagtaagactctgtctcaaaaagaaaagaaaagaaaagaaaaaaawatatataatgtctcatagtagtaagtgcactaagaagaaaaataaagctggtcatggtaaagagtcagctcaggcctatctgaagaggtgatattgaaacctcctttgcaaagattgagacagagatatctaacatggctgactccatcttgcttctattctcacaggctggctgtcctcactcagtcctgggtgtaggccaagctaaccatggcaggaatttagtttacagtttaactttgaagcaaggatgataatagttcctccctaaaattgaccctccctgccttgttttgtaagtctactgaaaggtgataagattaagagtattaaaggggcctgaattctgctaagatataggtgtagttaaacgataaccagccattgtttcttagcttgcttttctacaatcccttactgctcagaagtcctgtggccagaagttacaagatttgtgactttcccaatctttcttatagacaacatcactgttgtagaacctaagatgggttttttgagatgtttttcagacttttcaactgactgactccactcagacccatgactca

SEQ ID NO: 705077 - DNA, 623 bp, Homo sapiens
cacacatatatacacgttatatatacacacacatatatacacgtatatatacacacatatatacacgtatatatacacacacatatatacacgtatatatacacacacatatatacacgtatatatacacacacatatatacacgtatatatacacacacatatatacacgtatatatacacacacatatatacacgtatatatacacacatatatatatacgcgtatatatacactcatatatatatacacgtatatatacacacatatatatccacgtatatctacacacatatatatacacgtatatatacacacgtatatatacacgtgtatatacacacatatatatacacgtatatatacacacatatatatacacgtatatatatatacacatatatacacgtgtatatatatatacacatatatatatatatatgtactctggttgtgaatgatgcaagtattacaaatattmttccagtctgaagcttgcattttcatttatgaaggcaagtttattaaggagaattgacacgcacgatcacaaagtcaagtcccacgataggccatctgcaagttgaggagcaaggaagtcaatggtggatcagtaggagtcc

SEQ ID NO: 705078 - DNA, 2935 bp, Homo sapiens
tcagcttttgactattcagagaaatcaggctgaaaattaggataatgaaaccaggaaaaatagggaaaaggaaaaaggaaacaacagataacttaaatttaaaaaaaaattagaataaagtagaagaattaaaatcaagcatattttttacattaactgtgaatggactgaatttgccaattaaagtcagaactgggtgattgaatttaagcaattaaaactgacctggccaggcacggtggctcatacctgtaatcccagcactttgggaggccgaggttggcggatcatgaggtcatgagattgagaccatcctggctaataccgtgaaaccccatctctactaaaaagaaaaaaaaatacaaaaaattagctgggcatggtggcacgctcctgtagtcgcagctactcaggaggctaaggcaggagaaccatttgaacccgggaggcggaggtggaagtgagcagagatcgtgccactgcactccagcctgggcaacagagcaagactccatctcaaaacaacaacaacaacaacaacaacaaaaactgacctaaatgctattcctaagaaatacttgaaacacaaggacacaaaggaagttggatgttaattgaaatgtgtaagttatctcagaatgcacatttgctcataattttaacttctttcctccatcaaacttcttgcttaaaatgaagttataaaaatcaaagtagcagttataagtactactaatactcatctacaacaaaattgtctaacagaaatataaagactatgtcttatatttagggtcttatataatagggtttattgaggaatatagaaattacatttgatacttctacagagaaaatttaatacaagaaatgggttacacaggtgttggagggatgaaagaacaataagagatcaatgaagtgacggagataataatggcaggaaacagctgccactgctatggttggtgaagcaagagaaaagttggggatctcagaatctacatgtttggaaaagacgtcatggccttgggtcttggaaagggggtgctgcccagctggtgctgatgtctcagaaggagtgaaaggtagttgattctgggcataccagaaaaaagctagagtctgtaaccagctgtccctgctgggattaagggctgtttctggagtgatactgatgaatagagcaaacctaacaggaagaaagaattcccttttccttgttttagttcatttgcactattataacaaaatacccaaggctgggtaattgataaagcacagaactttattttctcgcagttctggaggctgggacatccaagttcaaggcacaagcaggttcagtgtccagtgagagccctgtctatgcttccagaatggtactttcttgctgcatcctctggagagacgaatgctgtgtccctacatrgcagaaagtggaagagcaaagcatgaagcctcttttataaggtccttagcccattcacaaagcagggtagccctcatgacctaatctcctcttaaaggatccatctcttaattctatcatgttgaacattaagtttcgacacctgtatttggaggggcacattcaaatcatagcacccctctttctgcccttttaataacatcttctcttggcagagtccaacaagaagccagctggtaaagaagggtggatttggagttgagttattataggtaaattaccagtactgtccatccctatacgtgttcacacatgaaaacaagacactcctctgtatatgtttgaacttccaaatctcgccactaacatctttatgcttctgcctgacaagatgcaagtacccttagtataaatgaagacactccaacacccgtctcctccccaaaaaagaaggcacgaagttacaggagtcatgatattcacttatggcagaggaccacagtatttctgaaggatgttaattcttctacttcagtcataatcccgcctgtctgtagagtataatacaaagactgtattataaagttacccagtaagaggaaaaaaggaggaataaacaaataaattagccaggaagaaaatgtacagagctgtgacaatctttcaccccttctgaggcatcagcaccagctgggcagcatcccctttccaagacccaaggccatgacctctttcccaacgtgtagattctgagagccccaacttttctcttgcttccccaaccacagcagtggcagctgtttcctgccattattatctccttcacttcattgatctcttattgttctttcatccctccaacacttgtgtgaccaatttcttgtattaaattttctctgtagaagtatcaaatgtaatttctatattcctcaatgaatataggaatgtgtcttctccaaattcatcgttgatatttttaccttatgaaatggcccacatttactctcaaagatctgaatcctcaattgtcctttctttatttgattgcagctgtgtttttcatcagcttttactattggataagttctaaggggtgcccctagagactcctctggcttccagacatagttgtctctgcctcactgcatggcagcaacccaatttctcctgcatagttaggatcatctcccagccagttaggtacttctttgcctgttacctaagatttttgacacttaatccgctgctagtccagaattaaatatgtgaaatttactctatttataagctaacaagttagcttatcacagttttgtggatactagcagaataaaagtctcctggatcagacacaaaggattgtaataagcaaaggattgtttattactcagaggaatatcagtagccagagaatccagcatttttcaccagttctctgagccctaattcccacagaacagcatgaagaaggccagatgacacacgcaaacaaagtgggtttcg

SEQ ID NO: 705079 - DNA, 630 bp, Homo sapiens
ttcctgggttcaaatgattctctggcctcagcctcctgagtaactgggactacaggcaggtgttaccacacctggctgatttttgtatttttagtagagatggggtttcaccatgtcggccaggctagttttgaactcccaacctcaggtgatctggccgccaaggcctctcaaagtgctgggattacaggcgtgagccaaggtgcatctttaaatgtgggacttggttagaattagttaagaatcacaatataataatttaagattggtgaacatagcaagagaatattttgaggatttcgagatgaggagttcaaaaagtcttaggacataaaccattgatgttttrctgaagagctgatgtgttcctgtaatgaacaatatatttaatttatttattgtgcaagagtcttcttacgttaataaagacaatggaatagtaatatcacattaatatagctagtaagctgtgtaggaattgattcttgagcaggaatataacttgatgagaattgtgttttataaagatttttccagcatttatgaatggaataaaaagatacctgatagacagaaaacagcattagctgggaagttgttagcaatagcaattagtaaatgtgcctgaat

SEQ ID NO: 705080 - DNA, 878 bp, Homo sapiens
ttatagtctcttcatctttctttttgtaattcctataatagaaagctaggaaattctgtgacagagctttagcaccggaatatcacactcaagagagcatttactaaatgtccttgggaatgtccagtaggtcacataactgagattgcagaattgtacttgaccgctggccttctcccatgcaggttcccatcaggaagccaattgcttgctggtacgtaagaagacgcatattggggctttctatttttatttaaagtcatatgcattttctaggtcttattttcccagcttcataaattgatttcctctcaggtgtctgcagtttagattgaagtttttttgttttgagaattttattagagttaggagactcaggtgtcagttgtgtcagactctaagcaggtcacttactgtatcttcaggcatcatttctaagtcagccttttatagttcctcagcctatttctctaacgccttaaatcctcaactaacttcaagtgtaacaatatttggagttttttttttttaatctctagggctccatagaaaattccaaatttttctaactatattgtcccactatctacaatctttgctttaagacaattttgacagtgtaagctattttttttttwaaaaaaaaagcattgagcttgtgttctgaccttgaatttttattttctccttgatgtattgcagtttctgagaagacaagatttaagattttcctcatgatagtctcacccccaactagaggttcaatgagcaggctgctagaacccttgttggtaaccctaaaaagtgtattagtgttactgctttgtcatttccagtttagctcagaagccaggaatatttgtagaagttattttgtc

SEQ ID NO: 705081 - DNA, 978 bp, Homo sapiens
tgtagcatctttggtatgcagtataattgataattttctagtctgtaaaatatcccaggagatactgtaatctctaatagaacaaagatgagtggctggtacatggtaatgctcaataagcactagcctaatgaatgaatacattttaactaaaagctgccagctaatttttttttgcatttggaaaagggaaaaagcatactctcactatctatgttttagtcacctcaatctttgaagacagaaatgttttgccctaactgaatcttttattttgtctaaaattttccagtttattcacaaattctgttatgacttccaacatcttaatatgctactactcaacaaactctgggcaaatttcatagctaacaaacactatgtcccaatcttagtcaaaccatgataaaatactgggcattctgatcctcagcttatataggaattgatgttctatgcattgtttacataacatactctggtcacaagctctgaacgcttccagaaacttgcattggtaaatgttagaactttacatggacactaaaagttaccatttgtctttcttaggtgacccttcatcagatatacaatgtgttcctraatgtattttggggaaaactaactctgcaggttcccaatagcattcatttaaatgaagaatattccacaatccaataaaattgggaaatgctgaattaaaatagcatctttactacagaaattcacaaagctttgaatatattaatgagtactgagaatatctgggctggtggataaaatatgaagctttccccttagcttgacttgaccttagatccctttttgtgcaaagtacattttgggactagtgaaaaaccagcttgggaaatgctttttctaagcaatagatctacttgaaaacattgaaattctgtataaaattttgttaattaaaatattctatgaccttactaagaaatattttaatactctatg

SEQ ID NO: 705082 - DNA, 978 bp, Homo sapiens
tgtagcatctttggtatgcagtataattgataattttctagtctgtaaaatatcccaggagatactgtaatctctaatagaacaaagatgagtggctggtacatggtaatgctcaataagcactagcctaatgaatgaatacattttaactaaaagctgccagctaatttttttttgcatttggaaaagggaaaaagcatactctcactatctatgttttagtcacctcaatctttgaagacagaaatgttttgccctaactgaatcttttattttgtctaaaattttccagtttattcacaaattctgttatgacttccaacatcttaatatgctactactcaacaaactctgggcaaatttcatagctaacaaacactatgtcccaatcttagtcaaaccatgataaaatactgggcattctgatcctcagcttatataggaattgatgttctatgcattgtttacataacatactctggtcacaagctctgaacgcttccagaaacttgcattggtaaatgttagaactttacatggacactaaaagttaccatttgtctttcttaggtgacccttcatcagatatacaatgtgttcctaaatgtattttggggaaaactaactctgcaggttcccaatagcattcatttaaatgaagaatattccacaatccaataaaattgggaaatgctgaattaaaatagyatctttactacagaaattcacaaagctttgaatatattaatgagtactgagaatatctgggctggtggataaaatatgaagctttccccttagcttgacttgaccttagatccctttttgtgcaaagtacattttgggactagtgaaaaaccagcttgggaaatgctttttctaagcaatagatctacttgaaaacattgaaattctgtataaaattttgttaattaaaatattctatgaccttactaagaaatattttaatactctatg

SEQ ID NO: 705083 - DNA, 978 bp, Homo sapiens
tgtagcatctttggtatgcagtataattgataattttctagtctgtaaaatatcccaggagatactgtaatctctaatagaacaaagatgagtggctggtacatggtaatgctcaataagcactagcctaatgaatgaatacattttaactaaaagctgccagctaatttttttttgcatttggaaaagggaaaaagcatactctcactatctatgttttagtcacctcaatctttgaagacagaaatgttttgccctaactgaatcttttattttgtctaaaattttccagtttattcacaaattctgttatgacttccaacatcttaatatgctactactcaacaaactctgggcaaatttcatagctaacaaacactatgtcccaatcttagtcaaaccatgataaaatactgggcattctgatcctcagcttatataggaattgatgttctatgcattgtttacataacatactctggtcacaagctctgaacgcttccagaaacttgcattggtaaatgttagaactttacatggacactaaaagttaccatttgtctttcttaggtgacccttcatcagatatacaatgtgttcctaaatgtattttggggaaaactaactctgcaggttcccaatagcattcatttaaatgaagaatattccacaatccaataaaattgggaaatgctgaattaaaatagcatctttactacagaaattcacaaagctttgaatatattaatgagtactgagaatatctgggctggtggataaaatatgaagctttccccttagcttgacttgaccttagatccctttttgtgcaaagtacattttgggactagtgaaaaaccagcttgggaaakgctttttctaagcaatagatctacttgaaaacattgaaattctgtataaaattttgttaattaaaatattctatgaccttactaagaaatattttaatactctatg

SEQ ID NO: 705084 - DNA, 1763 bp, Homo sapiens
aaatcaagtgaatatcccccaaaagagttatagccaaactcaagaatttggatgttttgattccagggatttgttattacatagttcttccattattttcagtagaatagctttcttaactagtacaaaatctgagctcatatctgacctcatttttattcttatgtcattttgaaaaggaaacaataatgagtacagtaagtctaaaatttattctaaaaccataatcaatttcctggcttctataaggaaataactttgatacgatgagccaaggttcgtgttggtctttctttcttcccttccggcaagcattactatcacctgtctgaggggcacctctggcccagaaaacagatgaatgattgacatcatctaagcccagtgacttaccaggaacttgttaactcagataataaaggctctccacattttcatgcactttttggtggtttattttgattttaaaatgccttacactttagaaacaatgagtctaatccccaatggaataggaatgttgtctatggagagatctacttctcattcatgatatcaaattttcatcattttaattattcattttcatttaatccaggtatatttgacatttgctttattgttagagagattaaaatatattgtctttgattttaaaaaatccacatgcatctcagaaataggtgtacactgtgtcatttgtaaatgtagaaatagttatctgcaaaggtacatgcttttcttgatggtcaaagaaataacattctttaaattaacatttcccaaatgagttctatagaaaattagttctgcaggattttttttagatattaaattaaggaaggatactgtagtttaatatgtttagaaaactccaggttaaacaaagttaaatgggtttcttgactgcagtatgtctgatattgtttaaatgttaaattgccttgtgagttcccaaagggagcatatcatatgcaatattttctgaatttaattgatcatataaacctcttttgttgttgttgttactgctactgatgtttatttttcgcttctttgctttcacagagagcatcatctgttagtgttacacagcatattttagaaaatgctctgtatgtaaagatacgagcctttcayattgcatgaacatataaaactactacgtgctttaaattaattcttactttaaagattaatttaacattaaattctaagtaaatattaaatgcaaattttgagtcttcatacagagtcctcaacctaaagagatgtaagtatctacactctatggcagtggttcttaaaatgtagtgcacgtacagcagcctcagcatcatctggggacatagaaagacattctcagaccccatatcagacctggatcagacatgctggggttaggcccgccaatctgtgagtagaggtacaataagatgcgaagttaaaccacagttacacctaaacatataccaatcagtcctctgttctaagctgtttctttattgcatcttgaaataagtaaagcaaactcagcactacaaagaatatttatgaaaaaagttaatcagaatgtttggatagttgattgttccaatctgtattctgtcacattcacaattgcttttaggcatgattttaatgcccttgctctataaatactccatgagactcctcaactttgaaattacaacctgcatagccttcagaaattcaataagcattatagtgtaaaatcaaattactaattaggatagtcttga

SEQ ID NO: 705085 - DNA, 1763 bp, Homo sapiens
aaatcaagtgaatatcccccaaaagagttatagccaaactcaagaatttggatgttttgattccagggatttgttattacatagttcttccattattttcagtagaatagctttcttaactagtacaaaatctgagctcatatctgacctcatttttattcttatgtcattttgaaaaggaaacaataatgagtacagtaagtctaaaatttattctaaaaccataatcaatttcctggcttctataaggaaataactttgatacgatgagccaaggttcgtgttggtctttctttcttcccttccggcaagcattactatcacctgtctgaggggcacctctggcccagaaaacagatgaatgattgacatcatctaagcccagtgacttaccaggaacttgttaactcagataataaaggctctccacattttcatgcactttttggtggtttattttgattttaaaatgccttacactttagaaacaatgagtctaatccccaatggaataggaatgttgtctatggagagatctacttctcattcatgatatcaaattttcatcattttaattattcattttcatttaatccaggtatatttgacatttgctttattgttagagagattaaaatatattgtctttgattttaaaaaatccacatgcatctcagaaataggtgtacactgtgtcatttgtaaatgtagaaatagttatctgcaaaggtacatgcttttcttgatggtcaaagaaataacattctttaaattaacatttcccaaatgagttctatagaaaattagttctgcaggattttttttagatattaaattaaggaaggatactgtagtttaatatgtttagaaaactccaggttaaacaaagttaaatgggtttcttgactgcagtatgtctgatattgtttaaatgttaaattgccttgtgagttcccaaagggagcatatcatatgcaatattttctgaatttaattgatcatataaacctcttttgttgttgttgttactgctactgatgtttatttttcgcttctttgctttcacagagagcatcatctgttagtgttacacagcatattttagaaaatgctctgtatgtaaagatacgagcctttcacattgcatgaacatataaaactactacgtgctttaaattaattcttactttaaagattaatttaacattaaattctaagtaaatattaaatgcaaattttgagtcttcatacagagtcctcaacctaaagagatrtaagtatctacactctatggcagtggttcttaaaatgtagtgcacgtacagcagcctcagcatcatctggggacatagaaagacattctcagaccccatatcagacctggatcagacatgctggggttaggcccgccaatctgtgagtagaggtacaataagatgcgaagttaaaccacagttacacctaaacatataccaatcagtcctctgttctaagctgtttctttattgcatcttgaaataagtaaagcaaactcagcactacaaagaatatttatgaaaaaagttaatcagaatgtttggatagttgattgttccaatctgtattctgtcacattcacaattgcttttaggcatgattttaatgcccttgctctataaatactccatgagactcctcaactttgaaattacaacctgcatagccttcagaaattcaataagcattatagtgtaaaatcaaattactaattaggatagtcttga

SEQ ID NO: 705086 - DNA, 1763 bp, Homo sapiens
aaatcaagtgaatatcccccaaaagagttatagccaaactcaagaatttggatgttttgattccagggatttgttattacatagttcttccattattttcagtagaatagctttcttaactagtacaaaatctgagctcatatctgacctcatttttattcttatgtcattttgaaaaggaaacaataatgagtacagtaagtctaaaatttattctaaaaccataatcaatttcctggcttctataaggaaataactttgatacgatgagccaaggttcgtgttggtctttctttcttcccttccggcaagcattactatcacctgtctgaggggcacctctggcccagaaaacagatgaatgattgacatcatctaagcccagtgacttaccaggaacttgttaactcagataataaaggctctccacattttcatgcactttttggtggtttattttgattttaaaatgccttacactttagaaacaatgagtctaatccccaatggaataggaatgttgtctatggagagatctacttctcattcatgatatcaaattttcatcattttaattattcattttcatttaatccaggtatatttgacatttgctttattgttagagagattaaaatatattgtctttgattttaaaaaatccacatgcatctcagaaataggtgtacactgtgtcatttgtaaatgtagaaatagttatctgcaaaggtacatgcttttcttgatggtcaaagaaataacattctttaaattaacatttcccaaatgagttctatagaaaattagttctgcaggattttttttagatattaaattaaggaaggatactgtagtttaatatgtttagaaaactccaggttaaacaaagttaaatgggtttcttgactgcagtatgtctgatattgtttaaatgttaaattgccttgtgagttcccaaagggagcatatcatatgcaatattttctgaatttaattgatcatataaacctcttttgttgttgttgttactgctactgatgtttatttttcgcttctttgctttcacagagagcatcatctgttagtgttacacagcatattttagaaaatgctctgtatgtaaagatacgagcctttcacattgcatgaacatataaaactactacgtgctttaaattaattcttactttaaagattaatttaacattaaattctaagtaaatattaaatgcaaattttgagtcttcatacagagtcctcaacctaaagagatgtaagtatctacactctatggcagtggttcttaaaatgtagtgcacgtacagcagcctcagcatcatctggggacwtagaaagacattctcagaccccatatcagacctggatcagacatgctggggttaggcccgccaatctgtgagtagaggtacaataagatgcgaagttaaaccacagttacacctaaacatataccaatcagtcctctgttctaagctgtttctttattgcatcttgaaataagtaaagcaaactcagcactacaaagaatatttatgaaaaaagttaatcagaatgtttggatagttgattgttccaatctgtattctgtcacattcacaattgcttttaggcatgattttaatgcccttgctctataaatactccatgagactcctcaactttgaaattacaacctgcatagccttcagaaattcaataagcattatagtgtaaaatcaaattactaattaggatagtcttga

SEQ ID NO: 705087 - DNA, 1763 bp, Homo sapiens
aaatcaagtgaatatcccccaaaagagttatagccaaactcaagaatttggatgttttgattccagggatttgttattacatagttcttccattattttcagtagaatagctttcttaactagtacaaaatctgagctcatatctgacctcatttttattcttatgtcattttgaaaaggaaacaataatgagtacagtaagtctaaaatttattctaaaaccataatcaatttcctggcttctataaggaaataactttgatacgatgagccaaggttcgtgttggtctttctttcttcccttccggcaagcattactatcacctgtctgaggggcacctctggcccagaaaacagatgaatgattgacatcatctaagcccagtgacttaccaggaacttgttaactcagataataaaggctctccacattttcatgcactttttggtggtttattttgattttaaaatgccttacactttagaaacaatgagtctaatccccaatggaataggaatgttgtctatggagagatctacttctcattcatgatatcaaattttcatcattttaattattcattttcatttaatccaggtatatttgacatttgctttattgttagagagattaaaatatattgtctttgattttaaaaaatccacatgcatctcagaaataggtgtacactgtgtcatttgtaaatgtagaaatagttatctgcaaaggtacatgcttttcttgatggtcaaagaaataacattctttaaattaacatttcccaaatgagttctatagaaaattagttctgcaggattttttttagatattaaattaaggaaggatactgtagtttaatatgtttagaaaactccaggttaaacaaagttaaatgggtttcttgactgcagtatgtctgatattgtttaaatgttaaattgccttgtgagttcccaaagggagcatatcatatgcaatattttctgaatttaattgatcatataaacctcttttgttgttgttgttactgctactgatgtttatttttcgcttctttgctttcacagagagcatcatctgttagtgttacacagcatattttagaaaatgctctgtatgtaaagatacgagcctttcacattgcatgaacatataaaactactacgtgctttaaattaattcttactttaaagattaatttaacattaaattctaagtaaatattaaatgcaaattttgagtcttcatacagagtcctcaacctaaagagatgtaagtatctacactctatggcagtggttcttaaaatgtagtgcacgtacagcagcctcagcatcatctggggacatagaaagacattctcagaccccatatcagacctggatcagacatgctggggttaggcccgccaatctgtgagtagaggtacaataagatgcraagttaaaccacagttacacctaaacatataccaatcagtcctctgttctaagctgtttctttattgcatcttgaaataagtaaagcaaactcagcactacaaagaatatttatgaaaaaagttaatcagaatgtttggatagttgattgttccaatctgtattctgtcacattcacaattgcttttaggcatgattttaatgcccttgctctataaatactccatgagactcctcaactttgaaattacaacctgcatagccttcagaaattcaataagcattatagtgtaaaatcaaattactaattaggatagtcttga

SEQ ID NO: 705088 - DNA, 1255 bp, Homo sapiens
acttttgaaatgataggataagtaaaccaggtaaagttaaggacttaatgaatgattttttttttctattaactgatgaataatcactaaaactttcagctgtggggaattgtgtttttggcagagacagggaggcactctgaagaaaactttcaacgatttgcattttagaaaatgttttgaataacttgctaatacttaaaaaagtacttctgtgaagttttacctcctcagtgtttgytatttttatctaatcctatttttcatagtaactcattgtgaaatgtttatctgtgcatttaataggttaacaaggaggaaaaagcagaaaaataatgttttttttccatagtcagaagagagaagaaatatggaagaatagtgaggcagtggcaggcccattctaattcttttttaaaaaggtgggcatggagaaagtggatcaagggtgaaataaaagaagaggaactggcagatgtcacacaatagccgtaggatccatttgcaagcatttgtaaaaaatgacccccaagtactgaataagtctttgagggttagaattcccaatagttggtagaagtaagaaccagagactttaaaaaaaatcaaattgaatataacttttactccaggatgcaatggtgaggaaagttaggctgaacatgccgtattaaaaactttcactggcaatggcaacacatagatactgggagcatagaggaagggttgctaacattactgcttgggagaattagggaaagtgtcacatgggcatttgaaatatgtgtattggtgtaaattctttttatgaaaaagtagggaattagagaggagatggacttactgaagaatatagagaaatactaatttaggctctcagtgatataccatctagagcatgaaaaaatacatagtcaaccatgattagatgattttacctataagtaaaagacataatttcatatttagacttgttttatatactgtgaaatgaatatttacagacattaaatctagtcgctttagttttttcttcttcttcttctttttttttttttttgggacaaagagtcctgctctgtcacccaggctggagtgcagtggcgtgatctcggctcactgcaacctccacctcccgggttcaagcagttctcctgcctcagcctcctgagtagctgggattacaggcatgcaccaccatgcccggctaattttttgtatttttagtagagacggggttttaccacatgttggt

SEQ ID NO: 705089 - DNA, 1329 bp, Homo sapiens
tcgatgagatgaaacatttgaacatcacgaagttttgaacctaggtgcttaacagatggttagttgttccagttatccttttaaatattaattttatcatttacaaaatcaggttatattcatgtctcatttttcaaaaatcaaactataaatcaataaaaatgaaggactaaataaaaagtgaactttttattctcccctaatctcataactttcctcaaaattaaccactggtgttcactcttccaaaaagtttataattcatatctatcttcatgtctgtgcgtatcttgttttttccgtatataatatgactgggacaaattttcatgtcaatattwatatctctagtgtatctttttaaatggctacatagtattccatagtatgcatatgcataaatggttagccatttctcccttgatgaacatctgtttctactgttttgtatatatgtgcacgtttgaaaaagatctactcctagaatggaattgctaaaccaaagagtttacacattttacttttcagccaatcttaataaattacttttgtaaataaaccttatgaattatattcgtacccacagtatatgagagttactgctttttcacaccctcaccattatgtaatatttttatgtaagcttttttcatgcgttgcaacctgtatgggctaaaagaggaatgtggtagatggcttcctattttgctgaattattaatgaggcttgctatcttttcctgtgttcattggccatttgtatgtctatgaacctatgagccttcttatctcatttatccattattctgattgggccattttttaaaggtattgaactgtttaagctctttacctattattcataccaatcctctgcagtctatgtaacaaatatttgcccccagtacatctcttacctttaagctttacttaggttaactttgtccaatcagaatttttaaaatttaaattgttatagctatgttttttccttttaacttttttctatgtgtataatttcaggcgtacctaccccatgaatacatatttttacaatatcactataatgagcttttttcatatttggggttttaattcatctgaatttatttttaaataatataaagttctgtagatagttaatgaatagacaattgctgatttgaatgccccttttactatatactaaattcatactaaattatacaactgaacccatgcctgggttccctcttctttatcattgagttatatagatattcttacatcaataccaaaaccttttaattatgtaatttaatttcatagataagttaatgtatttaattta

SEQ ID NO: 705090 - DNA, 585 bp, Homo sapiens
ctttgaccactccatatgtgaagaagtaaatttagtgattagatggaaacaagagaggccaagctcagctttacattttaaagaacagtctcctgtaaaattaatgttgcatttagttcactttggtaagacttcaagggccatcaattttgttcttaacaatgatgcagatccaaaagaaacataagacatggctcctagtctcaagacgtgataaatttactgtcagataataatacaggacarcatttgatgaggagacaagcagaggagatgtgggtgtgggaagttcagaacagtgactgtgtccatgtgggctatattgttgctaaggtctcgagaggtgggcattgaatgatggatggtcagagagaaaggttagaaagtcataaacaaggatctggaaagaatcagtatacagaaatccactgatccagtgcctgagagagtccaacctccctggcattaggctttacgcagacaacagtaggaggtggcattgaacaaaacatcaaaatagtggggtggttgtggtctgaaagctcccctcaagagtaatggggagccagttatatttttgagcca

SEQ ID NO: 705091 - DNA, 1316 bp, Homo sapiens
cagcattagcttctttagcttctttctatgcaccagagggaaagtaaatcaagatggaaaaataagaagaaagaaagaaaagaaaaaaggaaggaaggaaggaagggagggaaagaaagaaaaaagagcgtgaaacagcatgaagggaccttcttttttttttttttttttttgaggtggagtctcgctctgttgcccaggctggagtgcagtggcgcgagctcggctcactgcaacctccacctcccgggttcaaatgattctcctgccccagcctcctgagtagctgggactacaggtgcagaccaccacacccggctaattttttgtatttttagtagagatggagtttcaccatgttagccaggatggtctcgatctcctgacctcatgatccgctgcctcggcctcccaagaagggaccttcttgagggggaaacatgagccacagtccaggcactgtgctgacccgcagagcaaatcaccaatttagaattccctaaactttgacagttcttttcattcatttattcgacctatagataatttcccttcagattagttgttggtgataatgataatggtgatgtgacaatgactatacttggtagaaatagcattgacaaaacatgaaataaatgcaatacgcttttaactaaagcctccaaaaaaaataatcacagaattccattgacagaatttcaacttctattaaaagtgaattgtttttgaataattattttctcattacagtcataggcagaataatctattttaaaattgtttgtaacataaatagtcatttaatcatggacaccaaaagaatgaatactgtcaaacaaaaaaccgaaaagtcattcgagtgtaaagtcgcacctattctatattttctagtaaagactctgctgtcaccttgcatttggaaacttggatcttgattgacataggtgcccagaacctctcctgatgaaaagccattggcaactgttttgggaaatgtaagatactagatttctttccaagtaggaaacagactcagagaattaattagtaatatttgagatttttcaaaacttacgaactacatgccaaaattctgatgatttttacttggcttcaaattctagagtaaatatgactgtaatgctcactcccttctattttggtataatcatttggtgaggattacactcatatttacccatttcatgggattataatgaaggatattgcatattgcttctgaaacatactccttttggggattgcttcatataaagagggaggcttggggattggatatatagagagsagag

SEQ ID NO: 705092 - DNA, 2085 bp, Homo sapiens
aaagaaaaaaaggcaagaatcatgtttaaaacatcacccatagaaaagataactctcaaaattgactatattttcattaagttcagaatagagaacttgcttagcaggtgaatcagtttggattaggcgtggctccttacaaaaacagcgacaacaaaaatcccaaataaaagtagctagacaagcagaagtttatttttctcacataaaagcaatcctgaggttggcagtcaagggctggcataagtgttccacaatgtcatcaggaaaccagactcttttcagcttcccactccatatctggatgtgatccttgttcagcagtattatctactttgaacagtaaaataaaagaagacaagaagggctcacccaacacttcttatgactgatcaccagcacttagtcttacaactaactgcaatggacacttggaagtgtaatcctttagttaagctaaaaatatataaatctacactaaggaaggaggagagagtgaaaaggaggcaatacctagaaatctctgctataagagtggtgtaacaatcatcaaaatttctgtcatttcgagtctaaccaagcaatgagcataaacaagttatatttataaactgcacttagaaattttcaatgagcttccataaattaaatgtaaacttttaagtttttyttctacttttatgtgccaatggtaattatcctgcagccatgttactcatatatatttttcaaaagctgtgtgccagatcaaaaagttataatgttcaatgcacacaatgaactctgttttcaatcactgtgcaaaagggaggaatgtttagaaaaagcaagtaatcacttaagtaatggcagagtctgaaacagattatagggtaccatgtcaatttctcaacaaacatggagacttttccccctgtaggtgcttgaagatggctaaaaattatttgattcctccttctattgaggctggattctacctctcttctcagtaacctggctacccctgtaatatgcatctattaacagaatgcagtacaagaaatgctatgtaacttctgacgctaagtctcaaaggatttgcagtgttttccttcattgcttgaaatactttcttttggaacccagttgccatatacttagaagtctaagccaagttgagaagccatgcgtagaaggaacaaaatacaagccaatgctaactgccagtcatgtgcatgaattatattggatgatggagcccagtcagatctgccctcagctgagataaagagtaaatagagtaaaacaatccagatgagcctgtcaaaccttatgaaatatggtacattttttgggccactaagatttgttatacaataatatataactgacacacacacaaaactgacacacacaccctcccacattaaatcagtgataaaatacaatttgttttcatatggcattagattgaaaatatttgttgtctttctaaaataatgattcttaaacttgttaaatcattaggaaatgccaattgctccttatgaatcaagactatgccttctcacctttaaatccatactgcatggactagtagtagactgagtcacatgtaaatatttatttaataaaagattcttttcaagaaatacacatttataatgtcaaaagtaagtgaggtataaagaatgaaaactttttgataagcagtgtaaaaatctcaataaaagatttattcttttggaaattattttgagcgttttaaggtgaatgacatttacggatagaatgttttccttcaataaaaaaaaggaaggaataaaaaagaaagccacttttggtaatctctcattttgttagtcatattaaattgacatttgatttctggctatttttcaaaacatatttcctgtactgtttgtagagttcttcaagtttaaagttcagagccaaatttgtattgcatatatttttactacattgtaaagaacaagacttttgactacagacattttttagatccccctcatgtgattactttgtgaatttaatagtctatacaatttaaatctcccctttctaattctaaaaggtgatatggag

SEQ ID NO: 705093 - DNA, 784 bp, Homo sapiens
attactgatgcaccattcaaaagtattttggatttcagctgaagagagaaaactggaacaataaagtgtgggcaggtggtggcggcaggcatacttcatcaaaggaaaaagtctatcgaggactttcattaagagcataccctcctcaaaatatttgcctgctgaacctgagatgacatgtggaaacaaaactcaagataagacaggctcttgcccacttacatcactaataagaatttaggcaggtactccacctaaaagagccatacttttactcccacggagataaaatttgagattgtacagacctcatcactcagattttgcatataaaatatcatggtccacaaggccaaaaactgtagataaatcatgtcccctatagtatatgacccttacatctgcagctctatagatatyatttgtcatttttaaaacaaatgttttagtgtttggataagataggaggaaaaccaatttctgtgatagtaatgtactgggatgtcagcacataaccaaccaatgactaatacaaagagaatggagaggggatatgctgctaatttgtcttgactagctgtagaaataagcatgcatttaaaacataaggtgatggaattttatcaagactgcaaaaacatggtcttttccttagaaaatgtatatacctgagtaaaaagatgagcatttttttaggaaaaattgagaattgtttcaggggcattcagttgtcaccctcattgagctcctccatttcttcttttctcttcttctgaaaagccag

SEQ ID NO: 705094 - DNA, 1052 bp, Homo sapiens
ggacaggcaagagaagttgacatgctgtgaccaaattgtactatagatgagattttaagaagcagttatcttagaaaataaagattgctggagcctagagtagtcctgatcatttagtgtaccagctgatattttctgataaataaataarttgcctataattaattatcacattttccagaatgggcacctgttctcttaagccaaggaagtgtgtgtatgtgagagatccatttgattcatgtagcgtgtcaatctgaaaaggataagataggttacttcatcagcctggtgtcctggaatgattttttttttttttttaattttattttttgagacagagtctcgctctgtcacccaggctggagtgcattggcatgatctcggctcactgcaacatccgcctcctagattcaagtgattctcatgcctaggcctcccaagtagctgggattacaggcgcgtaccaacacgccaggctaatttttgtatttttagtagagatggagtttcaccatgttagccaggctggtctcgaactcctgacctcaggtgatccacccaccttgccctcccaaagtgctaggattacaggcgtgagccactgcgcctggctggaatgattttcttgagcccctgtgcttgctatttttgctagtcacttggaatctggaagaaacccagcaaacctctctgaatatttaaagtctatttaacagggctaattagataaggagatgatgccagtaaccaccttcatcagatagcactcccatcctgaattgagaagaacattgcttgaaagtttggaagttattatggtgtacagtattctgcagataattgttaacctttcatttttctttctttcttttttttaagatacagagttttgctctgtcacccaggctagagtgcagtggtgtgatcatagcttactgcagcttctaactcctgggcttacgcagtcctcccaacctcagcctcccaagtggctgtgactacaagcacatgcccatacttggctgatttttttagtttttttctggaga

SEQ ID NO: 705095 - DNA, 1589 bp, Homo sapiens
ggagtgaatagagttctgtatttcgagtaatagctcaggacttgtagaaacactttttctaataattttctatcatgtctctttcctttccatcctagtagactcaaaataaaataactcctgagtcttttctcttggcaatatcattgaacaactagagactataatacaagttttcaaaaatgtattgagggagaaatcaagcaatttaatttgttttcaaaaatacttaaaataccctaaaggaattaaagtgtcttttttgcagctggatatttctctcatataatataagagacaatttaataccagaaaatcagaattgatgagggatgagggggcaagtgtatgtgtgtagggtgtgagaatagtgcttacctttgattttaatgtgagccctttttataatttcatttagcatgtaatggctaaatcacaattagctttttcattctgaagacaacttgttaagtagttagagccaattagtaatctcaatagatttttttcattcttttttgtgctattttaaatatgttgttatgcttaatgtctgtggacattttatgcttcctttacaatgatgacttactattctataaatgtgcctttgccatatagtatmataatgataatttgggaaatttcactggaattatgtttcagggtatattttttaaaaactgtcctaggccaataaatattttgatgttactacatactattctattaaaattttatgattttgcattatatgatatggaacagtataacaatattttgttttatttgaaccccttgatgatatttatcatcattacccattaccctgttgatgatatttataaaatgtagcaaagcatacattttcctataaaattagttaaggaactttcttggttaatttgttctcatttctgtttatagaagcaattattgtttgaagtcctatttcaaatttttgctttttgagtgatgatgaggatgagttaatctgttgctatttctcaagtaagtaaaaagtaataactcttagaaatcaatcacaatatccgagagcaagagaaaacacagatttggtctaggcaccatacaaataaagaaggtgtggcttagggcagttaattgatagggctaaacttactcattcacagtacagcaaatgtaacacataaaatgttgaggtaatagctgcaggttgtatcctgcaaagcccagtgctaaccagaacttgtgaaatcatctcttcttcagagtagagggaagacacacagctccaactaagttcattttgggtccctggttttagtcagaaaatcttaattttaggacaaatttatgaatcatacctaaccaaacaaagctggtctaagtaaaagtggcgcatagaagcaataagatatattaaaccatttccaaagatccaaaacactgcttgggtatatcttctgacctgtctgtgatgcatcagtggtctaagtttcatttgcctattgcagactggtgcaatgtgcaagatcccaccagacgtaacaagtcggatgcgatccttcatgatgaaaggaccttttatcccgtaacatggcatc

SEQ ID NO: 705096 - DNA, 1589 bp, Homo sapiens
ggagtgaatagagttctgtatttcgagtaatagctcaggacttgtagaaacactttttctaataattttctatcatgtctctttcctttccatcctagtagactcaaaataaaataactcctgagtcttttctcttggcaatatcattgaacaactagagactataatacaagttttcaaaaatgtattgagggagaaatcaagcaatttaatttgttttcaaaaatacttaaaataccctaaaggaattaaagtgtcttttttgcagctggatatttctctcatataatataagagacaatttaataccagaaaatcagaattgatgagggatgagggggcaagtgtatgtgtgtagggtgtgagaatagtgcttacctttgattttaatgtgagccctttttataatttcatttagcatgtaatggctaaatcacaattagctttttcattctgaagacaacttgttaagtagttagagccaattagtaatctcaatagatttttttcattcttttttgtgctattttaaatatgttgttatgcttaatgtctgtggacattttatgcttcctttacaatgatgacttactattctataaatgtgcctttgccatatagtataataatgataatttgggaaatttcactggaattatgtttcagggtatattttttaaaaactgtcctaggccaataaatattttgatgttactacatactattctattaaaattttatgattttgcattatatgatatggaacagtataacaatattttgttttatttgaaccccttgatgatatttatcatcattacccattaccctgttgatgatatttataaaatgtagcaaagcatacattttcctataaaattagttaaggaactttcttggttaatttgttctcatttctgtttatagaagcaattattgtttgaagtcctatttcaaatttttgctttttgagtgatgatgaggatgagttaatctgttgctatttctcaagtaagtaaaaagtaataactcttagaaatcaatcacaatatccgagagcaagagaaaacacagatttggtctaggcaccatacaaataaagaaggtgtggcttagggcagttaattgatagggctaaacttactcattcacagtacagcaaatgtaacacataaaatgttgaggtaatagctgcaggttgtatcctgcaaagcccagtgctaaccagaacttgtgaaatcatctcttcttcagagtagagggaagacacacagctccaactaagttcattttgggtccctggttttagtcagaaaatcttaattttaggacaaatttatgaatcatacctaaccaaacaaagctggtctaagtaaaagtggmgcatagaagcaataagatatattaaaccatttccaaagatccaaaacactgcttgggtatatcttctgacctgtctgtgatgcatcagtggtctaagtttcatttgcctattgcagactggtgcaatgtgcaagatcccaccagacgtaacaagtcggatgcgatccttcatgatgaaaggaccttttatcccgtaacatggcatc

SEQ ID NO: 705097 - DNA, 1589 bp, Homo sapiens
ggagtgaatagagttctgtatttcgagtaatagctcaggacttgtagaaacactttttctaataattttctatcatgtctctttcctttccatcctagtagactcaaaataaaataactcctgagtcttttctcttggcaatatcattgaacaactagagactataatacaagttttcaaaaatgtattgagggagaaatcaagcaatttaatttgttttcaaaaatacttaaaataccctaaaggaattaaagtgtcttttttgcagctggatatttctctcatataatataagagacaatttaataccagaaaatcagaattgatgagggatgagggggcaagtgtatgtgtgtagggtgtgagaatagtgcttacctttgattttaatgtgagccctttttataatttcatttagcatgtaatggctaaatcacaattagctttttcattctgaagacaacttgttaagtagttagagccaattagtaatctcaatagatttttttcattcttttttgtgctattttaaatatgttgttatgcttaatgtctgtggacattttatgcttcctttacaatgatgacttactattctataaatgtgcctttgccatatagtataataatgataatttgggaaatttcactggaattatgtttcagggtatattttttaaaaactgtcctaggccaataaatattttgatgttactacatactattctattaaaattttatgattttgcattatatgatatggaacagtataacaatattttgttttatttgaaccccttgatgatatttatcatcattacccattaccctgttgatgatatttataaaatgtagcaaagcatacattttcctataaaattagttaaggaactttcttggttaatttgttctcatttctgtttatagaagcaattattgtttgaagtcctatttcaaatttttgctttttgagtgatgatgaggatgagttaatctgttgctatttctcaagtaagtaaaaagtaataactcttagaaatcaatcacaatatccgagagcaagagaaaacacagatttggtctaggcaccatacaaataaagaaggtgtggcttagggcagttaattgatagggctaaacttactcattcacagtacagcaaatgtaacacataaaatgttgaggtaatagctgcaggttgtatcctgcaaagcccagtgctaaccagaacttgtgaaatcatctcttcttcagagtagagggaagacacacagctccaactaagttcattttgggtccctggttttagtcagaaaatcttaattttaggacaaatttatgaatcatacctaaccaaacaaagctggtctaagtaaaagtggcgcatagaagcaataagatatattaaaccatttccaaagatccaaaacactgcttgggtatatcttctgacctgtctgtgatgcatcagtggtctaagtttcatttgcctattgcagactggtgcaatgtgcaagatcccaccagacgtaacaagtcggatgcgatccttcatgatgaaaggaccttttatcccgtaacayggcatc

SEQ ID NO: 705098 - DNA, 632 bp, Homo sapiens
tcttgatctctttacctcgtgatccacctacttcggcctcccaaaatgctgggattacaggtgtgagccaccatgcccagacaatctgtcttttttttttttttttttttttttttaacaggggcctcagccaaagaacctaagatgggtggaaggaaaatatatttttcctcccccccacaatacctaactagcacagtgagtgagatcagtgaatggaaaatttctaagggacaacatcaagggtaggagaattcttgctgaactgacttagcagggctctcactgaaggtaggccaggtgatcggatatcaaaaggtgggggatgagaaatttgataagacaaacaaaggtgatcagatatcgagggtggggggattcttgctaaactgacttagcataatttttgcggcaactgaactagccaggctgatgacaagactcaaggatgaggcctagtcctctgtataaaggcttagaggaggctgtctaaagtttggtcaaagaragactttgtcatcctggatgacattaattttcttagactgggttgttatactgttaagctccttattccttgggaaatgtgggaatcaacagctgctctttattccttgagaaggatttgatta

SEQ ID NO: 705099 - DNA, 632 bp, Homo sapiens
tcttgatctctttacctcgtgatccacctacttcggcctcccaaaatgctgggattacaggtgtgagccaccatgcccagacaatctgtcttttttttttttttttttttttttttaacaggggcctcagccaaagaacctaagatgggtggaaggaaaatatatttttcctcccccccacaatacctaactagcacagtgagtgagatcagtgaatggaaaatttctaagggacaacatcaagggtaggagaattcttgctgaactgacttagcagggctctcactgaaggtaggccaggtgatcggatatcaaaaggtgggggatgagaaatttgataagacaaacaaaggtgatcagatatcgagggtggggggattcttgctaaactgacttagcataatttttgcggcaactgaactagccaggctgatgacaagactcaaggatgaggcctagtcctctgtataaaggcttagaggaggctgtctaaagtttggtcaaagagagactttgtcatcctggatgacattaattttcttagactgggttgttatactgttaagctccttattccttgggaaatgtgrgaatcaacagctgctctttattccttgagaaggatttgatta

SEQ ID NO: 705100 - DNA, 1081 bp, Homo sapiens
taatttattagcagtgtgagaactaactaatacagtaaattggtacctgtagaatggggtgctactgtaaagacacccaaaaatgtgaaagtgactttggaactgggtaaagggcagaggatggaacagtttggagagctcagaagaaagcaggaaaatgtgggaaagtttggaacttcctagagacttgttgaatggctctgaccaacawcctgatagtgatatggacaatgaggtcaaggctaaggaggtttcagatggagatgagggactttttgggaactggagtatgtctttattagcagcatgagaacagactaatacagccttaaaaagtagtatcatcgtcttcaccaagaatgttggcaggacatgctggtactacattttcagcctaaactttgctacaggtactcctctgagagttttacaagtgcccgttcattaatcctcaccacatctttgtagtagctgcaatatttcttcccatgttacagatgcaaagactaacaattataaagatgctggaaaccatcgttctcagcaaactgtcgcaaggacagaaaaccaaacaccgcatgttcttactcataggtgggaattgaacaatgagaacacttggacacaggaaggggaacacgacacaccagggcctgtcgtggggtgggtgaggggggagggatagcattaggagatatacctaatgcaaatgacgagttgatgcgtgcagcacaccaacatggcacatgtatacatatgtaacaaacctgcacgttgtgcacatgaaccctagaacttaaagtatatataaaaaaaaagtgcagtacttgcaggagacctcacagtataaatcctggcagagcgggggcccaaactgatgagtttctcatacagctcatacccttaataatcaagcattaccacctcccatattcctaggaaagaaggcatcaaatatgtatgggttgatctacattctttgttaatttccaaatcaaaatacctatggaattttataattcttgacaaaaatttcctaaattttattgacatgagttaatgtattagtataaccacaaca

SEQ ID NO: 705101 - DNA, 672 bp, Homo sapiens
tgaaggcagcatgaagcctctttataagggtcttaattccattcatgagggaggacccctcctggcataatcacctcttaaaggccccacctcttaataytgttgcattgggaatgaagattcaatatgaattattatgaaggggatgaaaacattcaaaccatagcaattgcccatgaatccatcattggcctcctttttttcttactctgtcctcttcctctgagtgacttctctcatgtggatacttttggctgccacctgtgtgatggtgaatttagcacatccctccactgaaccacaaacacaggtgccaaactgcctattgagcatctctacttgaacatcctatgggcaactcaaagtcaatgtgtttggattgtattccctcccaatctgtttctcctcctagattccttgtcttgaatgtcacctcttccctcagtcaccctcatcagaagctgcccaggagctgtcactgtctcttctctattttcagccctccaccttgtccttcaataactgcaattcattatctgccttacaactcccacacattagtcctacttcttggaggacatactgcaatagtctccagattggcttctttactctctctctctctctctccaggtctcatcaattcattctactcacatcatcctctgctta

SEQ ID NO: 705102 - DNA, 1048 bp, Homo sapiens
ctttgagactatttctacttactttccaatgtttgctgaagttcatggatggtactaagaagaacatgaaactgtttccgtctcaattccagctgtgttaacaagaaaaaaatttatacaaatgacctgtatatatagatatatagacagacagatagacagatcatgaaggctaaatatatatgcgaataccttatcttcaacactttctttaatgtgtgaaagatgctctaattcttttcccagagcctctagttccctggaaataataaaacagtgttacattttgctgaatgggggagaagagtttacaattaatgcctaacttttaagttactagataggatttttaaaataaaaaaagggcttataagggagttataacactccattatggtgaaacttttaaagctgaggatgatttcttcttaacttctaaatatggactcactttcattaaaattacatttttggatccatttttaaagtacagaaaaatacagataacagaataacaagacccaagaaatgatacatattgtgaagtttaacttcgagggttttttattttggtaaaagaaataaaacattgccaattaactcgaaataccctttgaatcttacgcctagtcctctatcctgggcctttttatctcctctacctcccactcaggcaactactatatcattcttattcttttttatgcatatacttgtatccctgaataatacacagtattggtatataatatttgaaagggggttctaacttttataaatggttattattctgtatgtgtttcaggaatttaaatataatttaaartttattatgtgtcttttcactgattatgttttgagagctgtgttttaaaagggcataactagtttattctttttaactgaaattcaatattttaatatatgaagaccatattctatttatccattgtgatattgatgcatattatatgcatttattttagacatatagctggtaaggttagaggaaaataaaatctaacagagaagtatgggaaaatataat

SEQ ID NO: 705103 - DNA, 636 bp, Homo sapiens
gaggttgtaaaagggattttacaaattttcctgcttcacttcagacatgatagcccacagttttaagtacttgttatgtgctgggtatagcgctacatcctaggtaccatatcatatattttgcagggattatctcatctgatcctcacaactgcccsttgtgaggtaaacgttaatattattctcactttgcaagtgaggaaatgggagcaggtttcgttccttgtccagacctgaaataactaagtggccaaattaggggcagacctctggactaacgggccccaagtccaggactgcaaagacctcactcatcaccactacacactacaactcaaacaactcaattgcaataaaacaataatgcaatttaaaaatggtcaaaaagatctgaatagatgtttcccgaaagaagacatacacatgacatgagcaatgggtctttgaaaaatgctcaacatcactaatcatcacgaaaatgcaaatcaaaccacgatgaaaagtcatctttcccctgttagaatggctattatcaaaaagacaaaaacaacagatgctggtgaagatgcagagaaaggggaatgcttgtacactgtttgtgagaatgtaaattagtagagtcattgtggaaaatag

SEQ ID NO: 705104 - DNA, 636 bp, Homo sapiens
gaggttgtaaaagggattttacaaattttcctgcttcacttcagacatgatagcccacagttttaagtacttgttatgtgctgggtatagcgctacatcctaggtaccatatcatatattttgcagggattatctcatctgatcctcacaactgccccttgtgaggtaaacgttaatattattctcactttgcaartgaggaaatgggagcaggtttcgttccttgtccagacctgaaataactaagtggccaaattaggggcagacctctggactaacgggccccaagtccaggactgcaaagacctcactcatcaccactacacactacaactcaaacaactcaattgcaataaaacaataatgcaatttaaaaatggtcaaaaagatctgaatagatgtttcccgaaagaagacatacacatgacatgagcaatgggtctttgaaaaatgctcaacatcactaatcatcacgaaaatgcaaatcaaaccacgatgaaaagtcatctttcccctgttagaatggctattatcaaaaagacaaaaacaacagatgctggtgaagatgcagagaaaggggaatgcttgtacactgtttgtgagaatgtaaattagtagagtcattgtggaaaatag

SEQ ID NO: 705105 - DNA, 599 bp, Homo sapiens
aacttctcaaatgaatcagaaatcttggacctgtagttggtgcataagtaactctttctgtatttaaacattgatcatactacaagaaaagctttagtgatggcaagttactctggcacttaaaatgtgcttaattgttactgtgcttcaaggctgtgagtcaaaatgattgawttgcctttgatgcagctggccaacttgaatttttctttctcctggcttaataactcttcaatatctataagatgtcaagatcaaaatttttccttctgataccacattttgtttaatcttcaacttaggtgcaaaccctagacgaaaaaagactgtaattcaactcttcagtagccaggattgcctgtctccaaccccttctgaatctagttatgttggatactgggagagaagcatgtagactctttgggcctgacctttctgatttttctctggaagggcttcactgaaggggcacagaagaataatgtttctacagcatagatccaggggctcctccccaccaggaacccagcttagcaggcaggctgttcatgtggaactcgccaaaaccccgtgcaggtggatgtgcggaaacaccaaag

SEQ ID NO: 705106 - DNA, 644 bp, Homo sapiens
attccgagtgtgaagtaatgctatatgtgaaaaatgccctggagatcataaagtgatggacagatgctgtttgtgaatgagaagagtattggtggaatagaggaaaacatagactctcttcagtgagttaagtttatgtttcttgcatctgccgattcaaaaacatgtatggcatttcctccttcttgtaggagcttcctgtatgttatactstctgttcctcatttgccacatgttatagatgagaaaactggggctaagggaagatagactgacctggttttcccaagatcacagagctagtaagagtaggggaggaattatcacccccatttctccggatgaggaaactgaggcacagagagattaattcatttgtctgaagttatagagccagcaagtgtgaaagttatacctgagtctaaaagaaaaaaatcttttttttgagatggagttttgttcttgttgcccaggctggagtgcaatggcacgactcctcggctcactgcaacctctgcctcctgggttcaagcgattatcctgccttagcctcctgggattacaggcgcccatcaccacaccctgctaattttctgtatttttaagtagagatggggtttcactgtgttggccaggctgttctc

SEQ ID NO: 705107 - DNA, 1110 bp, Homo sapiens
gttttgattttaaatcgattatttaaatacaataatctatgatttatacacttagcacagagcaagtgatcaattcattttaagtagagattgatgttagttgtcctgaactaacaatttgatgagcatttaatgagcacccgctgtcttgaatgttgtgctaggtactgaagtacaaagataaacatgatgattatttgtcctcaaagagattttgtcctcgtggaaaagggtcctttagatgtgaccttgaacatacctgggtaaatgattaggagaagtaggtgatcctcacaacaacgtgagcagtgtcagtagagggtaagatctcttacctgagctcaggaaaggctgctgcttctggtctcctaggagcctgtttcaagttgaaaggcttcccattatttatatctgtatatacatgtcacatgaaggaagtgagctcaggcaggtgagggctggaactcccttggaatttctctggtggcattgttcttcctcaagcactacagcagcttaattgcaggacagattaccccaacaccttcctcctggaagaagcactgcctgaggggattactggttgtagctgtggataaaggatgtgcctccttctggctccaccttcctgcttgataaaatgatggatagagaagatctgagttactgaactggaagagaattctgggggattctcctgctctctcctctaaacccagttccccttaaccaagtttctccacaactccagacactgtgggctcattcctgctgtttttcctcagcccttgctatccccaccattgctctccaacatggccacccttccctctagtcatcattaaagatgaaacccaaatcctttattcctgaasaactctgggctataccaatccctcccttctctgacttccaatagcagatttttctttggcagtgaaagcatctaatgttgtcctgtgtttcatggaacttggtcttttctccctaataacactggaaaattttttaggctgggactagtccatcatgtaggaccatgctcccagacaaaattaaattcaaagaacctgggatgaattatagacaacgccttggaaacataaagat

SEQ ID NO: 705108 - DNA, 1886 bp, Homo sapiens
atggagtgcagtgcaatggaatggaatggaatggaatgcaatggaatggaatggaatggaatggaatggaatggaatggaatgggatggaatggtatggaatggatagtaatggactggagtgaaatggactggaaaggaatggactcaaattgaaagggctcgaaaggaatggagtcaaatggaatggtctggaatggaatgaacacgaatgtaatgcaacccaatagaatggaatcgaatggcatggaatataaagaaatggaatcgaagagaatggaaacaaatggaatggaattgaatggaatggaattgaatggaatgggaacgaatggagtgaaattgtatgcagtagaagagaatagaatggaatgcaagcgaaaggaaaggaatggattggaatggaatggaattcattggaatggaagggaatgtagtgtaatggacaggcctggaataaagtggaatgctacggtctcgaatggaattgaatggaatggaatggactagagtgaaatggaatcgaaccacaaggaatggacaggaatagaatggtctcgaattgaatggaatcgtatggaatggcatcaaacggaatggaatggacagccacggaatggaatgcactcgaatgcaatggagtcgaaactaatggactggaatagaatggactcgactggtacggactccaatggaatggaatcgaatggaagggaatcgaacggaatggaatcgaacggaatggactcgaagggaaaagactgcaatggaaaggtctcgaatggaatggaaattaatggaatggartggaatcgaatgaaatggagtcaaaaggaatggaatcgaatggcaagaaatcgaatgtaatggaatcgccaggaattgatgtgaacggaacggaatggaatggaatccaaaggaatggaatagaatggaatggaatcgaatggaaaggactcgaatggaaatcactcgaatagaatgcaatttaataaaataggatcaaatgtaatggaatggaatggaaaggaatcgaaacgaaaggaatggagacagatggaatggaatggaacagagagcaatggtatagaatggaatggaatcatctggaatggaattgaatggaatggaataatatgaaatggaatggaatggaatggaatggaatgcccttgaattaaatggactggaatggaatggactcaaacagagtggaatggaaagtgtggagatagaatggaatgaactcctttggaatggtgtagtatgcaatgcaatcgactggcagggaatcaaaaggaatgtaatcgaatggattggactggaatgcaatggactcgaatagattggaaacggaatgcaaaggaatggaatggaatagtatggaatgcaatggaagggaatggagtggaatagactagagtggaatggaatggactggaaagcaatggactggaatggaactttcttggatggactggaatcaaacggaatggaatgcaatgcaatcaaatggcatggaataaaatagaatgaaagagaatcaaatggaattgaatcgaatggaatcgaatggattggaaatgaatagaatggaatggaatggaattgactcaaatggaatggactagaatggaatggattcgaatggaaggcaaaggaatggaatctattggaatggactgtaatggaatggaatggaagggattggaatggactcgaatggaatggactgcaatagaaaggattcgaatggaatgaaaaagaattgaatggaatagaacagaatggaatcaaatcgaatgaaatggaatggaatagaaaggaatggaatgaaatggaatggaaaggattcgaatggaatgcaatcgaatggaatggaatcga

SEQ ID NO: 705109 - DNA, 1886 bp, Homo sapiens
atggagtgcagtgcaatggaatggaatggaatggaatgcaatggaatggaatggaatggaatggaatggaatggaatggaatgggatggaatggtatggaatggatagtaatggactggagtgaaatggactggaaaggaatggactcaaattgaaagggctcgaaaggaatggagtcaaatggaatggtctggaatggaatgaacacgaatgtaatgcaacccaatagaatggaatcgaatggcatggaatataaagaaatggaatcgaagagaatggaaacaaatggaatggaattgaatggaatggaattgaatggaatgggaacgaatggagtgaaattgtatgcagtagaagagaatagaatggaatgcaagcgaaaggaaaggaatggattggaatggaatggaattcattggaatggaagggaatgtagtgtaatggacaggcctggaataaagtggaatgctacggtctcgaatggaattgaatggaatggaatggactagagtgaaatggaatcgaaccacaaggaatggacaggaatagaatggtctcgaattgaatggaatcgtatggaatggcatcaaacggaatggaatggacagccacggaatggaatgcactcgaatgcaatggagtcgaaactaatggactggaatagaatggactcgactggtacggactccaatggaatggaatcgaatggaagggaatcgaacggaatggaatcgaacggaatggactcgaagggaaaagactgcaatggaaaggtctcgaatggaatggaaattaatggaatggaatggaatcgaatgaaatggagtcaaaaggaatggaatcgaatggcaagaaatcgaatgtaatggaatcgccaggaattgatgtgaacggaacggaatggaatggaatccaaaggaatggaatagaatggaatggaatcgaatggaaaggactcgaatggaaatcactcgaatagaatgcaatttaataaaataggatcaaatgtaatggaatggaatggaaaggaatcgaaacgaaaggaatggagacagatggaatggaatggaacagagarcaatggtatagaatggaatggaatcatctggaatggaattgaatggaatggaataatatgaaatggaatggaatggaatggaatggaatgcccttgaattaaatggactggaatggaatggactcaaacagagtggaatggaaagtgtggagatagaatggaatgaactcctttggaatggtgtagtatgcaatgcaatcgactggcagggaatcaaaaggaatgtaatcgaatggattggactggaatgcaatggactcgaatagattggaaacggaatgcaaaggaatggaatggaatagtatggaatgcaatggaagggaatggagtggaatagactagagtggaatggaatggactggaaagcaatggactggaatggaactttcttggatggactggaatcaaacggaatggaatgcaatgcaatcaaatggcatggaataaaatagaatgaaagagaatcaaatggaattgaatcgaatggaatcgaatggattggaaatgaatagaatggaatggaatggaattgactcaaatggaatggactagaatggaatggattcgaatggaaggcaaaggaatggaatctattggaatggactgtaatggaatggaatggaagggattggaatggactcgaatggaatggactgcaatagaaaggattcgaatggaatgaaaaagaattgaatggaatagaacagaatggaatcaaatcgaatgaaatggaatggaatagaaaggaatggaatgaaatggaatggaaaggattcgaatggaatgcaatcgaatggaatggaatcga

SEQ ID NO: 705110 - DNA, 1506 bp, Homo sapiens
agtccattctattccagtccattagtttcgactccattgcattcgagtgcattccattccgtggctgtccattccattccgtttgatgccattccatacgattccattcaattcgagaccattctattcctgtccattccttgtggttcgattccatttcactctagtccattccattccattcaattccattcgactctattccgttccattcaattccattccattcgattccatttttttcgacaaccttccattacactcccttccattccagtgcattccattccagtctcttcacttcgattccattccattcgtttcgattcctttccattccagcccattccattccattccattcctttcctttccgtttcattagattccattgcattccattccattcaattcaattccgtgctattcaatttgattcatttccatttaattccattccattagattccattccgtacgattccattccttttgaatccattccattggagtccattcacttccagaacattccattccagtcgaatccattcgagtacattccattaaagttcattacattctaatacattccattccattgcattccattccattccattcgatgccattcgattccattccatgccaaatcattgcattcctttccattccgttcctatcaattccattccattcgatttagttcgattctattcacttccattccattcgattccattccattggagtcaattcctttcgacacccagcctctccagtcagtgattttggattccatttttttgcattccattacattctatgacattcgattccgtttcattgcattccattccatacatttttattccattcgagaccgtagcattccactttattccaggcctgtccattacactacattcccttccattccaatgaattccattccattccaatccattcctttcctttcgcttgcattccattctattctctkctactgcatacaatttcactccattcgttcccattccattcaattccattccattcaattccattccatttgtttccattctcttcgattccatttctttatattccatgccattcgattccattctattgggttgcattacattcgtgttcattccattccagaccattccatttgactccattcctttcgagccctttcaatttgagtccattcctttccagtccatttcactccagtccattactatccattccataccattccatcccattccatctcattccattccattccattccattccattccattccattccattgcattccattccattccattccattgcactgcactccattccattacattctactctatctgagtcgattttattgcattagattctattccattggattactttccattcgattacattccattcatgtacattccattccagtcaattacattcgagttcattacgttacattcca

SEQ ID NO: 705111 - DNA, 1506 bp, Homo sapiens
agtccattctattccagtccattagtttcgactccattgcattcgagtgcattccattccgtggctgtccattccattccgtttgatgccattccatacgattccattcaattcgagaccattctattcctgtccattccttgtggttcgattccatttcactctagtccattccattccattcaattccattcgactctattccgttccattcaattccattccattcgattccatttttttcgacaaccttccattacactcccttccattccagtgcattccattccagtctcttcacttcgattccattccattcgtttcgattcctttccattccagcccattccattccattccattcctttcctttccgtttcattagattccattgcattccattccattcaattcaattccgtgctattcaatttgattcatttccatttaattccattccattagattccattccgtacgattccattccttttgaatccattccattggagtccattcacttccagaacattccattccagtcgaatccattcgagtacattccattaaagttcattacattctaatacattccattccattgcattccattccattccattcgatgccattcgattccattccatgccaaatcattgcattcctttccattccgttcctatcaattccattccattcgatttagttcgattctattcacttccattccattcgattccattccattggagtcaattcctttcgacacccagcctctccagtcagtgattttggattccatttttttgcattccattacattctatgacattcgattccgtttcattgcattccattccatacatttttattccattcgagaccgtagcattccactttattccaggcctgtccattacactacattcccttccattccaatgaattccattccattccaatccattcctttcctttcgcttgcattccattctattctcttctactgcatacaatttcactccattcgttcccattccattcaattccattccattcaattccattccatttgtttccattctcttcgattccatttctttatattccatgccattcgattccattctattgggttgcattacattcgtgttcattccattccagaccattccatttgactccattcctttcgagccctttcaatttgagtccattcctttccagtccatttcactccagtccattactatccattccataccattccatcccattccatctcattccattccattccattscattccattccattccattccattgcattccattccattccattccattgcactgcactccattccattacattctactctatctgagtcgattttattgcattagattctattccattggattactttccattcgattacattccattcatgtacattccattccagtcaattacattcgagttcattacgttacattcca

SEQ ID NO: 705112 - DNA, 572 bp, Homo sapiens
tgccaacagttatcaatttgagttgttaaatattggaatatattattgtgttcaaattctggatgaggagttactataactacctcagtgcacgaaatggcactatgttagactaaatatgtaaccaagctttttaatattgtgtttgaataattttatattccactgcaaatactaccacaaagccctgttattaacattaaaataattgytttctagtttaaaagttaagaaaatattacatttttaccaatgttatttgtgagattgctttaatttctcctgagagatacaaaattaaaattagaggatgccttagatacagttaatatagcctttcatctgagaaaataccccataatcaataattattgatctatgctttgaataccgagtatgggagattcactacattacaaaattgcccagtgtgatctcctatgatagtgaaaaacactcagattttagattaaggaagcctcattatgaactgatctctcttaccaatttactaacagtattataatgaacaaatattttaatctgtcagagctttagtgtctttatcttca

SEQ ID NO: 705113 - DNA, 536 bp, Homo sapiens
taagggcrgtgcaagatgtgctttgttaaacagatgcttgaaggcagcatgctcgttaagaatcatcaccactccctaatctcaagtacccagggtcacaaacactgcggaaggccgcagggtcctctgcctaggaaaaccagagacctttgttcacttgtttatctgctgaccttccctccactattgtcctatgaccctgccaactccccctctgcgagaaacacccaagaatgatcaataaaaaataaaaaataaaaataaaaaaaaaagaatcatttcaacattcacctcagtcagaatggagttgttttcttctctactttacagactggtatatgaaaaaaacaaagagggagaaacataacaaaatattgtgtatggtaatattcaattttatgacagaaaaaaactggaaggatacattaaacaacaaaatgctaatagcaattcatgctaatagcaaatctttctttctttctttttctttctttcttttttttttttttttgacatggcttctcactctgttgccc

SEQ ID NO: 705114 - DNA, 1447 bp, Homo sapiens
tccccactgcactgagctgtcatgtctttctgagtctcctttctcctggaagacttgcttgacctttttccttcaggacattgacatttttgaagagtacaggcagacattttgtagactgttattcaattcgaatttggttgtttcttcatggttagattcagattagggcatattggcaggaatgctacagaagtgatacagctcctcggcatattcaattctggcaggagaagctttgaagaaatcagtttaaattcttctctctggagttctccttcctttctgccatttgagcagataggagatcctggcctccttacctcaggggagatttgaggcagggcaggaagtggtagtcccttcaaggccccttcctggcttttatttccaaaagcataggcttattgagacaagatagagggactttgaaggaagcagaggtggggaaagaattgtctcagacccaaaggaaattcctccagggtagagacaggagagagaagtgtgtgattcctactaggaaacaggaccagcatcctattccctggcagacctcacgaggtggcaggacctcagagggaagcactgtgcgatgccccaggcaggctgcatcctaggcctgggccccaaacttaacaaaggcttctgtgctcccagtagaaggcccaacacagctggcagccctgaagcacagtacagactaagacagtgggggcctcctcactgcaacctgggggcctcaccagtgcctcgctccaagaatggccagaacctctgtgctcccctaggacatcagcacagccctagcgatgactgcccagcagtcaccggacttgaaggttaaattaagtttatttaagaaaagcaggccgggcgcggtggctcacgcctataatcccagcactttgggaggccgaggcaggtggatcacgaggtcaggagatcgagatcatcctggctaacacggtgaaaccctatctctactaaaaatacaaaaaattagccgggcrtggtggcgggcacctgtagtcccagctattcgggaagctgaggcagaagaatggcatgaacctgggaggcggagcttgcagtgagctgagattgcgccattgcactccagcctgggcgacacagagagactccatctccaaaaaaaaaaaaaaaaagcaaacacggtcaggcacggtggctcacacctgtaatcctaccaccttgggaggccaagatgagaggatcacttgagcccaggagttagagaccagcctgagcaacatggtaagattccgtctctacaaaactgcaaaaattagccaagtgtggtggttcaaggctgtggtcccagctactcagggagctgaggtgggaggattgcttgagcccaggaggctgaggttgcagtgagccatgattgtgccactgtactcccacatgggcaacagaacga

SEQ ID NO: 705115 - DNA, 1124 bp, Homo sapiens
gcttatttaaaattcttagttcatctgttctcataatttatcttcagaatgttatataagtcataatgtgctgtgtattatgaatgataatataggtgataatattattatatatatgcaagtactgctgactttctttcatagtgttttttttgaggtatctagatattttggactgtgagcccatgtcccttgggtttataagttactcttacgcatattggggaaaacctggaagactaggtccttgttttggtcaattagagtctgttcaagtagcaaggatggggtgaacctcagggagagatctccataataccacaggaccactgttgaactctcctttgcaaattcccatgtgcgatcagcaagccttgtaatcctaagggagagaaatacaactttggagagcgacagtctcctagattgtaatacatcagctgataggatttggagggaaagatggtcttttgatgaaagaagttcttattttaacttagtcaaatgtataagtcttttacacttagtgcttttttggcctggcgtggtggctctcccctgtaatcccaatattttgggaggccgaggtgggcgaatcacctgaggccaggagttcgagatcagcctggccaacatggagaaaccccatctatactaaaaatacagaattagctgggcttggtgatgcgtacctgtaatcccagctactcagaaggctgaggcaggagaattgtctgaacccaggagacagaggttacagtgagccgagatcacrccactgcactccagcctaggcaacagagcgagactctgtctcaaaaataaaaaaaacaaaatagtgctttttatgtcttgttaaacaaatctgtctgtattgtaagtgcaagaaggttcgcctatatattctatgaaaaactttaaagttttgcctttaacattgaggccttaatccttctggagttagtttttgtgactaatgcaggataagagatttaattttgtttttttctatgtggataacttttttttcccagctttactttagagtaattcctccttccttcattgatctgtcatgcctgctcttatatattgaacttctatatatgtgaacattggataat

SEQ ID NO: 705116 - DNA, 1124 bp, Homo sapiens
gcttatttaaaattcttagttcatctgttctcataatttatcttcagaatgttatataagtcataatgtgctgtgtattatgaatgataatataggtgataatattattatatatatgcaagtactgctgactttctttcatagtgttttttttgaggtatctagatattttggactgtgagcccatgtcccttgggtttataagttactcttacgcatattggggaaaacctggaagactaggtccttgttttggtcaattagagtctgttcaagtagcaaggatggggtgaacctcagggagagatctccataataccacaggaccactgttgaactctcctttgcaaattcccatgtgcgatcagcaagccttgtaatcctaagggagagaaatacaactttggagagcgacagtctcctagattgtaatacatcagctgataggatttggagggaaagatggtcttttgatgaaagaagttcttattttaacttagtcaaatgtataagtcttttacacttagtgcttttttggcctggcgtggtggctctcccctgtaatcccaatattttgggaggccgaggtgggcgaatcacctgaggccaggagttcgagatcagcctggccaacatggagaaaccccatctatactaaaaatacagaattagctgggcttggtgatgcgtacctgtaatcccagctactcagaaggctgaggcaggagaattgtctgaacccaggagacagaggttacagtgagccgagatcacgccactgcactycagcctaggcaacagagcgagactctgtctcaaaaataaaaaaaacaaaatagtgctttttatgtcttgttaaacaaatctgtctgtattgtaagtgcaagaaggttcgcctatatattctatgaaaaactttaaagttttgcctttaacattgaggccttaatccttctggagttagtttttgtgactaatgcaggataagagatttaattttgtttttttctatgtggataacttttttttcccagctttactttagagtaattcctccttccttcattgatctgtcatgcctgctcttatatattgaacttctatatatgtgaacattggataat

SEQ ID NO: 705117 - DNA, 566 bp, Homo sapiens
ttcccacagayggcaagggatgattgtacatttagaatcaatttaccaagttaataaagaaaacagtactctggggtctttaggacatcttttgtaatatttattcctgagtctcaaacttttgttgtataaagttttatatttctgctgtagaaaagactcaagaataaatgtgtgttagaaatttcaaccctttacatgtatgtagcaagtattttataatttatcatacactgactagaacttacagaaaaatgttaaataatggtgacaatagtggttttaaaatgaaagtttttgttattgcaaaaagatatacaagctcactattgaaactttagaaaagagatgatgaaaaagaaaaaaattaatatctacataataaaattactctctaattgaaagtatatgtgaatgtccgttcttctacattttcaaaccaaagatgggtgttttaattaaaaacaggctgggtgcagtggctttcgcctgtaatcccagcactttgggaagccaaggtgggcggatcacttgaggtcaggagttcgagaccagcctggccaaca

SEQ ID NO: 705118 - DNA, 566 bp, Homo sapiens
ttcccacagatggcaagggatgattgtacatttagaatcaatttaccaagttaataaagaaaacagtactctggggtctttaggacatcttttgtaatatttattcctgagtctcaaacttttgttgtataaagttttatatttctgctgtakaaaagactcaagaataaatgtgtgttagaaatttcaaccctttacatgtatgtagcaagtattttataatttatcatacactgactagaacttacagaaaaatgttaaataatggtgacaatagtggttttaaaatgaaagtttttgttattgcaaaaagatatacaagctcactattgaaactttagaaaagagatgatgaaaaagaaaaaaattaatatctacataataaaattactctctaattgaaagtatatgtgaatgtccgttcttctacattttcaaaccaaagatgggtgttttaattaaaaacaggctgggtgcagtggctttcgcctgtaatcccagcactttgggaagccaaggtgggcggatcacttgaggtcaggagttcgagaccagcctggccaaca

SEQ ID NO: 705119 - DNA, 566 bp, Homo sapiens
ttcccacagatggcaagggatgattgtacatttagaatcaatttaccaagttaataaagaaaacagtactctggggtctttaggacatcttttgtaatatttattcctgagtctcaaacttttgttgtataaagttttatatttctgctgtagaaaagactcaagaataaatgtgtgttagaaatttcaaccctttacatgtatgtagcaagtattttataatttatcatacactgactagaacttacagaaaaatgttaaataatggtgacaatagtggttttaaaatgaaagtttttgttattgcaaaaagatatacaagctcactattgaaactttagaaaagagatgatgaaaaagaaaaaaattaatatctacataataaaattactctctaattgaaagtatatgtgaatgtccrttcttctacattttcaaaccaaagatgggtgttttaattaaaaacaggctgggtgcagtggctttcgcctgtaatcccagcactttgggaagccaaggtgggcggatcacttgaggtcaggagttcgagaccagcctggccaaca

SEQ ID NO: 705120 - DNA, 566 bp, Homo sapiens
ttcccacagatggcaagggatgattgtacatttagaatcaatttaccaagttaataaagaaaacagtactctggggtctttaggacatcttttgtaatatttattcctgagtctcaaacttttgttgtataaagttttatatttctgctgtagaaaagactcaagaataaatgtgtgttagaaatttcaaccctttacatgtatgtagcaagtattttataatttatcatacactgactagaacttacagaaaaatgttaaataatggtgacaatagtggttttaaaatgaaagtttttgttattgcaaaaagatatacaagctcactattgaaactttagaaaagagatgatgaaaaagaaaaaaattaatatctacataataaaattactctctaattgaaagtatatgtgaatgtccgttcttctacattttcaaaccaaasatgggtgttttaattaaaaacaggctgggtgcagtggctttcgcctgtaatcccagcactttgggaagccaaggtgggcggatcacttgaggtcaggagttcgagaccagcctggccaaca

SEQ ID NO: 705121 - DNA, 626 bp, Homo sapiens
  misc_feature 561, 562: n = A,T,C or G
caaggcagctctggccacagcctccacccccactgcccccagcccctaccgccaacacccacgctgcgtatccagctgcctcactcagggcttggctgagtttagctgggcaccgctgtggcctatcattctcttgcttgtgagtcaaggggtcactttagcaattaggggtgggggaccccaaaagagtgagggagccggagggctggctgcttccctttatgtgaaactgcaraagagccaaggagctgggcctcggagcccccaataaaggcagtctgtgcagggtgaccaggactgtgtggtcagaggctaaacccacgtcacctcctattggccgcgattgctgtgctctgggtcaactgtgcattggtaccatgggggccgcactcgcaggcccaggccttcttctggcagggctctccgttgctctccctggatcaggagctgggggaagggggcgaggccaaccagaagcccagaccccccggggagagctgatcctggacaaggtttcccaggaggacaaggaagctccctggtgaaggtgcgctccgccgnncgctgtgcgggcagcccgggcactccatcagggcccccttatcctttaggaggagtcctccctg

SEQ ID NO: 705122 - DNA, 626 bp, Homo sapiens
  misc_feature 561, 562: n = A,T,C or G
caaggcagctctggccacagcctccacccccactgcccccagcccctaccgccaacacccacgctgcgtatccagctgcctcactcagggcttggctgagtttagctgggcaccgctgtggcctatcattctcttgcttgtgagtcaaggggtcactttagcaattaggggtgggggaccccaaaagagtgagggagccggagggctggctgcttccctttatgtgaaactgcagaagasccaaggagctgggcctcggagcccccaataaaggcagtctgtgcagggtgaccaggactgtgtggtcagaggctaaacccacgtcacctcctattggccgcgattgctgtgctctgggtcaactgtgcattggtaccatgggggccgcactcgcaggcccaggccttcttctggcagggctctccgttgctctccctggatcaggagctgggggaagggggcgaggccaaccagaagcccagaccccccggggagagctgatcctggacaaggtttcccaggaggacaaggaagctccctggtgaaggtgcgctccgccgnncgctgtgcgggcagcccgggcactccatcagggcccccttatcctttaggaggagtcctccctg

SEQ ID NO: 705123 - DNA, 1320 bp, Homo sapiens
tgttgacccttgatcagacaggacatccattactgaggatcactttttgccatgttccttaagttttgttaaggatagctctatatgtgtcttaaataaatgatatatgttgatatgacttgatgcattttaaaaatgcaccataataagattcctagtaaaatgtttaaatagtgtggaggccaaattacgtggtagttaaaaagaagagcactggtgttgaattgtgtctactccaaaatgggttctggctcattctaactgtgcactaactgtgagaaggttacttaacttctccaaatcccagctgccacctctgtcaatccggactaataagggaattgccatgatacattgtggcacggtagctggcacatatgtccaatacgtgttagttattcatgttaaatgagatttagaatgttaataagctcactgctcactgtataagaggtattttataaatattagttgaaaattagtgtaagttgtgtctccagagataatttctctcacaaagggagcaatatttttgatgaaatttgggactaactattaagtctgtcaagtgatcaaacagcccataaactgcaccatgatggcagctgctaggtttgcttgtcgcatgcccataggttgagccagtgaggaggcaacaaacccaaataaatccagaaagtttattatttacacagcagttttataaactcacacagaagcctgaagctgcaccctcaaagaggagcaagatagatgtacattgctgagactaggaatagggatcacaaatggtcttgtgggaatctcctataagatatggatgagaaactacatgcaacagccatttaccagtatgtctacagttgtcccaggrggaatttcaggccatttcaccaaagcttgggtcagaccttggtcaaacattgcctacatggtctatgtgatgacaggcagggtctcccagttaccatggcagagctgtttccttaaaaagccaattagatgaacagaggaaccaaaaagttggggatgctgttgatctgttccaacctccttaatggctttccaggttagatagccactgttacaaaacacagtattatgatgacagtgctaagaggtgttgttttcaaaatgtcaagagtaatccatgaggatttttacatggtatttgttcacttacaatacattataatttttcctgtccaggtgggctagtagtgaggcaagaaccaagatggggcttctgggaaaagtcataaggagtggttaatttagacaagctgtttcaagacgaaggaaaaaactcatggtgtgatt

SEQ ID NO: 705124 - DNA, 1320 bp, Homo sapiens
tgttgacccttgatcagacaggacatccattactgaggatcactttttgccatgttccttaagttttgttaaggatagctctatatgtgtcttaaataaatgatatatgttgatatgacttgatgcattttaaaaatgcaccataataagattcctagtaaaatgtttaaatagtgtggaggccaaattacgtggtagttaaaaagaagagcactggtgttgaattgtgtctactccaaaatgggttctggctcattctaactgtgcactaactgtgagaaggttacttaacttctccaaatcccagctgccacctctgtcaatccggactaataagggaattgccatgatacattgtggcacggtagctggcacatatgtccaatacgtgttagttattcatgttaaatgagatttagaatgttaataagctcactgctcactgtataagaggtattttataaatattagttgaaaattagtgtaagttgtgtctccagagataatttctctcacaaagggagcaatatttttgatgaaatttgggactaactattaagtctgtcaagtgatcaaacagcccataaactgcaccatgatggcagctgctaggtttgcttgtcgcatgcccataggttgagccagtgaggaggcaacaaacccaaataaatccagaaagtttattatttacacagcagttttataaactcacacagaagcctgaagctgcaccctcaaagaggagcaagatagatgtacattgctgagactaggaatagggatcacaaatggtcttgtgggaatctcctataagatatggatgagaaactacatgcaacagccatttaccagtatgtctacagttgtcccaggaggaatttcaggccatttcaccaaagcttgggtcagaccttggtcaaacattrcctacatggtctatgtgatgacaggcagggtctcccagttaccatggcagagctgtttccttaaaaagccaattagatgaacagaggaaccaaaaagttggggatgctgttgatctgttccaacctccttaatggctttccaggttagatagccactgttacaaaacacagtattatgatgacagtgctaagaggtgttgttttcaaaatgtcaagagtaatccatgaggatttttacatggtatttgttcacttacaatacattataatttttcctgtccaggtgggctagtagtgaggcaagaaccaagatggggcttctgggaaaagtcataaggagtggttaatttagacaagctgtttcaagacgaaggaaaaaactcatggtgtgatt

SEQ ID NO: 705125 - DNA, 1320 bp, Homo sapiens
tgttgacccttgatcagacaggacatccattactgaggatcactttttgccatgttccttaagttttgttaaggatagctctatatgtgtcttaaataaatgatatatgttgatatgacttgatgcattttaaaaatgcaccataataagattcctagtaaaatgtttaaatagtgtggaggccaaattacgtggtagttaaaaagaagagcactggtgttgaattgtgtctactccaaaatgggttctggctcattctaactgtgcactaactgtgagaaggttacttaacttctccaaatcccagctgccacctctgtcaatccggactaataagggaattgccatgatacattgtggcacggtagctggcacatatgtccaatacgtgttagttattcatgttaaatgagatttagaatgttaataagctcactgctcactgtataagaggtattttataaatattagttgaaaattagtgtaagttgtgtctccagagataatttctctcacaaagggagcaatatttttgatgaaatttgggactaactattaagtctgtcaagtgatcaaacagcccataaactgcaccatgatggcagctgctaggtttgcttgtcgcatgcccataggttgagccagtgaggaggcaacaaacccaaataaatccagaaagtttattatttacacagcagttttataaactcacacagaagcctgaagctgcaccctcaaagaggagcaagatagatgtacattgctgagactaggaatagggatcacaaatggtcttgtgggaatctcctataagatatggatgagaaactacatgcaacagccatttaccagtatgtctacagttgtcccaggaggaatttcaggccatttcaccaaagcttgggtcagaccttggtcaaacattgcctacatggtctatgtgatgacaggcagggtctcccagttaccatggcagagctgtttccttaaaaagccaattagatgaacagaggaaccaaaaagttggggatgctgttgatctgttccaacctccttaatggctttccaggttagatagccactgttacaaaacacagtattatgatgacagtgctaagaggtgttgttttcaaartgtcaagagtaatccatgaggatttttacatggtatttgttcacttacaatacattataatttttcctgtccaggtgggctagtagtgaggcaagaaccaagatggggcttctgggaaaagtcataaggagtggttaatttagacaagctgtttcaagacgaaggaaaaaactcatggtgtgatt

SEQ ID NO: 705126 - DNA, 1320 bp, Homo sapiens
tgttgacccttgatcagacaggacatccattactgaggatcactttttgccatgttccttaagttttgttaaggatagctctatatgtgtcttaaataaatgatatatgttgatatgacttgatgcattttaaaaatgcaccataataagattcctagtaaaatgtttaaatagtgtggaggccaaattacgtggtagttaaaaagaagagcactggtgttgaattgtgtctactccaaaatgggttctggctcattctaactgtgcactaactgtgagaaggttacttaacttctccaaatcccagctgccacctctgtcaatccggactaataagggaattgccatgatacattgtggcacggtagctggcacatatgtccaatacgtgttagttattcatgttaaatgagatttagaatgttaataagctcactgctcactgtataagaggtattttataaatattagttgaaaattagtgtaagttgtgtctccagagataatttctctcacaaagggagcaatatttttgatgaaatttgggactaactattaagtctgtcaagtgatcaaacagcccataaactgcaccatgatggcagctgctaggtttgcttgtcgcatgcccataggttgagccagtgaggaggcaacaaacccaaataaatccagaaagtttattatttacacagcagttttataaactcacacagaagcctgaagctgcaccctcaaagaggagcaagatagatgtacattgctgagactaggaatagggatcacaaatggtcttgtgggaatctcctataagatatggatgagaaactacatgcaacagccatttaccagtatgtctacagttgtcccaggaggaatttcaggccatttcaccaaagcttgggtcagaccttggtcaaacattgcctacatggtctatgtgatgacaggcagggtctcccagttaccatggcagagctgtttccttaaaaagccaattagatgaacagaggaaccaaaaagttggggatgctgttgatctgttccaacctccttaatggctttccaggttagatagccactgttacaaaacacagtattatgatgacagtgctaagaggtgttgttttcaaaatgtcaagagtaatccatgaggatttttacatggtatttgttcacttacaatacattataatttttcctrtccaggtgggctagtagtgaggcaagaaccaagatggggcttctgggaaaagtcataaggagtggttaatttagacaagctgtttcaagacgaaggaaaaaactcatggtgtgatt

SEQ ID NO: 705127 - DNA, 1334 bp, Homo sapiens
gtttagaattaccattggtctatagatgagttcttccctcctattttctcatcaggtaatgctcacttttttatgccttggatgtagttctgttattatatttaattctacatgttattatttttctttatatatatatccctgataacaaactgtaatgccgttgagctctagttcatggttcatggttttgcattcctggcatagaatatatattcctcaaacttttgttgaaatgaattgagttgaatttaattaaattgaatagttttttgtttttttaataaaaccatccacactctttcttcattttccttctgaccaatgacaggtatttgagagatgaacatgtttaagggcacagtttttgaaatggagcagaacaaagttaaatgatccacaaggagatcaatgcctagaattagaccatagaagcataatgctcaaaccaacaaacacacctttttgaggcctataatgaagctagagatacattttttgtttctttgctgtggtttagctgtaagagatctgtatttccggacttataggaaacagatgttattaaaataaagtcaattactattggtaaagttatccaactgtttagygcatacagtaaaactaatattaataaaatttaatgtattttagagtcagaacacaaaattcaaaggtttaaggaaattaagattgaaaataaataaaaaaggtaatatgcataaatatatatataaaacataaaatataactgtatttcaaaagcattttataatatataccctttttcatttttatagccgaataatttagtctaaaatatttatcttataattttgattaataatcaattatactgagaattcagatgaatagaggtttactagatgctttcaaggaatataaatttttaagacgtattcatcaaataaattaaaagctatgtcataatatggtcttgttggaattaagattttgtgtcctttatttcacttaatatttgtcactagagacataatttcaaagatggagtttttaaacttaggttgcttgttattttcagctggattaaatttgggctaaagataataatataaaagatattaagttataaccttcaaccaatgttttctgaacttgttggatattagcaatcatccaggatacttgttacacaaacagatcatcagtttaacttagcaggttcgagtcaggcctcaagaatttgcttctttttacatggagtccaggtaattcttatttttcagcatacttaacgactgcatctttataccatcttaataaacgcaaaaattcagaaaatatgcaggtca

SEQ ID NO: 705128 - DNA, 2181 bp, Homo sapiens
gaactccgctctcttttttttttttttttttaaagacagagtctcactgttgcccaggctggagtgcagtggcaccatttcagctcactgcaacctccacctcccgggtccaagagattctcctgcctcagcctcctgagtagctgggactacaggcatgcaccactaccacacctggctaatttttgtatttttagtagagacggggtttcaccatgttagcaaggctggtctcgaactcctgacctcaggtgatccacctgccttggcctctgaaggtgctgagattacaggcatgagccactgcgcttggccagagatctgctctggaagaccccccaggctggagggcactgccacaagcagacagtatggcgagggtccctatggccmcctggcaggcaaggtggattctggagggaggtggcctgggagcaggctgaggatggggtgagggcatttgagcagcagagtgtctgcgtgactgggcataactggagggacagtaaatgactcttgtgtgagaggatgagggtggggtgagaggggctgactacccctaggacttttgtatttttagtagagacagggtttcaccatattggccaggatggtctcgaactcctgaccttgtgatctgcctgcctcagcctcccaaagtactgggattacaggtgtgagccaccgcacctggacacgttacttaatatttctgtgccttggtttcttcatctgtgaaatgggattgttgtgagaacacaaagggattcccagggcagttcctagtgcatagtctggctgcctttgtgtgtgtgtgtgtgtttaatatagagacagggtctcactatgttgcctaggctggtttcaaactcctgggctccagtgatcctcctgcttccacccaaagtggtgggattacaggcgtgagtcaacacacctggtcactttatattattatttttttcttttgagacagggtctggcgctgtcgcccaggttggaatacagcggtgcaatctcaactcactgcaaactccgcctcccaggttcaagcaattctcttgcctcagtctcctgagtaactgagattacagatgcctgccaccacacgaagctaattggttgggtgtggtggggctttccaatgattacttattaatgattacttatgaaaaacaacaacaacaaaaaagccatcttgaagctgcttttaatgagaaaacaaatgtgctcccaagcaacagagcagcgaaattctttattactggattctaactttcctctctaactgtaactgtctcagctccacttcatgtgacctggagggtatgttgcaacctgcgtcttcaccacccattcatgaagatctataaaactaatgtaaactgctggggcaatttcaacatgagtcaactggagattgttacttggtgagaatgcgcaagtggcaaagatctaaatttgttcagctaatttgtaattaaccttcgcttctcacatgtcagtatgtgaagtgtctggtttaagcaatttatccaaaaaagccatagactctttaaataacaacaaaacctgggcctggaattttataaaggcagaatgagtaagacacggtttcggtgtgcttttttaaagaaaacagggtcttgctctgttgcccaggatgaaatgccatgctgcatttacagctcactgcagccttgacctcccacctcagcttccagaggagctgggattacaggtgtgcaccaccacgcccagctaatttaaaaaatttttgtagaaacagggtgtcactgtgttgcccaggctggtctccagcaatcctctggccttgaccccctaaagtgtggggattacacgcacgagcaacttgccacttactatctgactgtgacctggaaccagaaaggagattccgagagtgtgctcaatcaatcacaaactgacctttttcatgggtttcttgaactcctgtagctcttcagcactcatgccttcccatacctgataaataggatcaatgaatttctttgacctgtcaacaaagatcacatttcaaagtcaagttaaatacttcagcagaagtcaaaattggtttggatcttttctcacaagatctattacccaaaaccaagaagtgaaaactacagcttaaataattacattaaaaaaaacctg

SEQ ID NO: 705129 - DNA, 2392 bp, Homo sapiens
tttttgactttttgtacagatggggtctcactacattgcccaagctgtgccagaattcctggatgcaagcaacccttctgctttggcctcccaaagcgctgggattacaagcatgagccaccatacccagacaaagcccttaatttcttacatatccatttaagggcctgaataaaccaacacattaaaaaggaaaagaataattcacataccagcgtgagtaaattcaagactgagatgatataatcggtaccacaagtctggcaattctccagttggtctaatccatatgtaatgaccatgtcacaatgtatagtcatgctaggatccaagctgccgagcaaaacaccaacacgctcattagcagctgtcaacacagcctcagaaaaaaacacctggtttgcagccgtcacacatctcattactctgtacagcacctgtaaatggggaaaaccagcagctttttaaaaaaattcacgtgcttccacaaagcaagaaaatactttttatttaatgcaatttcaactgaaaattaactgcttgccttgccagcagtctcttaatattctagttctcagtagctgaataatgatgatacctttactacaatatgtaaacatgatcttggctaaaaaatcctaaagtgctactatgacaggaaatggaakctgccatcctctatttcccacatacccaacttcgtttctcccaatgtcactaaatggctgaagctcagaatctttatcatgaaatacaccacgacagtaatggtattgacagcatgggaatagcctgcccacacatactacaagctagctcttgggcttttgggaatcaatctttcaaaactgaacatacaagtcactttaagcttattaaagtttctatctactgatggtctcttttgaaagataagcactctcatgcttgccacataatatcttcaaaaatcatattatttccaatacacacacacacaaaatcccccacttaactataatagccaataattgtgtactaaatttctaataaaataggggagaaaacagagcaaatgttaaaaaatatttctataatatttaacaaccaatacatacaggattttatttagtctacccatagttttcattaaaagtatccttagaggttgggcatagtgactcacatctatcatcctagcactttgagaggattagctggaaggttctcttgagtccaggagtttgagaccagccatgtcaacataacaacacctcatctctaccaaatttgtttctaaattagttgggtgtggtggctcacaccagtagtcccaccaactacttgagaggctgaggtgggaggatcacttaagcctgggaggtcaaggctgcagtgagccaagatcgtgccactgcactccagcctgggcaacagagaccatgtctccaaaaaaaaaagagttggggggagagggcggagggggaagcattcttggccatgcatgcacagtggctcatgtctataatcccaacactttgggaggctgaggtgggaagactgcttgaggccaaaagttcaagaccagcctgggaaacactgagaccccatctctacaaaaataaaaaattagcaggagctatgctgggaggatcacttgagcccaagagatagaggctgcactgagtcgtgatggcaccaccccactttaaaaaggaaaaaaaaaaaaaagctgggtatggtgacacccgcttgtagggctgagtgaggtgggaagttcacctgggcccaagagttcaagactacagtgagctatgattgaactactacactccagcctgggtgacagagtgaggttccagctccaaaaataaataaaaaaaataaaaaccccaccattctaccattctcaaaggcctaaaagatcctcataaatcaatatacacctatcctataaattatgtcccctttattttatgtctgaattaacggctttttatttcaactctgtacagtcttcaaacaaccaccttttagacattaaaaatgaagcaaagatattaaaccattttgaaaccatattggtttaaaataccgatatgccggtttcatttatctttaagttctgacatttctgctcaagtacacaacttactatataatcaatatcctattttatttagcaacatgttcagcaaaagtatatgctcctaaaagcaagttttatcctaacggtaaaattttcatcagttagattaaattttttatgactgtatcacacatgcttctttctccttattcaaagcagagtacaatgcctggggttcatttcttgtgtcttttccactgaaccctcactggatgtgctatatacagtgcagctaatgtctgaggctgctgaagtgtggcaatc

SEQ ID NO: 705130 - DNA, 2685 bp, Homo sapiens
tacctttactattaagagttaaatgtttgtatcattttctggtgacacagtagtaccataaggcagcagagaatacaagttaaaaaaagatctgggctcaaatcccagctccagcactgaaaagtatgtgtgcytttgcacaaattacttgatctccaagccttggttgtctcttgcataaaatgaggatgatacctatctaacatgtaaggttgttgtgaggctaaaataagataatgaattataaagaaacacttagtttgcagggtatgttaaaagttgttatgaccataatacaaaataaactcaaagtttccagtctaaaagacaatgtacaaacagttcatgagtatatgaatataatcaaaacaagtttttacagtcaatatagagcaacttaaatacttcactgaagaaagcaggtaatctgttgctaccaacaatgtgtttccaactaggaagcatctgatttcaaactaaactgtaaaaccaggagcagcttccccgttggttagaaataaggtttctaaatcccctaagttatgaacactgagatttttttcccaaaaaaaatctgtgttttcagaaatataacaaaaaaaactggaatagagccaccgtctcagaaatacctcaaaactccctagttgccaaattattttaatacaaattgatcaaagcatccccaaccagaactcaggttgtaagcattctgaacctaaaagcacaaaatggtttagcatttataagaaatttctatttttatacaatcttgactgcttaggtttcaaaaaatgtcaatgtcaggctgttagcaccaacaagatcatcccagtccaataaatagagaactgttgaagaacggaaatgagcacttaaaatgaggcaatcaaagccacaaaatagaaactgcagatttgaactccaagaagcaggcatgaatgttaggctagttagttagaagagctgaaagggatatcatctgccagaattagtgtctcaatttagtgaaaaaagaaaatctatctgttaagtctaagaatcctagcaaggaaccaaaaatacctctacagcccctttaatattctaaaaatatcatggagagaaaaaaaaagaaatgcataaatttccccaaaacgatcaaactgaagttaaagcctgatgtacatgccacatgagaggtaagtttctaaagctcatacctcaaaaatcgcctttgtgatgttgtgcatcaagtcaatctgtaagacagtagttacaatattagtgaagacagtgggttaaaacatttgttgttcaaacatggagcaaatatcattcatgagttaggtgcctttagttgaactatggtcccattagggttcatacattaaagcaaaaattgaggtggaaagacactctgtgccttacaggataaagaggcttaatgtggcaaccaaaaaaattttagtacataagagaatttaaatgttaactatcacatacaaatcacatgcaaatacagttaccacttattttagttacctattctcaatatacagaaaaatgccacaaatctaggaggccattcgtttcaaatgaccggaatccttagacctcacaccaacaagccaccatgtgctggggatggtatcgcctgactaaatgtagccttgcagtccattcttgtaagtattagagagaaaaagagagagagcgtcatctctggaaagtgtgaagtcagggaattccctactaggaagcatttccataaagcaccccaaaatgacttgatgcaaacaccacacctagtggtgtcactggagtaagcatcatattacttcaaattgcttttacctaggtttattaagggattttgctctcatggtgagatctaatttgtaatggatataaaccaggaaatgagatttgcactaaagccaatgaagtaggaatgtacttattctctaaagcagcaaagatagtctcactgtcacagagcagttataggatatgttgctttccatactaatggttaataccacttggaaatgatttacccttcaaaaataaattcaaggttttcccctgtaatgcctcttgcctggattcaaacatgctttaatgaggaataagagaaacggtgaaactatgaataaccctgggccttgtatcattacattagaaacactgctctaaatatgagtctatggctaaaatattaatttgagaggctcagggaatttattatacaaatctcttcttgcagagaacttttaagttcaaatttaataaaacaaaacagaaccattccatgtcaaaattgtaaatgagtatgcatcagttttgcaatactgaaatattaaattaatataatttattggtaaaactaccttagctacctaagtattaagtgtctataataaccaaatcttaattatccatttatgggtgatttgtttccttttttgagacagggtctcactctgtcacccaggctggagtgcactggcatgaccatagctcactgcagcctcgacctcatgggtgcagcctcgacctcatgggttcagcctctcaaacagctgggaccacaggtgcatgccactccatttagctaattttttatttttatgttttttggagacaggtgtctgattatgttgctcaggctgctctcaaattcctggactcaagcaatcctcc

SEQ ID NO: 705131 - DNA, 1081 bp, Homo sapiens
ttttgagatcaaagttaaaagaaggcctgtgcctcgcagggcctgctctgcctcccccgtgtttcctcggggttctgcgtctgtgaccggggtgcggagcactggtgtgcagttctctgtctcgtgattcgtgtaacagtgagtgctgcctgcaccaacagccagctgccttccgtggctgtgtgggctcctgtgcggaggccgcccctctccctggccaagcaacactgaggcgggattgcgtcctccctctcctgaggcaggtcctgctccagacctgcttttttcccgcacgtcacgtgtcctgagacccctcagtggatgcgtcctctctccttccacggccgcacacactcccgtgcccgttgggctgggctgactgatgcatgtggggrctccgtcccatctttttcaactacagatggagctgcggtgggaaaacgtgtgcagatacctcccattttacttttgtgctggggcttttttgggatcagttcctagaagtaggggactgggtgaaaggctgatcaccctcagacaccgaacccctggaggaaacacagggagggaggatgagccctgcgaggtgcaggccttcttttaacactgaccttgggttctcaggactgccgaaatcccctctacccgggctgtgcctctccggcctgtgcctctccggcccttcggcagtgtcgagggagcccccaacacccagcagcatccagggatttcccccagggcagtgtcgggagcccccaacaccccaacagcgtccagggattccccccagggcagtgtcgagggagcccccaacaccccggcagtgtccagggattccccccagggcagtgtcgggagccccccaaccccggcagtgtcaagggagcccctggcagtgtcaagggagcccccagacagtgtcaagggagccccccaaccccggcagtgtcaagggagcctgcctccgtggggtgctgccagccttaggcctgggccagtcggggtggttggatgcctgttctgggggtagagaagtcaggtagcccagggcccgcactctcaatagaccttcagagaaaag

SEQ ID NO: 705132 - DNA, 577 bp, Homo sapiens
ccgggggtccatattggccactgtgggagagagtcgggcagctgaattcccgcaggtgggaatgccagggcccgaggatgttgcccctgtcctgaaggctgtcgcccgatcgctctatccaaggctgccctggggcagcgtcacctgggggtcctgcgggggcttctcagcacagcatccagcactgccacctagtgtgttcccgtcacgtctcctccccccgcctgcaccaggcaccagagacccrgatgccaaggcctgtcagcttcctcaatgggaaacttttcttcagtgaacaaagctctgttttatagactttttaaattttcagctcaaaaaccaaagtctgccagtgttggtggccttggagggctggtctgctgccctgggctgcaggggctgcccggctggggtcgtggtcggggcaggtgccgcccacaggttgtttggctgcaggtgatgggcaggtcccccatcacgtgtccagaggtgggtgctgctggtgggtaatccagctcattacctgtctccccccagccgccttgggctggggaccctgccccgccgaccctgccat

SEQ ID NO: 705133 - DNA, 962 bp, Homo sapiens
atttatccatattttttcataatacacatattccatgaacattttgaagtttcctcttaatacttgcttatttatactgcaaatcctattttgaaattgagaaagtattttaatgatgatatgctttctcacacatatatctttccgagagaaaaagacaccataaaaagcaaatgtgtgtatcattaccagcagcagcagaagaagaaaagaaagaacaacaaaatctgtatgtttccaaacaagtaaagtttttaagtgaattaaaaaactagaaataaggctgttgagaccttggttctactggatgttgtgtttctaattctggtctcttcagctccagctgatattttggagtgtctgaagcactttttgtctatcccaatcagaactttattatgtagaacagaaatgagaaaaggaagtcatgggtcatactttggagtttgcctcccaagtgtctytttcctcatttatttatacatgtagtcacagtcattaggaaaatcagaaaaactataaaaagaagttcctaatatctcaaattctggtccagaatggtatacaggtagaacagaacacaatttattgttaaactatgggtttctgttaataatggattgacaacgataacaataaaataatgataacaggggccgggcgcagtggctcatgcctgtaatcccagcactttgggaggctgaggcgggcggatcacaaggtcaggagatcgagaccatcctggctaacgtggtgaaaccctatctctactataaatacaaaaaattagccgggcgtggtggtgggcgcctgtagtcccagcgactcgggaggctgagataggagaatggcataaacctgggagatggagcttgcagtgagctgagattgcaccactgctctccagcctaggcgacagagcaagactccgtctcaaaacaaagaaaacaaaacaaataatg

SEQ ID NO: 705134 - DNA, 791 bp, Homo sapiens
tctcttgcctgattgccctggccagaacttccaatactatgttgaataggagtggtgagagagggcatccttgtcttgtgcyggttttcaaagggaatgcttccagtttttgctcattcagtattacgttggctgtgggtttgtcataaatagctcttattattttgagatacgtcccatcaatacctagtttcttgagagtttttagcatgaagggctgttgaattttgtcaaaggtcttttctgtatctattgagataatcatgtggtttttgttgttggttctgtttatctgatggattatgtttattgatttgcttatgttgaaccagccttgtatcagggaagtatccctcaaatatttacttgtttgtttgctttttttcctgtaatggaaatgaaattaagtagtaagtagaatgtctgaaaatgcatatttgagaactctattttcttgccattaagtctgtgcttgtgcaattttgtgtataaatttcttttcagttaatgttataatctaaacatttttcatgttataaagatcttcataagtatcttttgcatgatattccttcaaatagttataataacaactacctattcatttttctattctgcaaacagttttgaatttttttctgtcataaataatggtgcaataaatatcttagtggttaaatgtatgtgtatttataacaatttctttagaataaatccacaaagataaaataaatgggtcaaggaatatgaatgttttaaaaactattgatgtacttgtaaaacaatttttg

SEQ ID NO: 705135 - DNA, 941 bp, Homo sapiens
aaagtcttccattcagaatggctaaaataaatgaaattttggctttagaaagaacaagcttgggatttcagggaaattcacttaagtggaacacggtactcccctgacagtggaagataaatgaggctgctctgtacctgcaaaggctgccacgatgggctgggaaagtaaaatagacacctgtaaacttttcagcagctcataatgttctgaaatttccccatatcctcccaacagcaggctggcctgtgccctgctggaggagttgctgtgcgtgcattgaacagtaaggcgagagcctctcctttaatgccacctggcacagagacgtgccaggccccatgggaacagatgccatgagataccttgctgggcatgtggcttctgcttctcctctgctgttccttcagcctttcacctccttcagcacagtgcccccaaagctggagtgtccatgttgctgacagctatcgaccatcagcagaccctcagcatttactcatgaggcagcagttctccagattctcagaggtttaacccaaacacaccctactcacaccactcgccttgtagagccacagccccccatccaagctccagcgrtggccaggagctattttaaggacactgacctaggctggtctctttatgatagtggttgttctcagtgttagcttacatatcagatccacctggagagtgcttcccaacccaccaccactactcaagaatcagctccagttgatttggggtggccctagcattcgtctttttgaaaagctcccccatgattcaaacgtgcagccagggttgagaaccaccagcctacactggagccagataggaacagatgtgatctgggccctccaagaaaggcctccatgccctgatgtgtctgccatgtgggaccgcaactgaggtggaggctggctttattgagc

SEQ ID NO: 705136 - DNA, 2488 bp, Homo sapiens
tgcatttacttctactgctccatttggaacttgtcaaatttggttaatatgaagttaactgttaacataataaagtacactggcctatatggatcctgtggtgaaatttccaatatcatatatgtattaattgtgaagttatttgagtttggtacaagtacacacataagaatccaccggaaatataaatacaagtaaagcataacaattcagtgaattccctttgggatctgtcaatatggggaaaaaagagttattgggttctgttataaaactcgttttgctaaggatagaaaaccaaataccacaatgttctcacttacaagcgggggctaaatgatgagaacacatggacacatagagaacaacacactggggcctactgcagagtggagggtggaaggtgagagaggattaggaaaaatagctaatgggtactaggcttaaaacctgtctctggaaatatctgcacaacaaatctccatgatacacatttatctctgtaacaaacctgcacatatacccctgaacttaaaataaacgtaaaacaaaaaacacttgttttgaaaacacaaatttgtttcagcgtaactattaggaaacaatttgagaatgacacaaattacgcactgcatttgtgcagtgtcatgggtgagaaccgctgggtgaactcagaaattgcattctgctcaatggaacaatggagttggacacaaaacacatgcactcacctcaagtatacaccagctacctcagttcactcccacccacatctggcattcaaacttcacttcttatttcagatagcccacattctatcacttcacaataactaacaaaagcaaaccctctgcatgctcacttccacgagcattgagcctttttcaaggtaaagtgtcttatttattgtattatttatatacatcttaaccatctaacatgtataaaaccatgatcccattttcattagattcttagatatttttatatgacactgacaaaattttttaaaagtgtctttttgcttaactccattttgcatagaccttgtggcttttattctacaattttgcatagtgcaaagaattttaggaacacatatgtcattttatagcagaactcggtagaccataaaactatatataaataattttgagaacttatattgatctgatagagacaatgataattttacaagattattaataatctattatatatatattaggcataattttatgcatggaaaattatgccaactctgatttttaggaaaatatagatataaaacaaggcaaaataatttcatttaatgtagtcaatatttttatcttcatactactaaagcaatagttggaaacatttaatgttttactttcatgaacctattaatgatatggtctatgttattaaacttttgaggtaaatataatttctcttttatatgatcaccagaacccccactctcaatttgctcaggaattattaaatactcttctagatactaccgcacaagtaaaaaattgtacaaataaaattgcacaccctactgagaaaagaactctattttagtaaccttggtaaaaattagagtattttgaaggttattataatgtacacccagagtaatatttaaagctgacaaattaggccagccatggtggctcacgcctgtaatcccagcactttgggaggccaaggccaaggcggrcggatcacttgaggtcaggagttcgtgaccagcgtggtcaacatggtgaaactgcgtctctactaaaaatacaaaaattaggtgggtgtggtggtgggcgcctgtaatcctagttactcaggaggctgaggcaggagaatcgcttgaatccagaaggcggaggttgcagtgagccgagatcgtgccactgcactccaacctgggtgacagagcgagactgcatctcaaaaataaataaataagtaaataagtaaataaataaataaataaataaataaataaataaaaacaaagctgacaaattaaagtcatatttatttttatgctaaatctatggatgtttcaacaatacagtattttatagcttggaacaagcttatcacatatacaaaaaaatcacttacattatagaaacatgacttagtttagaaaactagaaaaggtcaaaaatagcagcacatacttataattcatatctttcatttgaaacctatgaagactgaataaagacatatgatatatatatctaaggaaaaagcaaataaaaaaagactgctaatattaaattgtcttgaagttaaaattagccaaatactcaataccatccctgctgaagtcctgtgacattttcagaaatattttaaaaatctgaaatgcaaattaatgagtattgtcttccattgccttagctgtctttttcccattcattaatacttagttttaagaaatcaacatatacttattctactactggtaggtaaaataattcaagtttca

SEQ ID NO: 705137 - DNA, 2488 bp, Homo sapiens
tgcatttacttctactgctccatttggaacttgtcaaatttggttaatatgaagttaactgttaacataataaagtacactggcctatatggatcctgtggtgaaatttccaatatcatatatgtattaattgtgaagttatttgagtttggtacaagtacacacataagaatccaccggaaatataaatacaagtaaagcataacaattcagtgaattccctttgggatctgtcaatatggggaaaaaagagttattgggttctgttataaaactcgttttgctaaggatagaaaaccaaataccacaatgttctcacttacaagcgggggctaaatgatgagaacacatggacacatagagaacaacacactggggcctactgcagagtggagggtggaaggtgagagaggattaggaaaaatagctaatgggtactaggcttaaaacctgtctctggaaatatctgcacaacaaatctccatgatacacatttatctctgtaacaaacctgcacatatacccctgaacttaaaataaacgtaaaacaaaaaacacttgttttgaaaacacaaatttgtttcagcgtaactattaggaaacaatttgagaatgacacaaattacgcactgcatttgtgcagtgtcatgggtgagaaccgctgggtgaactcagaaattgcattctgctcaatggaacaatggagttggacacaaaacacatgcactcacctcaagtatacaccagctacctcagttcactcccacccacatctggcattcaaacttcacttcttatttcagatagcccacattctatcacttcacaataactaacaaaagcaaaccctctgcatgctcacttccacgagcattgagcctttttcaaggtaaagtgtcttatttattgtattatttatatacatcttaaccatctaacatgtataaaaccatgatcccattttcattagattcttagatatttttatatgacactgacaaaattttttaaaagtgtctttttgcttaactccattttgcatagaccttgtggcttttattctacaattttgcatagtgcaaagaattttaggaacacatatgtcattttatagcagaactcggtagaccataaaactatatataaataattttgagaacttatattgatctgatagagacaatgataattttacaagattattaataatctattatatatatattaggcataattttatgcatggaaaattatgccaactctgatttttaggaaaatatagatataaaacaaggcaaaataatttcatttaatgtagtcaatatttttatcttcatactactaaagcaatagttggaaacatttaatgttttactttcatgaacctattaatgatatggtctatgttattaaacttttgaggtaaatataatttctcttttatatgatcaccagaacccccactctcaatttgctcaggaattattaaatactcttctagatactaccgcacaagtaaaaaattgtacaaataaaattgcacaccctactgagaaaagaactctattttagtaaccttggtaaaaattagagtattttgaaggttattataatgtacacccagagtaatatttaaagctgacaaattaggccagccatggtggctcacgcctgtaatcccagcactttgggaggccaaggccaaggcggacggatcacttgaggtcaggagttcgtgaccagcgtggtcaacatggtgaaactgcgtctctactaaaaatacaaaaattaggtgggtgtggtggtgggcgcctgtaatcctagttactcaggaggctgaggcaggagaatcgcttgaatccagaaggcggaggttgcagtgagccgagatcgtgccactgcactccaacctgggtgacagagcgagactgcatctcaaaaataaataaataagtaaataagtaaataaataaataaataaataaataaataaataaaaacaaagctgacaaattaaagtcatatttatttttatgctaaatctatggatgtttcaacaatacagtattttatagcttggaacaagcttatcacatatacaaaaaaatcacttacattatagaaacatgacttagtttagaaaactagaaaaggtcaaaaatagcagcacatacttataattcatatctttcatttgaaacctatgaagactgaataaagacatatgatatatatatctaaggaaaaagcaaataaaaaaagactgctaatattaaattgtcttgaagttaaaattagccaaatactcaataccatcccygctgaagtcctgtgacattttcagaaatattttaaaaatctgaaatgcaaattaatgagtattgtcttccattgccttagctgtctttttcccattcattaatacttagttttaagaaatcaacatatacttattctactactggtaggtaaaataattcaagtttca

SEQ ID NO: 705138 - DNA, 626 bp, Homo sapiens
agataaaagatataatggatacaaagatggaattgtgcctacaaagataaaacagtttaaagaataagtaaaccaccatcccagttaaatacatggctcttttccaagggtgagggkttttttccttaatcatttgactatatcttgttatatttacctgtaatagtaattaataataaaaagtaattaatatttgaaatagtgacttaactgaatctagccttagattttatcacaaaatgcaaatatatttgccatttgcagaaacaatgatgatttaaaaagcagacaaaatagtaacattagaatttatactcatgaaaaaaaatttttttagacaaaatggctgagcatggtggctcaggcctgtaatctcaacactttgggagacctacgaaggagaatcacttgagcccaggagtttgagaccagcctgggcaacaaagggagaccctgtctgtacaaaaaaaatttaaaataacaattataactagccaagtgtgatggtgcatgcctgttgtcccagctcctcaggaaggtgaggcaggaggatggcttcagcccaggaattctaggctgcagtgaggtatgatggtgctgctgcatcccagcctaggcaatagagg

SEQ ID NO: 705139 - DNA, 598 bp, Homo sapiens
tatgttacaaaagtatattcctaaattaggcttccagttagtttatgtatgaagttaggctgcagtttgttatgtgaagactcctgtatggagacatcctcaggtcaaatttagtttaatttaacactcaaaagaaaccacatgttttccagaccagagttgactgatattgttttccaactctcattctgtatgtttataacaattttatatcgggatacaacagtgtgcmtataatgtgatacatgtgctgttggaagtgttaagaatatctttcattagtgcatttgaaaaatctttccattttaccctatacactgtgtgcatagtataaaaattcccatgttgtctagaataagcaaaaatgacttttataaacatatgatttttctaattaagcaaaattatctaaaagattcatctgtctgccaagcctggtgaaaggctcttacagtcgtgacactgacttgagggaaatatcatggttcaaaggcgcattgacaaaccaacatccagtatttctttcaagccaagtgggtagaaaataattttaaaagaggcagatgcacagtagggagtggggggaaaattaaagcta

SEQ ID NO: 705140 - DNA, 598 bp, Homo sapiens
tatgttacaaaagtatattcctaaattaggcttccagttagtttatgtatgaagttaggctgcagtttgttatgtgaagactcctgtatggagacatcctcaggtcaaatttagtttaatttaacactcaaaagaaaccacatgttttccagaccagagttgactgatattgttttccaactctcattctgtatgtttataacaattttatatcgggatacaacagtgtgcctataatgtgatacatgtgctgttggaagtgttaagaatatctttcattagtgcatttgaaaaatctttccattttaccctatacactgtgtgcatagtataaaaattcccatgttgtctagaataagcaaaaatgacttttataaacatatgatttttctaattaagcaaaattatctaaaagattcatctgtctgccaagcctggtgaaaggctcttacagtcgtgacactgacttgagggaaatatcatggttcaaaggckcattgacaaaccaacatccagtatttctttcaagccaagtgggtagaaaataattttaaaagaggcagatgcacagtagggagtggggggaaaattaaagcta

SEQ ID NO: 705141 - DNA, 640 bp, Homo sapiens
gctttcctgtccccaccccttatgccacattcacatttgcattccacacacacacgcgcacacacatgcgcacacacacacgtacaagcggtggctgggccaaacacacccaaagtgtagatggacccaaacagtaccacctggaataatcatcacctcattcagtgcttggaactctgagacccactctagggagagttctgggtgaggcgggggatggccagttgcccagtgcatctagctggcaccgggtctgagctagggcaacagcagctgtgggaaggggcctgaccttcctgcctaccccccagggaaaagcagaggaggacctgtgaacgttctgccccaacctggttcttcccaccttgatgtgcatccygggacacactgcatccctgctcccctgtgactcacgcccaggttaccataggctgccttggaaacaaagccctgctaatggctgaagaactggtggttgcttttttaaaatcccagctctgcccagaagccaaagtgtgggtagggacgatgggggaggtggtgcacaaggccctcccctctctgcttccatctccccaccccatctgcttccccaggacacccctccatggaagccagccttcccctgcagccccggcac

SEQ ID NO: 705142 - DNA, 1462 bp, Homo sapiens
taaatatgtaagatatgaatgtgaaagtgtgacatcggggttaggataaatcaggctgaggccagataggaaagggtttctgaagacttcatctggcagggtgcggtggctcatgcctgtaatcccagcactttgggaggccaaggtgggcggatcacttgaggtcaggagttcaaaaccagcctggccaacatggtgaaatctcatctctactaaaaacacaaaagttagccaggtgtggtggcacatggcgcatgcctatagtcccagagactcaggagtctgaggcaggagaattgcttgaacctgagagacgaggttgcagtgagctgagatcacaccactgccctccagcctgggcgacagcgagactccatctcaggaaaaaaaaaaaaaaagacttcatctgacaggaagaatagcacagaaaccctcaactcttaaccactgctgtcgaaatggccccartttgttcaggccacctgcacgcacactctgcagtgtggctttgcctcccctcccagcatgagggagaatcgaagtttggccacgagacttgctttagccaatggcaccatagcaaaggtgacataaataaaggctttaaaagtgcttatacctaaaagttcctctctcttgctgctgagaatcattctttttttttttgagatgggtctcactcagttttccaggctggaggggccgtggcatgactaccactcactgcagccttgacctccagggtcaagcgatcctccctctaagcctcctgagtagctggaactacaggttcgtgctatcacaccaggctaattatttttattttttgtagggtcttgctatgttgccatggctggtcttgagctcctgggcatgagccaccatgcccagctgctgctggaaatcattctgctgccacattagcaagcctgaggtagccccctggaggataatagacaatgtgtggagagaggctgaggcaccccagctcagcccccagatgtgtggatgggccagcacaggcaatcagcctaacacaaactgtgcagaccagatcatcaacccacagaaatcataaatgtctgtttgtaggcactggggtttggggctgtttgttatacagagaaagctgactgatacaaccactgaggtttctttataccgctggcaatggtgatacatgaggataaacttgtgtgttaggaagaaagttcagcccctgttgagttggtgattatgaagagataatgagggccagaaggcagggccctgggcaaaagcaggagtgggagattcaagagctcttttagagggagagacaacagcatttagtgactgtctaagcccagagttgtctaaaggcatttgcctggttctggaaaccatgtgtggtgttgactataaacagattctatttggcacctgctgatgggggcaggatgtttacttagaagatacatga

SEQ ID NO: 705143 - DNA, 359 bp, Homo sapiens
agctgggactacaggtatacgccattgtggatcactcttggtgaagggataagcccagaccttcaccaaccttgcagttctatcacagtcgtccttagtttatkcctttagagtccccatcaatcacccttcccactctgaactgtagagaggtacacagcacagtgagttgacttgatcaacatctggtcgagtgtctgggaaatggcagatctaggccttgagccctggtagagctacctcgcttcattcccagcaccccagtaccttactgcctccacctcacccccgtgctccctccttggctgagcgtgagaacagtggcaaaaaaaacaacataaatctaagtctctacatcc

SEQ ID NO: 705144 - DNA, 1119 bp, Homo sapiens
gctgagttggtttatctggtgccataaaattgttctctcacccagattctcatgctgtcctccaggtggcaatgctggtttgtcaaccttctgagatagcgcctgatacttgggccgagcaaagatggaaatggaagggaagcagatgcggatgaggaatggagttgggagtggagtgattattgaaaattagaagacaccctgtcaggtttgcagctgacatgaagctgaagcgcagcctcatacattgggtgtccagattcagattttaaggaatcttgaggaaccagtaagccacaagtaaatattactagcatttattgagcaccaactatggggcttacaacgtgccagatcatttcattcattgtttcttttaatgccctcaacagacctatgaggtaggtcttggaggttgaaataatggagctggaaattggaccttgattcctaaggcctggtattgtatatgagagctttgctagactgaaataagaggatatttaccagggatgaaacatgcaaaatgtttatccatctatctatctatctctctatctatctatctatctgcctatctctcatctatctctcatttcattagtgtaggatgggcctgataacatttcatgaaattaatactagggttttttttttaagttagccacctgctaaataaatcagttacagttytggactgcatcctttaaatgacaacactcagatcaggacagtggagatatttatttcctagctcttcttttcattctcgtggtcactatgcaagataaacatggccacactgaatgatcccagagtggccggcttaaagtctagttgtagcactgagtggttctactcagtataactgtatctctattatacttgtcacctaggaaatgttgaaattatttccctaaatgcctcattctcccagtggaccatgcgtttcttgagggaagaaaccatgcccttcatttctgtattcatagggcctagcaaagtacctggtacatattaatagtaagtcattagtaaagctttttttgagatagggtctggctctgtggtccaggctggagtgcagtggcacgatcttggctcactgcaacctctgtc

SEQ ID NO: 705145 - DNA, 586 bp, Homo sapiens
tttgtttttttgagacrgagtctcgctctgtcgcccaggctggagtgcagtggcgcgatctcagctcactgcaagctccgcctcccgggttcacgccattctcctgcctcagcctcctgagtagctgggactacaggtacccgccaccacgccccgctaatttttttgtatttttagtagagacgggggtttcactgtgttagccggtatggtctcgatctcctgacctcatgatccgcccgccttggcctcccaaagtgctgggattacaggcgtgagccaccgcgcccagcctagaatagctgttttaaagtcattaagaatgttggagagatttggatttctagcataaaagaaatggtggcaacacttctaaagtggacccatatattaatagggacatatacctgtatttaactttttaaattttgaaatagttgcacttatagaaaagttgcaagaatagtacaaagaaatctcaaaacccttcccctggttttcccagcatgttagcagtttgacacatttgctttatctttccacatatatacataatactatctttctgaaccatttgaaagtatgt

SEQ ID NO: 705146 - DNA, 586 bp, Homo sapiens
tttgtttttttgagacagagtctcgctctgtcgcccaggctggagtgcagtggcgcgatctcagctcactgcaagctccgcctcccgggttcacgccattctcctgcctcagcctcctgagtagctgggactacaggtacccgccaccacgccccgctaatttttttgtatttttagtagagacgggggtttcactgtgttagccggtatggtctcgatctcctgacctcatgatccgcccgccttggcctcccaaagtgctgggattacaggcgtgagccaccgcrcccagcctagaatagctgttttaaagtcattaagaatgttggagagatttggatttctagcataaaagaaatggtggcaacacttctaaagtggacccatatattaatagggacatatacctgtatttaactttttaaattttgaaatagttgcacttatagaaaagttgcaagaatagtacaaagaaatctcaaaacccttcccctggttttcccagcatgttagcagtttgacacatttgctttatctttccacatatatacataatactatctttctgaaccatttgaaagtatgt

SEQ ID NO: 705147 - DNA, 1809 bp, Homo sapiens
ctcagtttgggtgtcttgagacatatcctctgtggctaaatgggggctactggctttcaggaagaagaaggagaattgaggagtcatcagcttctaattttttttggctcctagagaacaagcctttctaagggagattcctaaggcagaaactctcatggcacaatggcctttgcagcctccctggctgccccatctgcctggattatcttacagacccagtctccactcactgtgggcaccacttctgtggctcctgcatccaccagggctgcaaagacctacaggacgtcctcccttgtcctgtctgcctccaccactgccctgacaggaacctcaagagcaacatgcaattgcaccacatgactgatattgtccagcagcttcccaccatgaggaacaagaggaaagggcaggaagaggagcccctgtctgagaaacacagtcagggtctggccctgttccttgagaagggcctggagcctttctgtccttggtgcagggtctctgaccaccaggatcagcccctgatgcccactgaggaagctgcagctatgcatgggaggaagttcaaaagctaccttgagcctctgaaaaagcaagctgaagttgctgaaatggggtgtgaaatgcacatttcagaaacttttgaagtgatggggaaggcggaaaagtggaggagggacatattctttgaatttgaacaattaaagtatttcttgagaaaagagcacattgtaagttgtgccaggcttcttattgaagagaaggatgttgggaaaaacaaaacaggcytggcgtctgtaatcccagcactttgggaggccgaggcgggcggatcacctgaggttgggagttcgagaccagcctgaccaacatggaaaaaccccgtctctactaaaaatacaaaattagcagggtgtggtggtgcatgcctgtaatcccactgtaatcccagctactcgggaggccaaggcaggagaatcgcttgaacccgggaggcggaggttgcagtgagccgagatcatgccgttgcactccagcctgggcaagaagagcgaaactctgtctcaaaaaacaaaacaaaacaaaacaaaaaaccccaaccaactgaaaacaaaagccaagtttcagaccatattttcacagtaaaaaatatgctttgtgtctgggcaggatgttgggtgaccatagtcccagctactcagaaggctgaggcgggagggtcatttgagcacaggaattagagcccagcctaggcaatttagaaagaccctgtcccccaccctccaaaaatgctttatgaaataacagggaagtatttgcaagcttacccagggtttctgagaggtactgaaagtatccatagtaggtatgaaaatctgaagacccctgcagtgttgttctatgacataatgaatgagccgggcatggtggctcacacctgtaatctcagcactttgggaggccgaggcgggtggatcacgtgaggtcaggagttcaagaccagcctggccaacatggcgaaaccccgtctctactaaaaatacaaaaaattagccaggcatggtgggggacacttgtagccccagctacttgggaggctgaggcaggagaatcgcttgaacctgggaggcggaggttgcagtgagctgagattgcaccattgcactccagcctgggtgacagagtgagacgctgtttcaaataaataaataaataaacaaaatttacatctgagcaaagacttgaagaaaaagtgagaggattctaggcaaaaactgagagaaacatggtccacccagaggg

SEQ ID NO: 705148 - DNA, 1152 bp, Homo sapiens
ccataagttttataaagtacttttataagtttagtcttctcattttgttttatcttattttcaaaattattttgtttcaatagcaagagatattgtagaaattaacagatgtgaggataaactattaagtgttctggaaatctaaaactagagtgtatgaaattgtgatccctttagtctaatcaattttgcatacaataaaatattttctgtatcatacaaatttcaggtggcagagaagacatgactgtgggagacagttctctaaaggtctctcccatttctgcatgtgttgagagcaatgcactcattgctccagactatgtattcaaagaggtttttgtgggtagatgttatgaaaaggctaatattgtatgattcctacaacgtaacattctttttttttttttttamagcccagaggtcttttatttattttttgttttaacacctattatgccatgaattcatagggaataggttccagcagctcaaactccttcccattggttttcacaaagtgtgcttctctgggtggagcaggctggcgctttagttgaacccaggtacctttctctttggcttctttctttttctgatcattttccttcatgtgtttcaggaagctatctcggctcacagtgtttaatgtgctcaatacgcacattaattctcttggcaagaatcttgcccttaacttgtttgtttacaacaatgccaacagcatgctgggtaacattgtagactcttccagttttgccatgctaacacttgtggggcattccttttgaacagtacccattcccttggtgtctacaatatcatctttcttatagattcgcatatacgtggccaaaggaacaagtccatgttttctaaagggcctagagaacatatatcgggcgcctctcctctttccctttgtgttcatcattttggtgaattactggaagatggtggctctggccgaaaggcataaaattcttaaaatggaaaaactatgaagacagtaaaagaattagtggttgacggggttggagggtgggagagatgaacaggaagagcacagagatatgctaaatgcagtgaattactctgtgtggtgctatgatagtgaatacacaccatacatttttcatctgccacaaaatg

SEQ ID NO: 705149 - DNA, 1152 bp, Homo sapiens
ccataagttttataaagtacttttataagtttagtcttctcattttgttttatcttattttcaaaattattttgtttcaatagcaagagatattgtagaaattaacagatgtgaggataaactattaagtgttctggaaatctaaaactagagtgtatgaaattgtgatccctttagtctaatcaattttgcatacaataaaatattttctgtatcatacaaatttcaggtggcagagaagacatgactgtgggagacagttctctaaaggtctctcccatttctgcatgtgttgagagcaatgcactcattgctccagactatgtattcaaagaggtttttgtgggtagatgttatgaaaaggctaatattgtatgattcctacaacgtaacattctttttttttttttttacagcccagaggtcttttatttattttttgttttaacacctattatgccatgaattcatagggaataggttccagcagctcaaactccttcccattggttytcacaaagtgtgcttctctgggtggagcaggctggcgctttagttgaacccaggtacctttctctttggcttctttctttttctgatcattttccttcatgtgtttcaggaagctatctcggctcacagtgtttaatgtgctcaatacgcacattaattctcttggcaagaatcttgcccttaacttgtttgtttacaacaatgccaacagcatgctgggtaacattgtagactcttccagttttgccatgctaacacttgtggggcattccttttgaacagtacccattcccttggtgtctacaatatcatctttcttatagattcgcatatacgtggccaaaggaacaagtccatgttttctaaagggcctagagaacatatatcgggcgcctctcctctttccctttgtgttcatcattttggtgaattactggaagatggtggctctggccgaaaggcataaaattcttaaaatggaaaaactatgaagacagtaaaagaattagtggttgacggggttggagggtgggagagatgaacaggaagagcacagagatatgctaaatgcagtgaattactctgtgtggtgctatgatagtgaatacacaccatacatttttcatctgccacaaaatg

SEQ ID NO: 705150 - DNA, 1196 bp, Homo sapiens
tgaatgattttgctaaggatctcacaacctgccggagtcaccagtggagacttctttaaactacagcccagatacctgaaaggtaactttggaatcatctcacctagggaagcctgctcctacacctgcctggcgctgcccgggcatagcctatcttttctccacacttctacaaagcaactacctacagaatgagcagataaagtataaatgtctctactggcaggttgttcatgtgtctgtggctgtggaggctgaaaactactggaatgagtttgagaatccacaaaacagaggcaaggactgattctgaaaacacttcttttggccgggcgccgtggctcccgcctgcaatcccagcactttgacaggccgcggcgggcagatcacgaagtcaagagatcgagaccatcctggctgacaaggtgaaaccccgtctctactaaaaatacaaaaaaattagccgggcgtggtggcgggtgcctgtagtcccagctacttgggaggctgaggcaggagaatggcgtgaacccaggaggcggagcttgcagtgagccgagatcgcgccactgcactccagcctgggcgacagagcaagactccgtctcaaaaaaaaaaagaaaaagaaaatacttctttcaaggggcaaaaaagaattaaaatggctgagaagaaagaagccaacactagccaagaaattttgcatctacctccctgaaaatataaaataaattaaaaaaaaaaaaaamcatgatgagaactttcccaatattcaattaacccagtacaaaatcactgattaacttagaggagtttcaacggagtaatgagagaaaaatccagtcttcaactcctaatcccctcacgccctgcccactccttttcccaggccgaaaatggaatcagagaggaaggtggaaaatgctcatctgaccctgtgattggccagagactaattgcatctggagtctgtccagttggaaagtagaaagaaaactctccacagggttataagctcaggagccaggcttagaacttagaaggaagaatacacgcctgattgaacatccttttaaaatgagaatcatcttctccccataagcaatagaggactttcagtggtgactctttcctgagcaagaggactcacagtggaccttcaattcctgaggaccagtgaacacagcggaagacag

SEQ ID NO: 705151 - DNA, 653 bp, Homo sapiens
agacaaaaaatgaacaactaatgaatcaagtgtgaggggtacatggatgttcattgtattaatctttcaacatttctgtaggcttgaaaattttcaaaataaaatgcagagaagaaaatttgcacgtctagaaaaggcttgtgataaataattcatagaatctcaggattatgagaccagcctgggcaacatagtgagaccttgtctctacgagaaaaaaaagaaaaagaaaaaagaagatcacgtggagtcttacaccatytcttccttcactaacatttgcgtagttttatctcacacatcctaaactggatcacactatactcaatgtacaaataagcattagaatgtatgaaagtgggcaagacgcggtggctaaacttgtaatcccagcactttgggaggccgaggcgggcgagtcacctgacctcaggagttccagaccagcctgaccaacatggctaaaccctgtctctactaaaatacaaaaatagccaggcttggtggcacgcgcctgtaatcctagctactcagggggctgaggcaggagaatggcttgaacctgggagccgagattgcaccactgcattccagcctgggcgacagagcgagactccgtctccgccgccccaccaaaaaaatgtatgagtgta

SEQ ID NO: 705152 - DNA, 653 bp, Homo sapiens
agacaaaaaatgaacaactaatgaatcaagtgtgaggggtacatggatgttcattgtattaatctttcaacatttctgtaggcttgaaaattttcaaaataaaatgcagagaagaaaatttgcacgtctagaaaaggcttgtgataaataattcatagaatctcaggattatgagaccagcctgggcaacatagtgagaccttgtctctacgagaaaaaaaagaaaaagaaaaaagaagatcacgtggagtcttacaccatctcttccttcactaacatttgcgtagttttatctcacacatcctaaactggatcacactatactcaatgtacaaataagcattagaatgtatgaaagtgggcaagacgcggtggctaaacttgtaatcccagcactttgggaggccgaggcgggcgagtcacctgacctcaggagttccagaccagcytgaccaacatggctaaaccctgtctctactaaaatacaaaaatagccaggcttggtggcacgcgcctgtaatcctagctactcagggggctgaggcaggagaatggcttgaacctgggagccgagattgcaccactgcattccagcctgggcgacagagcgagactccgtctccgccgccccaccaaaaaaatgtatgagtgta

SEQ ID NO: 705153 - DNA, 928 bp, Homo sapiens
tgaagttgtaattagatggaataagagaattgagactacaaaagctctctgaaggtaatagcaaaggcgtaaaataccctatttcaaatattgtgaaatactgtatgaatggcaatctttgggatgtattttacaaaataccacacatataaattaaaacttgactttagatccgctcgtaggttttaatacaaataagcaaaccaataatgaaaataagattatagaggcaacagtgcacctgccaaggagaatatattttcttttcttttttcaagacagagtctcactctgacacccaggctggagtgcagtgacacaatcacagctcactgcagcctcaatctccagagctcaagtgatcctcctacctcagcctccaagtatctgggactgtaggcacatgccaccacgcctggctaatttttttttattttttattttttagggatggtgtttcactatgctgcccaggcaggtctcaaactccgggactcatgtgatcttcccaccttggcctcctgaagtgctgggattacaggcttgagccaccacactgggcctataccattttcaaatagtggagccatccattacatatttgtaacatatgtgttgattaacaattaatactcttagttccaagctccatttggcaatayaaaataaatggagggtttgctcacatctgatggatatgactttctctgtgaagactgaagcaagatcatctgagtgtaaggaggcagtataagttcggaaattaaggaaggtagagatgcttaaggtagctttgcagagaataggagcgcatgtccaccagacagatgttataggattgccatggcttgaagtttgaaacccagctgtggatgattgagatgattcatgtatttaatgatactaatagaatgatacccgtgagcaa

SEQ ID NO: 705154 - DNA, 741 bp, Homo sapiens
ttggggctggctctttattctaacatcagtggggaaatcattggatggttttaggcagcaaagcaaagtgatctcatttattctttaaaatgttcactctggttattccctgggtttgtgctaagtctcaggtttctaatttataaaacaggagtctgagacagaattttccaccctgcttatccccacaaaagtctctcctttccaggctaaacattccagttcttttaaccaacctttatgcagtttggcctcttcatgatctttgttattctctgcaaaattgacatgtggtcatgtcctctggatttggggtacttcaaactccagcccaawgctctatccatggtatgtccaacattgggcagagcaaggctgccagccctcttgtgagatcatttttgacatgtgttaacatttccgatttcattgcaaaatctctttgctgctaaccctgaaggtgaattgtatgaaatcattctttgctactgtggaactgtttccctctatcaggcattctgtctacagttggcaacattaggacagaaacaccaggggtccatgcatgacattgcttctgagatgagcttgggcaggagatggcctaattgagatttaggtatcacccttgtgagagtgtcaagttcttttgaaaagtggctacactgacaatctttacatttagaaacactgaagacttaaatcttagttccaaagtaagtcatctgagaatgatgctgc

SEQ ID NO: 705155 - DNA, 576 bp, Homo sapiens
atcgccttagatcattcctgctctgcgtatttttccacacatcagtcctgttcaaagggcacagwtgcagccatgcatgaccatttctccacttgttttctttattttttgttttaagctacaaatctttccattttacagatatgcctcttggatggaggaagtactgataaatttgttaatagataaatcaatttcagcatccaagaaaagaacattgtttgtcagtagagcaaacttccagccttatttgggggaatttctgtaaccttttatctcatgcaaatctaatccaaatgttagatataattaatgactcaaaaatatttcaaaggcattatctcttttgcttttgtataaattcttaaactagatgtggaggaaagaaggaaagcagaagtaaatatttgtggactgactactgagtgctgggcattgcacctgtctttctttacttctcatacaactgtgtaaagaagttaatagtccctctttataagtgagggctgcaaagctcagagagatgaagtaatttggtcaatgttacacagctagtatggagaggagcagtattaa

SEQ ID NO: 705156 - DNA, 576 bp, Homo sapiens
atcgccttagatcattcctgctctgcgtatttttccacacatcagtcctgttcaaagggcacagatgcagccatgcatgaycatttctccacttgttttctttattttttgttttaagctacaaatctttccattttacagatatgcctcttggatggaggaagtactgataaatttgttaatagataaatcaatttcagcatccaagaaaagaacattgtttgtcagtagagcaaacttccagccttatttgggggaatttctgtaaccttttatctcatgcaaatctaatccaaatgttagatataattaatgactcaaaaatatttcaaaggcattatctcttttgcttttgtataaattcttaaactagatgtggaggaaagaaggaaagcagaagtaaatatttgtggactgactactgagtgctgggcattgcacctgtctttctttacttctcatacaactgtgtaaagaagttaatagtccctctttataagtgagggctgcaaagctcagagagatgaagtaatttggtcaatgttacacagctagtatggagaggagcagtattaa

SEQ ID NO: 705157 - DNA, 1011 bp, Homo sapiens
tgtttattttcaggtaagacttcaccttatatcatgccaagaggcattcttagaaattttctctcagcacaattgccagtagttttgcaggacaaggggaatatacatcaattttctctaaggggaggacagaacaatgcaagtatgtacgtcaggcagaacagaatttaatgagttaaatcctttttcaagagagcttactttttatgcctctacaagagccttaataaccacaggcaaataatctcactcaaaatccttgacaaaaagaatgccacaatagctcagaatggattgatgaatgtttgaaagccttttattagaattctgcaaattgggaacacttctgtgaacaaacctcccaaagcaagaatttttcatttgactgccagagtaagcataatagcactagcctcattctgtgtgtaatgacaaagagatacctttttgtaatgtggaagccttatagtagctttgtttattttatctttgatcattgcctttagccctggtttggccttgctctaatcttgttgagctagctagctaaatagaaagccatcactatattttttagtttttctatctaccagacacatccattacaattattctaccctcaagtaactccctacacagtaatctgagaggcttgcatgaaaaatccagttctacacctacacataaacatgggaacaataggcactgtggactattagatgggggaaggtagggagaggggtgtgagttgaaaaactacctattaggtactatgctcactacctgggtgcaaaatacccatgtagcraacctatacatatatcccttgcatctaagttaaaataaaaaaaaattcagccctgccacttagcatggctttgggcagattacttatgcacactgaacttcagttacctccactgtgaaatgggaattataaaagtgcctattccaatggattgttctgtggactaaatgaagctaaagttctgtaaagcagctagcatgttg

SEQ ID NO: 705158 - DNA, 587 bp, Homo sapiens
gatgcaatctttcattacttttattttaaggttttgtgttccccctctcctatgccctcttctctccacaaggttggtgctttgctaggaatgaaacagagtgtaaggaggtggttctcccttaacctcagagatgggtcctcttccctttttctcctctaaattcccataatgctatatctgtattccgtgarccctgtgaggcagggactgtgcttgtcttacttttcagtgtcttctcagctggtactctggtacctaacatatagtaggtgctcaaaaaacatttgttgaatgatcaaaagtcacttccctcccctcccctcgctctcttattaagctatcatgagaggcagtgtgatgtaatggttaaacctgaggctttgcacattggagttgctgagttcaaattctagttctgcttttattctctgtgaccttggataagctagttaacctctctgttcctcactttcttaatctttgcaatagggtgataatagcacttaggatatagtaagcatttgtactgtgtcagctactgttattctgaacagcaggacctgtgtctggttttgtcttccttg

SEQ ID NO: 705159 - DNA, 701 bp, Homo sapiens
  misc_feature 2, 3, 4, 5, 6, 7, 8, 9, 10, 11, 12, 13, 14, 15, 16, 17, 18,19, 20, 21, 22, 23, 24, 25, 26, 27, 28, 29, 30, 31, 32,33, 34, 35, 36, 37, 38, 39, 40, 41, 42, 43, 44, 45, 46,47, 48, 49, 50, 51, 52, 53, 54, 55, 56, 57, 58, 59, 60,61: n = A,T,C or G
  misc_feature 62, 63, 64, 65, 66, 67, 68, 69, 70, 71, 72, 73, 74, 75, 76,77, 78, 79, 80, 81, 82, 83, 84, 85, 86, 87, 88, 89, 90,91, 92, 93, 94, 95, 96, 97, 98, 99, 100, 101, 280: n = A,T,C or G
cnnnnnnnnnnnnnnnnnnnnnnnnnnnnnnnnnnnnnnnnnnnnnnnnnnnnnnnnnnnnnnnnnnnnnnnnnnnnnnnnnnnnnnnnnnnnnnnnnnnnagccaagcatggtggcacacacctgtaatcccagctactcagcaggctgaggcaggagaattgcttgaacctaggagatggaggttgcagtgagccaagatcatgccattgcactctgcactccagcctgggtgacagagtgaaaccctgtctcaaaaaaaaaaaaaaaaaaaaaaaanaactatattgctcagtaaatgtccttgttctctttacctgatgtgtaaagkggtgggaccaaagaccaacaaatggctcataaagcatataataactatttggggccatatttgggctctgactctcctgccctaataggaggaagaaggtataagcagcattcctctcatatctcatacactttcaagttagttcattagcagaggtgtgctatttctgataaaaatagattgtgattttctaatatagattatgaatgaagaaaaagaagtgaatgaagagctttaaatagttagatgaaaccataagagccaggttaattctcaaatgcctgcttatggctctaaccaacttcatcccccatattctctgaagaatccaaatctgtggattactcatttaacatatttgaacattaaa

SEQ ID NO: 705160 - DNA, 701 bp, Homo sapiens
  misc_feature 2, 3, 4, 5, 6, 7, 8, 9, 10, 11, 12, 13, 14, 15, 16, 17, 18,19, 20, 21, 22, 23, 24, 25, 26, 27, 28, 29, 30, 31, 32,33, 34, 35, 36, 37, 38, 39, 40, 41, 42, 43, 44, 45, 46,47, 48, 49, 50, 51, 52, 53, 54, 55, 56, 57, 58, 59, 60,61: n = A,T,C or G
  misc_feature 62, 63, 64, 65, 66, 67, 68, 69, 70, 71, 72, 73, 74, 75, 76,77, 78, 79, 80, 81, 82, 83, 84, 85, 86, 87, 88, 89, 90,91, 92, 93, 94, 95, 96, 97, 98, 99, 100, 101, 280: n = A,T,C or G
cnnnnnnnnnnnnnnnnnnnnnnnnnnnnnnnnnnnnnnnnnnnnnnnnnnnnnnnnnnnnnnnnnnnnnnnnnnnnnnnnnnnnnnnnnnnnnnnnnnnnagccaagcatggtggcacacacctgtaatcccagctactcagcaggctgaggcaggagaattgcttgaacctaggagatggaggttgcagtgagccaagatcatgccattgcactctgcactccagcctgggtgacagagtgaaaccctgtctcaaaaaaaaaaaaaaaaaaaaaaaanaactatattgctcagtaaatgtccttgttctctttacctgatgtgtaaagtggkgggaccaaagaccaacaaatggctcataaagcatataataactatttggggccatatttgggctctgactctcctgccctaataggaggaagaaggtataagcagcattcctctcatatctcatacactttcaagttagttcattagcagaggtgtgctatttctgataaaaatagattgtgattttctaatatagattatgaatgaagaaaaagaagtgaatgaagagctttaaatagttagatgaaaccataagagccaggttaattctcaaatgcctgcttatggctctaaccaacttcatcccccatattctctgaagaatccaaatctgtggattactcatttaacatatttgaacattaaa

SEQ ID NO: 705161 - DNA, 1081 bp, Homo sapiens
tgctctttattgatcatttactgtgtgtcaaacactgagctaaaccatctacacatattctcattcaatcttcagaattgttctagaaagtaagttgtactattcccagtatagaaacaaacaagacaaagctcagggaagttagttagtaatttactcttgtccacatagccaataaatagcagggtgaacaatgaaatccagactttgtaactactaagcttttatctagcatctgtgcaactgggcagaggccatcagggtatttccaaacatcatatattggaaagctggaaacattgatgaatggcccttgacctcttgttcttagatgggatggagggaaggagtgagttggagagggccatggcaggggcagtgggagcatgataatcataagtataacctgagaggaagcagcagggcaagtcttgaaactcaaccatctcccagagttggggacatgctgtttcctgcactgtttcatttcttcatgaagrttttcttttttcaagccaaattccatattatctacttttttaaaccagctattctatctttagttgtaattcagcttcccaataatgtttttgctttgtttctaagggattattgatggaatgtcaagactgagtattactgttgtttctgattactgtgaatagcgggtgtgtcccacttcctttcagaggggctctgacagttgccttaggtccatgacatcgtcttgggtattttctacaatcgctttctaaattctaaagtttggatgtctaactttccagattttacaaaacatattaaaaatctatactagccaaatgaaagattttggttacatttgagtggttagtaaacattagctttcctttactatttaacctcagattagaatttcagagactggaatttactaactttaatgtaacattaacaatttccacagttcataaagcactacaggaaaaaatatatcaggtaactagccaagcacggggcataaagtttgctataaatattaaaggtacatttgtcataaatcactagatttagatcataaagtatccttctacataaagta

SEQ ID NO: 705162 - DNA, 2554 bp, Homo sapiens
ttaaaaatgacttaggataattgagttctgtaacacctttggcaaaacaacaaaactagaacatcacaacaagaaattgtccagttttcttgcgaaaattattttaaaaatcattttatttttatttacataaaaatacaaatgattataacatgaagtgcccctaatctgttatttgtttgtgattggtaacctcataaagagagaatttgttcctagagcttattcattgactggaatattctttgtgtggatatttatgtacaatttctcattctgggacttgtcatggtgattaatgacatattataagaataagcacattgaataaatgaacacttttaccctgaggagatcatgaaagatatgagactaactcatcttagcagaaattttggttgcaaataagcaaataactttatcacaataacagctataatacctcattagatagtgtctcttgccctgtgaatctttattatatcattattccttccacacttataatcagtgtgatataattcatttttatttgttttctgattttgtatacttgctatttttttctgtccaggagactattatcttctgctcctaacctacccactcaatatcactttccccgttcatcagctcctagtgcttagaatggttctgggcacatcgtgacaagaaattaatatttgtttaaaaattttagctttaattgaattaattaattaattaaaagggataatcacctgaggtgctttgggaggtaagaaaaggagtggattatataacaataatctcttgagatctttagaccttttcctcctgtattatttctaccttcataaaagtatgacatttgcacttatagtattaatggttatggggaaacaaaacctccagagactctcaaagaaaaaatgtcttcacatttactgctggtattattcactacaatcatacaataaattaggatttctatcttaaaactataatctggcctctgctgtaagacagcaactaaaagaggaaaataaamctggaaaaacacaaacaagcaaatagctgtgataggaatagaagaagaagaattttatgcaacaaggttttaaggagccaagattccagaaagaagaagaagaagaaggagaaggagaagaagaagaagaagaaagaagaagaaggtgtttaaagtcagtcctatattccctgcttcctttcccttgagggggtttccaattcctgaactgcatcaagaaaaaagctgaaaagaccagcagaaaggtagttttaaaatttagcaattagatgaagaggaaaggaaatggggaatcagaggccactgagaaggtaaataccccagattccagctaattctctgaaaggctacaccttaggagttggagcactggttctacagcagcctcaccaggactagaaactttgaattgattaaagagatcagcatttattttcactgattacaagaagaaaagcaaattctctctggaagaagatagtctaatctgagcttcacacagtgtcaagaccaaaagactgaaaataaaaaggaaaaatgaacaacagaaacagattgacacataatctggatgttggaaatagcagaaacagacttgaacataacagtttcatagactaccattctctggtaaaatattgcactttttcatctgaattttaccaaaaaactggaattaattcttttaaaaaagtatcaaatgcttattttagtactgaaaaatttgctaattgaaattaagaatgtaacaaatagtttaaacagcagaataggcacagagtttgtgaactgggagacagatgagcggaaaatatccatacataagcatagcaaaagaaaataataaatatatgaaaaagaaaatcaaaaccacatgagatacagagacaaactgtaatacatgaataagtagaattccaaatagagagaagaatgaagtataagcaataactaaagaaatactagctgacaactttccaaaactgaagatatcaaactacaaattcaagaagtattatgaaactcaagtaggataaaggaaaacataccgaaacatttataaaatgctgaaaaccaaacacaagcaaccagacttaaaagcatccagaagaaaactgttaaaaggagcaaaaataagactgccaactaacgtttcaaacaaaggatgaaagccagaggaaaataaaatgtcatcataaacgtggtgaaagaaaataactgccaaccccaaaatctatacccagccaagatagtcttcaattaaaaaaaagataaaataaaataaacacattttcacacaaacaaaaactgagagaactttttgccacctgatagactaaaatatatgatagactctttttacaaagaagaaaaatcatcccagttagaatcacagaaaagcaagaagaaatgcaaattaatgaaacaaattaaatattataaatttaaatgagtaccagttgtataaaacaatgatactaatgtcttataaaacataaaatatatgcaatagataatgttgat

SEQ ID NO: 705163 - DNA, 2136 bp, Homo sapiens
  misc_feature 1804, 1805, 1806, 1807, 1808, 1809, 1810, 1811, 1812, 1813,1814, 1815, 1816, 1817, 1818, 1819, 1820, 1821, 1822, 1823,1824, 1825, 1826, 1827, 1828, 1829, 1830, 1831, 1832, 1833,1834, 1835, 1836, 1837, 1838, 1839, 1840, 1841, 1842: n = A,T,C or G
  misc_feature 1843, 1844, 1845, 1846, 1847, 1848, 1849, 1850, 1851, 1852,1853, 1854, 1855, 1856, 1857, 1858, 1859, 1860, 1861, 1862,1863, 1864, 1865, 1866, 1867, 1868, 1869, 1870, 1871, 1872,1873, 1874, 1875, 1876, 1877, 1878, 1879, 1880, 1881: n = A,T,C or G
  misc_feature 1882, 1883, 1884, 1885, 1886, 1887, 1888, 1889, 1890, 1891,1892, 1893, 1894, 1895, 1896, 1897, 1898, 1899, 1900, 1901,1902, 1903: n = A,T,C or G
tacaaagtgaatcagaaggggaaggtaagagatgaggtggaaagactgtaggcagcatarttagtggttcagagcaaggaccctggagccagactaaccagcttgaatcttgattctgatcctttgctagctgtggtatcttgagaatttactttctttgccttggtttcttcattaataaaatgagaataataattgtatataccacatttttaataggattaagtgaattggtatttataaaatgattagactagtgtgtggcccctactaactacatgtttattcaatcaatcaaccaatataataattagtgggatattatagtagtattgatgacttgaacttaaatgatgacaatggaatgagaagttgggggaactttttggacttttttgaattaatgaattctagctttccatccatgaaattgatatggttataagagcctctaaaaactttcccttctatgtgtcagattataggcttattttatctttatgacatccagacagggagcgtacaatttgatggggtgtctgtccatcttggttcccttgagttcccttttcttataacataggtattgtgggaaaatgtggtctttgtgccaaattgtttaaaagaaacgtttgagccaagaacattgtaaaatttcagaaaatattacaaatcttcatgcctgaaataaagtaatcgcagttaatacagatataaagctacatagttaccatgtttccaggatagccaataagaaattctagtgattgtgggctgggcacagtggctcatgcctgtaatcccagcactttgggaggctgaggtgggtggatcacgaggtcaggaaatccaaactatcctggctaacatgctgaaaccccgtctctactaaaaatacaaaaaaattagccaggcgtggtggtgggtgcctgtagtcccagctactcaggaggccgaggcagtagaagggcacgaacccgggaggcagagcttgcagtgggcagaaatcacgccactgcactccagcctgggcaacagagcaagactctgacaaaaaaaaaaaaaaagaaaatctagtgattgtgatttaagattagtatgattaaaaaaattaacaagaggtttttgttgccctaaacaagtggcacgtatgatgcctttatgcctttaatgaattgcaaaatgcagctcagccctgacccccagggcagggatgaattacaagaaggcagctcttccttctgcctggtgttgcttgtaaaaccaagctgggctgaatggcaacttcaccctcacacaagggatatgtgtgggacacaaatgccaaccacacatagaagccctgctaagcgttatcaaaagagaagcaaaattgcttttggctaatattgagaggtgacaaggtgctagcagccctcgctagctcttggagcctccttggcctcggcatccactctggccatgcttgaggagaacttcagtccgcggctgcactgtaggagcccctctctgggctggccgaggctggagccggctccctctgcttgccgggaggggtggaaggagaggcgtgggcgggaactggggctgtgagctccaggcgggccaggctcggtgggccctgcacttggagcggctggcgggcgccgccagccctgggtagtgaggagcttaggacccaggccagcagctgcagagggtgcactgggtcccccagcactgccggctggcccagccacgctcgaattctcactgggcctcagccgcctccccttgaggcagggctcaggacctgcactcgccnnnnnnnnnnnnnnnnnnnnnnnnnnnnnnnnnnnnnnnnnnnnnnnnnnnnnnnnnnnnnnnnnnnnnnnnnnnnnnnnnnnnnnnnnnnnnnnnnnnntcatgaactctactcttcctattttacagattaggaagctaagatgacaaattgattagtggcaactgtggttacaccaggtgaagatatcataattttagcatttagtggtagatgtacaccaaggaatactatgcagccataaaaagaacgaaatcatgtcctttgaagtagcatggatgcagttgaagaccattattccaagcaaattaacacaggaacataaaatcaaa

SEQ ID NO: 705164 - DNA, 1630 bp, Homo sapiens
tgagatgaaatcatgggatgtgcaggcagagaaccagagaatgagacaaagctgagagagagaggagtgacaccaagagagaatagtgtctttgaagccagggaatgaaacaaattcagtaactagcagtgttcaagatgcaaatgctgtaagatcaagtaagaaagcttgaaaatgaacttttttttttgtagagacggggtctggctctgttgtccaggttcgtctcaagccatcttcccactttggcctcccaaagtgttgggatggtacaggcatgagccactgcaccttgccagaaatgaacttctaaaagcactaatgaggtaactgatgaccttggtaagaaggacagtgaagacatgagccaattactaccatattgaaaatacaaaggccaagcatggtagctcatgcctaataatcccagcactttgggaggcagagatgggaggatcctttgaggccaggagtttaagatcagcctgagcaacacagcaagatcccatctctgcaaaaattaaaaaagaaaaaaagccaggcacggtggcatgtacctgtggtcccagctacttggggaggctgaggtgagagcatcgtttgagcccagatggtagaggttgcagtgagctgtgatcataccactatactctagtctggcctgggtaatagagcaagaccctatctcaaaaagatctagacagtaagactgtggaatgctcttccaacatgtttagcagagaagggaagggggaaaataaggccacagcatgaccgaggtaaggggtagggattttttcaagcatggtgggtacttcagtatgtatataggccagtgattttcaaacttgactgtcatcagcaccacctagagggcttcttaaaattcagattgttgggcttcacctgaacaagtttctgattgagtaggtctagggtggagctcaagaacttacacttccaacaagtgacaatgctgccggtctgtggaccaaaatggagagccactggagtaggcgaagaaaaaaatatccaaaagaagaatgtttgaaacatttatgcgatggagatatttaaaaggcaaaacacagagggaaggagaggatggaattcagaaaaagataaaatagttggtcttgagcaacaagtgaggtgatctcttcctctgagacaggcaggcagatgaagatgtacatgattagaggtaaagtttacaggtggagaaaaggcaagttaagagttcatgcctgaaggccttattttctctgtttattttttcaaagcaatatcatctactgagaatttaggagataaggtagagtaggggtaaatattaataattatacatttagcagccatgggaaaacaacatgttaaagtattcccaagttccacttatttttaagacagagtctcactctgttccctagactggagtgcagtggcacaatcacagctcactgcagcctcagcctcctgagtagctgggactacaggtttgtgcaaccaaccaccgctggctaatttttacatttttgtggagatgggggcctcactatgctgcccaggctggtcttgaacctsgcttcaagtgatcctcctgcttcagtctcctaaagtgctgggatta

SEQ ID NO: 705165 - DNA, 599 bp, Homo sapiens
taaagttaaattatcttctkttcatttttttaagaggtagggtctcactctgttacccaagctggaatgcggtggtgtgatcatagctcttgtagccttgaacgcctgagctcaaaagtttctcccacctcagcctcccaagtacctaggactactggcacatgccacctggctaatttttatttcattttatagagacagagtcttgctatgttgctcaggctgttcatgaactctcggcctcaagtgatcctctcacctcagccccccagggtgctgggattgcaggcatgaaccaccatacccagcccagattgcattcttaacgtaatgtcaaggcactctaatgcattattacattggatagaaacttcttaatgaaaattatgtgtgttgtgagtgtgtctacatgccactatttttctcctaaagcaaatcacagttgcttacccaaaaaatgtgtgtgtttgtcttttttgtctgagagagattttttgccttttacctcataactaacttgaggtctgactgtaactaaatcatagtggatgtcagcaacaaacattttttgatggataactactttgttttctttgtta

SEQ ID NO: 705166 - DNA, 664 bp, Homo sapiens
taaatgataacaataaatacttctgtatagcaaaaagaacctttaaatgatggcctatttagggtaatcaatgctgattataactaaattcccatataaagtattttgagttctttttttgttttaattattaaagtaaatatctttaatttctgtgtatgtatataactctctccacatatatatggagagagagagagtgcgagcaagcacacacgagagagacctacagatattttaacttatagctagcccttcgcatggaactttaggatagtaaaaattactgtgctaactgaaactgcttagtaggaaaaagaatgattattctgtgactttttaaaactattgtcaaaagactcaaaactcttactgtcacttataagtatataggaaaaaggggaaaatagcaaaactaatacatatttactacgagaaacctttagaattaaattttytttctttctttctttttttcttttttttggagatgtagtcttgctgtgttacccaggctggattgcagtggtgcaatcttgactcactgaaacctctgtctcccagattcaagcaattctcctgtctcagcctcctaagtagctgggactacaggtttgtgccatgacgcctggctaatttttgtatttttagtagagacacggtt

SEQ ID NO: 705167 - DNA, 630 bp, Homo sapiens
gtgggggggctggggcgttggcgccatccttcctccttccctgctccatccctgactccatcaccgagccccttcagggaaacacaaggcaggaggttgtaccgctatgcagaagacccctccaggtagggagcttgaagaaatgaaacagcagggagaacctgtatttggtggtgaaagtgctggaatcttctaggccttgctcatctccaaccagctacttctccaaaataaagcaaaacaaaacaaaacaaaacaaggcaaacaacaaccaccacaggccttttgcatcaacttcctgtgactaagtgaccctaagcagagaactggctcaggtcacttagggcaggkgtaggacattgaaggccttatttactccaggattaaaaacagcatcccctctaaccctgtctctcttgggcagcctgtcttttaaggatgtgaaaagcagcttcttggagtctaaacaggcacaataccccactgggatgtttaggtatcaggttcacaaaaacagcattttactcctgcttccccgaacccctttgcaacccaggctaccatactctttgcaagaatatccggtatcttttccgggcaaaatgaattgagttggcacttcctgaaata

SEQ ID NO: 705168 - DNA, 630 bp, Homo sapiens
gtgggggggctggggcgttggcgccatccttcctccttccctgctccatccctgactccatcaccgagccccttcagggaaacacaaggcaggaggttgtaccgctatgcagaagacccctccaggtagggagcttgaagaaatgaaacagcagggagaacctgtatttggtggtgaaagtgctggaatcttctaggccttgctcatctccaaccagctacttctccaaaataaagcaaaacaaaacaaaacaaaacaaggcaaacaacaaccaccacaggccttttgcatcaacttcctgtgactaagtgaccctaagcagagaactggctcaggtcacttagggcagggrtaggacattgaaggccttatttactccaggattaaaaacagcatcccctctaaccctgtctctcttgggcagcctgtcttttaaggatgtgaaaagcagcttcttggagtctaaacaggcacaataccccactgggatgtttaggtatcaggttcacaaaaacagcattttactcctgcttccccgaacccctttgcaacccaggctaccatactctttgcaagaatatccggtatcttttccgggcaaaatgaattgagttggcacttcctgaaata

SEQ ID NO: 705169 - DNA, 630 bp, Homo sapiens
gtgggggggctggggcgttggcgccatccttcctccttccctgctccatccctgactccatcaccgagccccttcagggaaacacaaggcaggaggttgtaccgctatgcagaagacccctccaggtagggagcttgaagaaatgaaacagcagggagaacctgtatttggtggtgaaagtgctggaatcttctaggccttgctcatctccaaccagctacttctccaaaataaagcaaaacaaaacaaaacaaaacaaggcaaacaacaaccaccacaggccttttgcatcaacttcctgtgactaagtgaccctaagcagagaactggctcaggtcacttagggcaggggtaggacattgaaggccttatttactccaggattaaaaacagcatcccctctaaccctgtctctcttgggcagcctgtcttttaaggatgtgaaaagcagcttcttggagtctaaacagrcacaataccccactgggatgtttaggtatcaggttcacaaaaacagcattttactcctgcttccccgaacccctttgcaacccaggctaccatactctttgcaagaatatccggtatcttttccgggcaaaatgaattgagttggcacttcctgaaata

SEQ ID NO: 705170 - DNA, 1244 bp, Homo sapiens
  misc_feature 2, 3, 4, 5, 6, 7, 8, 9, 10, 11, 12, 13, 14, 15, 16, 17, 18,19, 20, 21, 22, 23, 24, 25, 26, 27, 28, 29, 30, 31, 32,33, 34, 35, 36, 37, 38, 39, 40, 41, 42, 43, 44, 45, 46,47, 48, 49, 50, 51, 52, 53, 54, 55, 56, 57, 58, 59, 60,61: n = A,T,C or G
  misc_feature 62, 63, 64, 65, 66, 67, 68, 69, 70, 71, 72, 73, 74, 75, 76,77, 78, 79, 80, 81, 82, 83, 84, 85, 86, 87, 88, 89, 90,91, 92, 93, 94, 95, 96, 97, 98, 99, 100, 101: n = A,T,C or G
cnnnnnnnnnnnnnnnnnnnnnnnnnnnnnnnnnnnnnnnnnnnnnnnnnnnnnnnnnnnnnnnnnnnnnnnnnnnnnnnnnnnnnnnnnnnnnnnnnnnngtagctgggactacaggtgcacaccactatgttcagctaatcattctattttttgtagagacagggtctcactatgctgcccaggctagtctcaatgtcctgggctcaagcaatcctcctgcctcagcctcccaatgtgttgggattacaggcatggactaccactctcagcctaaagtagttgttttaaaaagggtgatttggaaggataaatgcagttatatggattgggcatttgaggatggccatgacatccttctctaacctttcttctacaccaaacaactggctattatcaggtagcttcaggaaaggctcttctgtcacagaccattttcaaggccttcaggatcaaggtctttttgtttccattggttactcagttaactatgccataggacaataataacttagctccatttcttttttcttttttttttttttttttgagacagagtttcactcttgttgcccaggctggagtgcaacggtgcaatctcggctcaccacaacctctgcctcccaggttggttcaagcggttctcctgcctcagcctcccaagtagctggcattacaggcatgagccaccatatttggctaattttgtatttttaktagagacagggtttctccatgtttgtcaggctggtctcaaactcctgacctcaggtgatctgcccgcctcggcctcccaaagtgctgggattacaggcgtgagccactgtgcctggccaacttagctccatttctataaatcaccatacacttgccaatgcatatgcacatatgtaatccaatttgcgcctttctatgtgtaatgtagacaaggtgtacccggccatttgacaagtgaaggcaaatggaggaaaaaatgagaaagttcaagaagtttgcagttatgcagcaacttacttaggactaaaagtaatgtgtcttggttaagtactttccaggacactggctgctgtgtaagtcaggttgtctccttaatcaaatggtcagttatgaatcaataaatgaactagaattcaaggaaggaaggctaagcagagtctttgttaagccttcccattgcttccgctactgggagcccactaatcttctcagatgtcatttcacaagctcggtgcagttgtttaaca

SEQ ID NO: 705171 - DNA, 1244 bp, Homo sapiens
  misc_feature 2, 3, 4, 5, 6, 7, 8, 9, 10, 11, 12, 13, 14, 15, 16, 17, 18,19, 20, 21, 22, 23, 24, 25, 26, 27, 28, 29, 30, 31, 32,33, 34, 35, 36, 37, 38, 39, 40, 41, 42, 43, 44, 45, 46,47, 48, 49, 50, 51, 52, 53, 54, 55, 56, 57, 58, 59, 60,61: n = A,T,C or G
  misc_feature 62, 63, 64, 65, 66, 67, 68, 69, 70, 71, 72, 73, 74, 75, 76,77, 78, 79, 80, 81, 82, 83, 84, 85, 86, 87, 88, 89, 90,91, 92, 93, 94, 95, 96, 97, 98, 99, 100, 101: n = A,T,C or G
cnnnnnnnnnnnnnnnnnnnnnnnnnnnnnnnnnnnnnnnnnnnnnnnnnnnnnnnnnnnnnnnnnnnnnnnnnnnnnnnnnnnnnnnnnnnnnnnnnnnngtagctgggactacaggtgcacaccactatgttcagctaatcattctattttttgtagagacagggtctcactatgctgcccaggctagtctcaatgtcctgggctcaagcaatcctcctgcctcagcctcccaatgtgttgggattacaggcatggactaccactctcagcctaaagtagttgttttaaaaagggtgatttggaaggataaatgcagttatatggattgggcatttgaggatggccatgacatccttctctaacctttcttctacaccaaacaactggctattatcaggtagcttcaggaaaggctcttctgtcacagaccattttcaaggccttcaggatcaaggtctttttgtttccattggttactcagttaactatgccataggacaataataacttagctccatttcttttttcttttttttttttttttttgagacagagtttcactcttgttgcccaggctggagtgcaacggtgcaatctcggctcaccacaacctctgcctcccaggttggttcaagcggttctcctgcctcagcctcccaagtagctggcattacaggcatgagccaccatatttggctaattttgtatttttattagagacagggtttctccatgtttgtcaggctggtctcaaactcctgacctcaggtgatctgcccgcctcggcctcccaaagtgctgggattacaggcgygagccactgtgcctggccaacttagctccatttctataaatcaccatacacttgccaatgcatatgcacatatgtaatccaatttgcgcctttctatgtgtaatgtagacaaggtgtacccggccatttgacaagtgaaggcaaatggaggaaaaaatgagaaagttcaagaagtttgcagttatgcagcaacttacttaggactaaaagtaatgtgtcttggttaagtactttccaggacactggctgctgtgtaagtcaggttgtctccttaatcaaatggtcagttatgaatcaataaatgaactagaattcaaggaaggaaggctaagcagagtctttgttaagccttcccattgcttccgctactgggagcccactaatcttctcagatgtcatttcacaagctcggtgcagttgtttaaca

SEQ ID NO: 705172 - DNA, 1244 bp, Homo sapiens
  misc_feature 2, 3, 4, 5, 6, 7, 8, 9, 10, 11, 12, 13, 14, 15, 16, 17, 18,19, 20, 21, 22, 23, 24, 25, 26, 27, 28, 29, 30, 31, 32,33, 34, 35, 36, 37, 38, 39, 40, 41, 42, 43, 44, 45, 46,47, 48, 49, 50, 51, 52, 53, 54, 55, 56, 57, 58, 59, 60,61: n = A,T,C or G
  misc_feature 62, 63, 64, 65, 66, 67, 68, 69, 70, 71, 72, 73, 74, 75, 76,77, 78, 79, 80, 81, 82, 83, 84, 85, 86, 87, 88, 89, 90,91, 92, 93, 94, 95, 96, 97, 98, 99, 100, 101: n = A,T,C or G
cnnnnnnnnnnnnnnnnnnnnnnnnnnnnnnnnnnnnnnnnnnnnnnnnnnnnnnnnnnnnnnnnnnnnnnnnnnnnnnnnnnnnnnnnnnnnnnnnnnnngtagctgggactacaggtgcacaccactatgttcagctaatcattctattttttgtagagacagggtctcactatgctgcccaggctagtctcaatgtcctgggctcaagcaatcctcctgcctcagcctcccaatgtgttgggattacaggcatggactaccactctcagcctaaagtagttgttttaaaaagggtgatttggaaggataaatgcagttatatggattgggcatttgaggatggccatgacatccttctctaacctttcttctacaccaaacaactggctattatcaggtagcttcaggaaaggctcttctgtcacagaccattttcaaggccttcaggatcaaggtctttttgtttccattggttactcagttaactatgccataggacaataataacttagctccatttcttttttcttttttttttttttttttgagacagagtttcactcttgttgcccaggctggagtgcaacggtgcaatctcggctcaccacaacctctgcctcccaggttggttcaagcggttctcctgcctcagcctcccaagtagctggcattacaggcatgagccaccatatttggctaattttgtatttttattagagacagggtttctccatgtttgtcaggctggtctcaaactcctgacctcaggtgatctgcccgcctcggcctcccaaagtgctgggattacaggcgtgagccacygtgcctggccaacttagctccatttctataaatcaccatacacttgccaatgcatatgcacatatgtaatccaatttgcgcctttctatgtgtaatgtagacaaggtgtacccggccatttgacaagtgaaggcaaatggaggaaaaaatgagaaagttcaagaagtttgcagttatgcagcaacttacttaggactaaaagtaatgtgtcttggttaagtactttccaggacactggctgctgtgtaagtcaggttgtctccttaatcaaatggtcagttatgaatcaataaatgaactagaattcaaggaaggaaggctaagcagagtctttgttaagccttcccattgcttccgctactgggagcccactaatcttctcagatgtcatttcacaagctcggtgcagttgtttaaca

SEQ ID NO: 705173 - DNA, 1244 bp, Homo sapiens
  misc_feature 2, 3, 4, 5, 6, 7, 8, 9, 10, 11, 12, 13, 14, 15, 16, 17, 18,19, 20, 21, 22, 23, 24, 25, 26, 27, 28, 29, 30, 31, 32,33, 34, 35, 36, 37, 38, 39, 40, 41, 42, 43, 44, 45, 46,47, 48, 49, 50, 51, 52, 53, 54, 55, 56, 57, 58, 59, 60,61: n = A,T,C or G
  misc_feature 62, 63, 64, 65, 66, 67, 68, 69, 70, 71, 72, 73, 74, 75, 76,77, 78, 79, 80, 81, 82, 83, 84, 85, 86, 87, 88, 89, 90,91, 92, 93, 94, 95, 96, 97, 98, 99, 100, 101: n = A,T,C or G
cnnnnnnnnnnnnnnnnnnnnnnnnnnnnnnnnnnnnnnnnnnnnnnnnnnnnnnnnnnnnnnnnnnnnnnnnnnnnnnnnnnnnnnnnnnnnnnnnnnnngtagctgggactacaggtgcacaccactatgttcagctaatcattctattttttgtagagacagggtctcactatgctgcccaggctagtctcaatgtcctgggctcaagcaatcctcctgcctcagcctcccaatgtgttgggattacaggcatggactaccactctcagcctaaagtagttgttttaaaaagggtgatttggaaggataaatgcagttatatggattgggcatttgaggatggccatgacatccttctctaacctttcttctacaccaaacaactggctattatcaggtagcttcaggaaaggctcttctgtcacagaccattttcaaggccttcaggatcaaggtctttttgtttccattggttactcagttaactatgccataggacaataataacttagctccatttcttttttcttttttttttttttttttgagacagagtttcactcttgttgcccaggctggagtgcaacggtgcaatctcggctcaccacaacctctgcctcccaggttggttcaagcggttctcctgcctcagcctcccaagtagctggcattacaggcatgagccaccatatttggctaattttgtatttttattagagacagggtttctccatgtttgtcaggctggtctcaaactcctgacctcaggtgatctgcccgcctcggcctcccaaagtgctgggattacaggcgtgagccactgtgcctggccaacttagctccatttctataaatcaccatacacttgccaatgcatatgcacatatgtaatccaatttgcgcctttctatgtgtaatgtagacaaggtgtaccyggccatttgacaagtgaaggcaaatggaggaaaaaatgagaaagttcaagaagtttgcagttatgcagcaacttacttaggactaaaagtaatgtgtcttggttaagtactttccaggacactggctgctgtgtaagtcaggttgtctccttaatcaaatggtcagttatgaatcaataaatgaactagaattcaaggaaggaaggctaagcagagtctttgttaagccttcccattgcttccgctactgggagcccactaatcttctcagatgtcatttcacaagctcggtgcagttgtttaaca

SEQ ID NO: 705174 - DNA, 418 bp, Homo sapiens
tgttcttgtaggactgcaagggtgttcatgaagactctccagtatgcatgtaatagaggaaccccctctagcccccctccactaggaattcctcgctcacacccacacatgcawgcagacacacacacacacacacacaagtgaacgctcacacttttcctgttttaattagctactgttccataaattttaattccctgtactaccagtgattgataacagattccttattaaatatctacaataaactgtactttcacaatgctgtgtgtattttagcacaacagaagttccctttgaaaagaatcatttggacggtgctaataattttctgggtgcagctgtccttatatcatgcaataagcagggaagagggacccaaatcaactgtctccattgtggaattaagggagtgtac

SEQ ID NO: 705175 - DNA, 578 bp, Homo sapiens
aatacgtatagtaaaatctactccatgaattgttaaaatgtaattcacatacagcttagtaagagatgctgagaaacaatatatagttggccctctgtaagcatggatttggaggatcctaaatcctcagattcaatcaatcacagatcgaaatccgcagatatggagggctgactatacttgattatatgtaaaaagctgtgtttactatgcttataattgagcaattatttaaagtactatatatgtgacagacaaatgaaaagaaatgaagcaatacagttagagtagacttagcaataccaacaracactgttgcattgttgtgaaatagtcctaaatatctttctttttctaacctgacacccattgtttgcaagtggtgaaaatgctaaaaatgaatctctgttcaccaggaatgcacgaccttggccatcagctgccagggctttcactattgaaatcctgctatgttattttcttcctaagcttgtaatgaacggtctcttgagaggatgtgatgaaatatacagctgcatcctaataagcatccttatgtccataaacagtatccttta

SEQ ID NO: 705176 - DNA, 964 bp, Homo sapiens
tattctctgattatttatcacactcatcctagcaagtctgaaatgatatctcattgtaatgaaagtgcgcccatgatacacagagcgaagggtggaagacttacttattcaaggcatttaagaaaatatctgcccaatcattacgtgaaaactaaactgagcagagaattcagtgatggcatacaaccaaaaattcagtctttacaatattcctgtaaagtcagaaaaaaaaaaaacagctaaataacaagaacaaaacagcaacaaacacaaacctgagggaagggcatctgagctccagagctgtcactattatcttatttgtctagtttgtaccaaacaaatataagccatgagagaaaaacacatacaaaaaacccaggaaggtatagcacatagaatgttgtgcttttgtaaatataacaacagaactttatctaaattgactgagaaaaatcaaattagtaaaatcagtaatgaaggacatttctaatgaccttattaaatgtatacatatattaaaacatcacattgtaccgcataaatatgtaaaattattgtttgtcacttggaccagatggtgtggttgtgaattctactaaacctttaaagaagaattaatatcaatacaatatttactttggctatcaaaatacagaaagagatgaatcatgagaaaaaaatctaaactacagaaaaatatcccttatgaagacaaatataaacatcctcacaaaattttaacagaatccaacacagtcaaaaaagattgaacacaatctgttttttatgccaggaatacaaggttgctttaacatttgaaaattaatgtaccacaccatattaacagaaaaggcgacaaaaaccacaygatcatctcagtaaatgtggaagaatttgaaaagtccaacacctcttcttgaaaacatctatgaaattccacaaataatcatatttcatggtg

SEQ ID NO: 705177 - DNA, 2790 bp, Homo sapiens
catatatttttttaacgcctttctgatggattgactgtttcatcattacagaatgtacttcttttgttctagttaaaatgtttgacttaaagtctgtcttatctgccattagtataggcactgcagcttgcttatggttgctgtttgcataatatatatgtttctatccttttgcaatccacttatgatgttttgatcctaaaggatgtctcttgtaaacagcatakagtttaactctcttttttttaatcctgtttggcaatgttagtcttttgattagattttttaatcctttgactgtaatgttattattgatacagttggatttactttttgtcattttgcttttattttctctatacctgataccatcttttttctgttctttttattactttctttgggatagcaaatattttctagtgtaatattttaattctttatattttgaaatatattttgttattttcctagttctctcaagcatatcatatacatctagcttttcagaatctacaaatctctactattgtaattgcagtaaaatatagaaatgtaactcttatgaacctcttcttcatcttccttgtttttctgctattacatcataaagagtgctgtgtttcaaataaaggcagtttctttaggaaaagcttcagaacactttggtcttacaacttgcatatacacttggggggaaaaatttcctgagctacttttccagagctgggattagataaagtgacccactactcttgatgtgatgccaatgctccatgagtagcattttagtgggatggtaatccctggtcttcttggctttcatctagtgtgaaacctctaccctatgagcaacttgggatacaaccaatcagtgtcacaatattctcaatctaccattgtgagggctagaacctctgctctagaagtgggtatttggtggagaaagggagtccaacctcctagcagctactcacctaaaatttagcctctgaaaaactgtagctgcaagagaacaaatgaaaaattctgggggcttgcccttcctagtgagataacacaacccttgactgaggcatggtaagaaaggtagcttcatcattttgtccaccccacttgttctgcagtttccataaatactcagcataagtataagctgaaaggctttgaacaggttgtgttgtatccaatattccactgactcttattgttattactatcgatactaattagaacactaattgaactaattctgttattttttctcaacttagcttcctattatctccccaatactgtaatatcattatctaaatgtatatttgttgttatcccattcattaatcttttactttatcctgaaatattatttcctttgaactagcataacacgcatctatactccttcagaagtaatgtaatttaaccatttttgatgattatttctacaaatagaaatagttctcttcactatgggctcccaaaaataaatattattttagtattaaacttaacaagatgtctgtgaataacttataaaaatgtctgtcttccatcttaactacaaattcttatagtttgctatataataacttaaatgtataaatattaaaaatagttttgaagtaatcatactctataactatttatttttctttcccatgtattccccaaaaagcacagtgtatgcattcaataaatatttactgaaaaactaattgaaattcagtcaagaaacaagatagtgaagaaaatatttacatagttaagataatgtatttttatcccatttttcagaatcataaaatttaaagaatagaagaggcctcaaatatcaagcatgctctaatcagcttactaagatttcttactttgtgaacttcttaactttaaacaatgagaaatgtatttccacttatgagaggcattccagattttggaatcctaattattcagaagttgtgtttttaaactataatctctcttcatatagctacagttcactgatatttgtttcacttattgaagacactataatatgttagattttaaatttatgtaatttattgtagcaagtttataacttattgtagcaagatccttatagaagctatttttgtcaatttttgtacatctatttagtgacttagaaacaacaccaaagccatgatttatgaaaaacatatttaaaaagttggatctcactatctgttctgtaaaattttcagggaaaagaaactattctgtataatactataatgatggctacatgtcattatgaattcatcatacctataaaatatacaatgctgagagcaaatcttcatgtaaattatggactggatggtaataatggatcagtgttggttaatctatggtaaaaatgtactcctctgttgcatgatactgtcattgaagaagcgtgtaagtgtgtaatacagttttaaaaaaataaaactaactttgaagaaaaccaacaggtatatatgatagtgattttcaggattatatgtaattgactgaagtagatattcagatttggataagaaatatataacattttgttttaagtttcttgagtttctcaacacattgttctattttatgtttggtataattctctactctaatcttcttaaaatactactactacagcatttgcactgctcctgaaattttacatacttaatgaacattctttccaaaaaagaaaagtaaagttataattattattcttaaattattgggtacagtttgtgaaatatgactttttatttctctttttctatt

SEQ ID NO: 705178 - DNA, 1147 bp, Homo sapiens
attgctacaaacttgatgacttaaagcaacggagatttattttctcacagttctcaaggcaagaagtttaaaatcactgttggaagggttatgctctttctttgaaggccctaggaaaaatttcttcccttcttttcctaggttgtcatgattgttgtcaatatatgtctctctctcttttcaaatgacatgattctctctgtgtctgtgtctccgtgtctacatttccctcttcttataaagatacaagtcatgttgaatttagggctcaccataatgcagtatgatctcatcgaaacttgattacatctgcaaaggccttatttccaaatatgactctattcagtgggcatgaattgggagttgggtattgagtaaatccaggatatattgctatcacattgtctagtcaagctttaatgcatgttcaaatactgttattttgcctctatagtaattcaagacaacttttcagccaccaagttccacgttgttttgaatgtgcatgtgtttgtttatttatttacttatttgtagagatagggtctcactctgttgcccaggctgcattgcagtggtgtgatcttggctcactgcaacctccgcctcctgggttcaagcaattctcctggctcaacctcctgagtagctgggactaaaggcacacactgccatgcccggctaatttcttttctattttagtagagatggcttttcaccrtgttccccatgctggtttcaaattcctaagctgaggcaatctgcccgcctcagcctcccaaagtgctaggattacaggcgtgagccactgtgcccggcctgtgtctttatttttctttcctttacacatcctacatcattgttgacatgcttcctgctcactgtaacctagtgccctcttgctgctacttacctgtcctatttctgaaatgtagttatctcaaccacatctgactttagagaatatctaaaatttctcatcctgcctgtgacatatctctttcctcattctaccttcaagttcgctgtagggtgaaggtaattgattttaaatgtttataaattttaatacttttaaatgtttaaatggagaaagagataaaccaatactagacttgaaactcaaagattgtcccacaagaagtaa

SEQ ID NO: 705179 - DNA, 2815 bp, Homo sapiens
acttacaaaacaacatttactatttttacatagtaagagtttgttctgacctaacagaaagtttagaattgaaccatatttcaatgcaaatcatgtaacaaactaaaatttaagtcctagaaatctgtgcatgtgaattttaaaatgtaaattagaattaaattaaattaaacttgaatttctctatcatataaggcacatttcacgctctcagtagccacagttagtgattaccacactggagggtgcagatgtagaaatttccatcattgtcaaaagttttactagagaaaattgctatagacagatacttgaaataatattggaccaacaaccagaaagttttattccatttgcatatcctcatcaaatttccacatttaagaaaagaaggaggatgttctgcatataatttttagctacactgagaatttgtgaagtttgattttctgtgagaaatatatgatgatatcaaccttatattttattcttgagtataaaatagcatatacaaattacaaaatattttaaatagtaaaaatggcatatttgtatataatttctttttaacatttaattctgttttgcgaagttaattttaagacactccacatatttccatattttgatgctgtttcattttcgtctatcattttaatgttagatcagaagaacatttacttattagtcattgccacagatcagacaactaaaaaattaaagatagtaacatactaagtcccacatttttatgattaatatttctttttaaaaaatcaaatgtcaatgaaatgctccactgaacattttaacctattttatatccttagaaacatttaattaattgagttgttcacctgacatttttacagattgctttgattgtaaaaacgtcattttaaaatgacatttttatatggtcttggtcttaaaaacatcaaatgggggataattcttcatttgaagttattaaacatggctataatcataaaaatgtcattttaagataattcttcatttgaccttttttatacttagctgctcttttcttttcttccttaaaaatttgatattagaaatgaaagttaatagaattttaaagctgtactgaaaaaaattcaaatcaagatttcactgctaatgctgccattgcactcacaaaatgtttttactacccatccttgatgcattacagttagtggtggagtgtgcatgtgtatgtgtttctgcatgtgtgtgtgtatgtatgatccaacaatgacattcacccatgcttactggtgtcttctctcaaataatcaatggctctttacagcttttagctgttattacacttttaagtatattagtctctagaggcaaatcgcacgatagccattttctttcagttaagatgaggatgaatatggctttaaagtcatgtaattgtgataattacttggatatggggtatagtcttctcctaactctatgcatatgtgcaccttaaataatatttgtttattcatatacatgttttatattgaaagcataggaagaatggagttcaatatttgtgtttatttaatgactttttagtgtgtaataaatatgctcatatttttggctaatagaataatgataataataacatttttgagcaaatgttttccattaggcaccagtgtgagaattttgcctgcatgattaattttcaaaacaaccctgtgagggttttgttattggattatgcttagagataatgaaacccaaaatgagtagaaccagaatttgaaagcaggcaggcatagccaacaagataagttaattctcagggtttttcttaaatgctacttgccaataggtaacacaaatattttcttatgctttatttcataagataaatcagtggacaagcatttagtaattaccaatatgttgttattgctgagaagaagattaccaaaagaataaaagcataatgattgacatacataaacatctattataattgatgaaatgaagcaaagtgaatgccttagatttatactctccaacagggcaacacattattttttgctatcacaaacaggcaagaaagagcacagaattaagtatttatgtattacctcattcatctctttattccaatgttatatattaagtattttaagagataaagagatattgtactcagcttgaacataccttggtaacataaggcaaagttccgtccaatagaaattgagcctcagagaagagagaatagacagatacatccaaataaagttaaaggcaaataaggaattggaagaatttgaatgccatattggttagattctatttatattgtaggacatgcagttttggaattattatggcaggagatcagcttaagtgaaggagattcccaggaggtaccaaaaagtatcttgcttctccttctcctatttcagttacaagcaagtctcctcttgtaagccaagaagacactgggacaggtaaatagctaggacataaaggaaatgatcaagacaattactgcggtatctgtactgtgaaacacctgagtctctggacaccggtgcaagagaacactaaaacaaagaccgatctggcgtaagttatggtgagactttggccaatggacaggaaaggaccctccaaggaagggctkatatagaccatcttaataagacttccctttacttattacttctcagagaattgaggatggtcagaatatatgatcggagtcttgtctatacttcagtctgagagaaacccagaagcctctttctactatctgtataggggaataatgactacctgctgt

SEQ ID NO: 705180 - DNA, 460 bp, Homo sapiens
atctcagcaaaggctgctcagacaaacacctccctggtcatgatgagaccgctgcttcattcaatccgtgagcaaatgttaatattaatgaaaggccaagcatgtgtcaaccgccaaactgggtgttagggagacaggcatgaatgagaygggagttcaagacagggaagtatgacgagataatgatcatacactacaatgagtgctatatggtgcctatacagaacgcctgccacaggatcatacaggggcccaatcatttcttcatctcttgaaggtatagagggacacagggactgccccacaggacccaagccctataaaagctgagtatctgtgagatttatctcccatttaatctgacatatgtattcatatacaaagtgttatttgatatttggaaattaaggaaaaatggcaaacagttcactaaatgatggcaattaacattatagttgca

SEQ ID NO: 705181 - DNA, 621 bp, Homo sapiens
gatcatctgaagccttcttctctcaactcgtcaaagtcattctccgtccagctttgttccgttgctggcgaggagctgcatttctttggaggagaagaggtgctctgatttttagaattttcagcttttctgctctggtttctccccatctttgtggttttatctaccttcggtctttgatgatggaactagagagggtgggttcctcccaggcaagcagcatggacaagaagctgtggggastgtggtcttctcatttctgtctcaacaacagcctgcagctggtcagttgggaccttcccaggggtgcatgggagcgccaagtctcccttctccctccttagaccagcacagcagcagcagccgtgtctctagatctccagtatctagattctccaagtggcgcccagctgaggttgctccaggatctgtgggatgcctgtgagattctgagtttcctttctggagtaacgtctctttacagtctgtagacagcttattatgtcaggcccaaggccctagttggtagagtgtttctgtcatcactaagatcctataagcctgtttcggagtgtagagccgtggggatatctccatatctctcatattgtttccccacat

SEQ ID NO: 705182 - DNA, 621 bp, Homo sapiens
gatcatctgaagccttcttctctcaactcgtcaaagtcattctccgtccagctttgttccgttgctggcgaggagctgcatttctttggaggagaagaggtgctctgatttttagaattttcagcttttctgctctggtttctccccatctttgtggttttatctaccttcggtctttgatgatggaactagagagggtgggttcctcccaggcaagcagcatggacaagaagctgtggggagtgtggtcttctcatttctgtctcaacaacagcctgcagctggtcagttgggaccttcccaggggtgcatgggagcgccaagtctcccttctccctccttagaccagcacagcagcagcagccrtgtctctagatctccagtatctagattctccaagtggcgcccagctgaggttgctccaggatctgtgggatgcctgtgagattctgagtttcctttctggagtaacgtctctttacagtctgtagacagcttattatgtcaggcccaaggccctagttggtagagtgtttctgtcatcactaagatcctataagcctgtttcggagtgtagagccgtggggatatctccatatctctcatattgtttccccacat

SEQ ID NO: 705183 - DNA, 707 bp, Homo sapiens
catactctgtgctagaaatcagaatgtcattgcaatattacattcatttcagagtattattttttaagaccaaaacagacacatttaatttatttaaaggagtgggrcatctgggagtagttgaaactgtaataaacaccacattgaagaaagaatgagaagttcagtctgaagacttattctcactgggtgaaagagcttccagagatagtgaagaatggggttctggaggtagacaagtaatcactttacaacctttgatgcaagacattttatatggtgaaagctgcaggcaaaagctgaatccgagaatctttatggttctcttgtaacctttgcttgcataatgttgtcaagataaaattgttttatcaagtggcaatttgttacatttaatgcagtcacctaaaactctcatttgagagctgggtcatattgttcacatttgaagaaatggttaatagctgaatctgagccaaaccgtaaaaatcaagcctgtgtattggattccagaaaggtgaaatgaatatcatttctgtagctattaaggtcctgattttcatgctcaaagagaaaagcaaacatacatagtgagatagctgcaagcatttagaataaatgccaaagaatattcaaagttggaagattatttacattggtgctgagatggaaagagtgctttcagcaataggtcatgtgacaaagtg

SEQ ID NO: 705184 - DNA, 632 bp, Homo sapiens
taattattatgcattgtatgcctgtaccaaaatatctcatgtaccccacaaatacatatacttactttgtacccacaaaaaataaaaataaaaaaagttaaagaaaaaaaagtaagaactagtctggacgttttttaatacaatcycaagaggacaggcaaagaaagcaaaaatagacaagtggaattgcatcaaactaaaaagtttctagatagcaaagaaaacaatcaactgagtgaagaggcaacttacagatatgcaaactctatggtattagtatccaaaatatataaggaactcatacaacacaatagcaataaataaataaataaataaatattccaattttaaaaatagacaaaggtcttgaatagacagttctcaaaagaaaaccttcaaatggccaacaggtagatgaaaaggtgctcaacatcactgattatcatcaggaaaatgtaaatcaaaacaccaaggagatatcagctcactcctgttaaaatggctattatcaaaaagtccaaagattacaagtgttgtttagtatgtagagaaaaaggaacctttgtacactgttggtggaatgtaactggtacagtcattatgaaaaacagtatggaggttcctcaaaaaat

SEQ ID NO: 705185 - DNA, 640 bp, Homo sapiens
aacgagatttgagccactcctcaggtcaggtactcttctgagtactcactaaaaggcctctgagtctctgccactctgaaggcgctacaggcaatccatcactgctgctcaggaggccaatctgcatcacacagatgaaaaagccatggtccctgcctccacaggtgcagggttaggattctccgaaggaccctctctcccacctcccttacttagccccttagctggagaattcatttccatatcatgtaattcactgtattaacaacggctgcccacataagtttctccttggaaatctgaggaattctttcttcccttccttctgtgctcctccaagatagctatgggctcctagggccctcagaaaggtctttatcattttctccaggcatgtctgaaagacgagtsggggtgaaacaattcctcgaggtgttcccaccggttagcatcccaaaggagtcactctggaggcctttcgaggtgtcctgcttcatgcagccatcccacccagggagtgggagctaggccacagcgcgggtgttcaccagctctagcgggctctgcacacaggctgggtgcccactggtccagcaagataaaatggcacttcaagcaatctggtatttgtacttgtgaa

SEQ ID NO: 705186 - DNA, 2218 bp, Homo sapiens
caactaacttgcttcaacttgaacttcaagctttctcctggaaagtggtgaaatttcactggtgttccttaatccttagttgctgtctgcctcttgcctgtatgatcccggagtgagctagagatttggtggagtttatgcacagaatttgagtctccttcactcttgctatctttttctgtttctgcctcactttccagcaattacggttgttgtgacctctgtcttctcttttgtgtggaaattttgcgttttgtttgtttttaatcaaagatttagctgccaaacatggtgttgatttcagtttacttttggaccaaaagctatgaaaacagcataattaattgctccgtgtggttccatttttccatacgacagctttcttccacaaccagtctgcttttctcactctccggtccctttaagtgatttttgggggacattttcaacttttaaaactttctctcaaagatgttttggttccagtgggaactacccatctatctagaagtgtgcagttggccctctggatcccagggttctgcatccacagattcaaccagccacagatcaaaaatattcaaaaataaataaataaataaaattttaaaacaaaaaaaatcaaacaattcaacaattaaaatcatacaaatagaaggccgggaaaggtggctcacgcctgtaatcccagcactttgtgaggccgaggcaggtggattacctgaggtcaggagttcaagaccagcctggtcaacatggtgaaaccccgtctctactaaaaacacaaaaattagccgggcatggtggcgcacccctgtaatcccagctacttgggaggctgaggcaggagaattgcttgagcccgggaggcagaggttgcagtgagctgagatcgtgcactgcactccagcctggccgacagagcgtgactgtctgaaaaaaaaaaaaaatcatacaaatagaaaaacagtatagtgcaacaattatttacatatcatctacattgtattaagtattgtaagtagagatgtagagatggtttagagtatatgggaggatgtgcataggttgtatgtaaacacaaagccattttataacaggcacttgagcctgttataaatctgcagattttcggatcgagaatcctggagccacttccttgtggatactgagggacaactgtaactgaaagtttatgytctctcttagtgaatgctcttgaaaagaatgtacaatcttaaattgttggttttagagttctataaacagactatgctgtttgttaagtgttattcaaatctattttcttagtaatttttttctccttattcaatcaatcctggcggaaagagtattaagtatcttcaactataattatagatttgtccatttatccttttaattatgttattttatattccatagttttaaaaataactaacagacattttaaagaaattttgaggctgggcgcggtggctcacgcctgtaatctcagaactttgggaggccaaggggggcggatcacgaggtcaggagatcgagaccatcctggctaacacggtgaaaacccgtctctactaaaaatacaaaaaattagccaggcgtggtggcggacgcctgtagtcccagctactcaggaggctgaggcaggagaatagtgtgaacccaggaggtggagcttgcagtgagccgagatcacgccacagcactccagcctgggtgacagagggagactccatctcaaagaaaaaaaagaaattttgagttacttgaacatttagtggtaagtacagagagttcccaataccttctcaccaacccccaacttgtgaggggtttgtactgaagtctattttgtgtgatattaatatagttgctctagttttcttataattgatgtttgtgtattacttttcttttgctacttaatacagtactacaaaattagtgggttaaaacaacaatcattatttcagtttatgtagatcaaagtccagtcatagggtatctgggttctcttgtcagagtcgtacaaagctaaaatcaagatgttagccaggaatacagtctcatcctcagtttgggtgcccttccaggttcattcaagttgtatacagaattcagtttcttgtgttgtttgactgaggttcctgtttacttgatggctgtcaactgaaggttgttctcagctcttagaggccaccctcagacccca

SEQ ID NO: 705187 - DNA, 2218 bp, Homo sapiens
caactaacttgcttcaacttgaacttcaagctttctcctggaaagtggtgaaatttcactggtgttccttaatccttagttgctgtctgcctcttgcctgtatgatcccggagtgagctagagatttggtggagtttatgcacagaatttgagtctccttcactcttgctatctttttctgtttctgcctcactttccagcaattacggttgttgtgacctctgtcttctcttttgtgtggaaattttgcgttttgtttgtttttaatcaaagatttagctgccaaacatggtgttgatttcagtttacttttggaccaaaagctatgaaaacagcataattaattgctccgtgtggttccatttttccatacgacagctttcttccacaaccagtctgcttttctcactctccggtccctttaagtgatttttgggggacattttcaacttttaaaactttctctcaaagatgttttggttccagtgggaactacccatctatctagaagtgtgcagttggccctctggatcccagggttctgcatccacagattcaaccagccacagatcaaaaatattcaaaaataaataaataaataaaattttaaaacaaaaaaaatcaaacaattcaacaattaaaatcatacaaatagaaggccgggaaaggtggctcacgcctgtaatcccagcactttgtgaggccgaggcaggtggattacctgaggtcaggagttcaagaccagcctggtcaacatggtgaaaccccgtctctactaaaaacacaaaaattagccgggcatggtggcgcacccctgtaatcccagctacttgggaggctgaggcaggagaattgcttgagcccgggaggcagaggttgcagtgagctgagatcgtgcactgcactccagcctggccgacagagcgtgactgtctgaaaaaaaaaaaaaatcatacaaatagaaaaacagtatagtgcaacaattatttacatatcatctacattgtattaagtattgtaagtagagatgtagagatggtttagagtatatgggaggatgtgcataggttgtatgtaaacacaaagccattttataacaggcacttgagcctgttataaatctgcagattttcggatcgagaatcctggagccacttccttgtggatactgagggacaactgtaactgaaagtttatgctctctcttagtgaatgctcttgaaaagaatgtacaatcttaaattgttggttttagagttctataaacagactatgctgtttgttaagtgttattcaaatctattttcttagtaatttttttctccttattcaatcaatcctggcggaaagagtattaagtatcttcaactataattatagatttgtccatttatccttttaattatgttattttatattccatagttttaaaaataactaacagacattttaaagaaattttgaggctgggcgcrgtggctcacgcctgtaatctcagaactttgggaggccaaggggggcggatcacgaggtcaggagatcgagaccatcctggctaacacggtgaaaacccgtctctactaaaaatacaaaaaattagccaggcgtggtggcggacgcctgtagtcccagctactcaggaggctgaggcaggagaatagtgtgaacccaggaggtggagcttgcagtgagccgagatcacgccacagcactccagcctgggtgacagagggagactccatctcaaagaaaaaaaagaaattttgagttacttgaacatttagtggtaagtacagagagttcccaataccttctcaccaacccccaacttgtgaggggtttgtactgaagtctattttgtgtgatattaatatagttgctctagttttcttataattgatgtttgtgtattacttttcttttgctacttaatacagtactacaaaattagtgggttaaaacaacaatcattatttcagtttatgtagatcaaagtccagtcatagggtatctgggttctcttgtcagagtcgtacaaagctaaaatcaagatgttagccaggaatacagtctcatcctcagtttgggtgcccttccaggttcattcaagttgtatacagaattcagtttcttgtgttgtttgactgaggttcctgtttacttgatggctgtcaactgaaggttgttctcagctcttagaggccaccctcagacccca

SEQ ID NO: 705188 - DNA, 2218 bp, Homo sapiens
caactaacttgcttcaacttgaacttcaagctttctcctggaaagtggtgaaatttcactggtgttccttaatccttagttgctgtctgcctcttgcctgtatgatcccggagtgagctagagatttggtggagtttatgcacagaatttgagtctccttcactcttgctatctttttctgtttctgcctcactttccagcaattacggttgttgtgacctctgtcttctcttttgtgtggaaattttgcgttttgtttgtttttaatcaaagatttagctgccaaacatggtgttgatttcagtttacttttggaccaaaagctatgaaaacagcataattaattgctccgtgtggttccatttttccatacgacagctttcttccacaaccagtctgcttttctcactctccggtccctttaagtgatttttgggggacattttcaacttttaaaactttctctcaaagatgttttggttccagtgggaactacccatctatctagaagtgtgcagttggccctctggatcccagggttctgcatccacagattcaaccagccacagatcaaaaatattcaaaaataaataaataaataaaattttaaaacaaaaaaaatcaaacaattcaacaattaaaatcatacaaatagaaggccgggaaaggtggctcacgcctgtaatcccagcactttgtgaggccgaggcaggtggattacctgaggtcaggagttcaagaccagcctggtcaacatggtgaaaccccgtctctactaaaaacacaaaaattagccgggcatggtggcgcacccctgtaatcccagctacttgggaggctgaggcaggagaattgcttgagcccgggaggcagaggttgcagtgagctgagatcgtgcactgcactccagcctggccgacagagcgtgactgtctgaaaaaaaaaaaaaatcatacaaatagaaaaacagtatagtgcaacaattatttacatatcatctacattgtattaagtattgtaagtagagatgtagagatggtttagagtatatgggaggatgtgcataggttgtatgtaaacacaaagccattttataacaggcacttgagcctgttataaatctgcagattttcggatcgagaatcctggagccacttccttgtggatactgagggacaactgtaactgaaagtttatgctctctcttagtgaatgctcttgaaaagaatgtacaatcttaaattgttggttttagagttctataaacagactatgctgtttgttaagtgttattcaaatctattttcttagtaatttttttctccttattcaatcaatcctggcggaaagagtattaagtatcttcaactataattatagatttgtccatttatccttttaattatgttattttatattccatagttttaaaaataactaacagacattttaaagaaattttgaggctgggcgcggtggctcacgcctgtaatctcagaactttggraggccaaggggggcggatcacgaggtcaggagatcgagaccatcctggctaacacggtgaaaacccgtctctactaaaaatacaaaaaattagccaggcgtggtggcggacgcctgtagtcccagctactcaggaggctgaggcaggagaatagtgtgaacccaggaggtggagcttgcagtgagccgagatcacgccacagcactccagcctgggtgacagagggagactccatctcaaagaaaaaaaagaaattttgagttacttgaacatttagtggtaagtacagagagttcccaataccttctcaccaacccccaacttgtgaggggtttgtactgaagtctattttgtgtgatattaatatagttgctctagttttcttataattgatgtttgtgtattacttttcttttgctacttaatacagtactacaaaattagtgggttaaaacaacaatcattatttcagtttatgtagatcaaagtccagtcatagggtatctgggttctcttgtcagagtcgtacaaagctaaaatcaagatgttagccaggaatacagtctcatcctcagtttgggtgcccttccaggttcattcaagttgtatacagaattcagtttcttgtgttgtttgactgaggttcctgtttacttgatggctgtcaactgaaggttgttctcagctcttagaggccaccctcagacccca

SEQ ID NO: 705189 - DNA, 2218 bp, Homo sapiens
caactaacttgcttcaacttgaacttcaagctttctcctggaaagtggtgaaatttcactggtgttccttaatccttagttgctgtctgcctcttgcctgtatgatcccggagtgagctagagatttggtggagtttatgcacagaatttgagtctccttcactcttgctatctttttctgtttctgcctcactttccagcaattacggttgttgtgacctctgtcttctcttttgtgtggaaattttgcgttttgtttgtttttaatcaaagatttagctgccaaacatggtgttgatttcagtttacttttggaccaaaagctatgaaaacagcataattaattgctccgtgtggttccatttttccatacgacagctttcttccacaaccagtctgcttttctcactctccggtccctttaagtgatttttgggggacattttcaacttttaaaactttctctcaaagatgttttggttccagtgggaactacccatctatctagaagtgtgcagttggccctctggatcccagggttctgcatccacagattcaaccagccacagatcaaaaatattcaaaaataaataaataaataaaattttaaaacaaaaaaaatcaaacaattcaacaattaaaatcatacaaatagaaggccgggaaaggtggctcacgcctgtaatcccagcactttgtgaggccgaggcaggtggattacctgaggtcaggagttcaagaccagcctggtcaacatggtgaaaccccgtctctactaaaaacacaaaaattagccgggcatggtggcgcacccctgtaatcccagctacttgggaggctgaggcaggagaattgcttgagcccgggaggcagaggttgcagtgagctgagatcgtgcactgcactccagcctggccgacagagcgtgactgtctgaaaaaaaaaaaaaatcatacaaatagaaaaacagtatagtgcaacaattatttacatatcatctacattgtattaagtattgtaagtagagatgtagagatggtttagagtatatgggaggatgtgcataggttgtatgtaaacacaaagccattttataacaggcacttgagcctgttataaatctgcagattttcggatcgagaatcctggagccacttccttgtggatactgagggacaactgtaactgaaagtttatgctctctcttagtgaatgctcttgaaaagaatgtacaatcttaaattgttggttttagagttctataaacagactatgctgtttgttaagtgttattcaaatctattttcttagtaatttttttctccttattcaatcaatcctggcggaaagagtattaagtatcttcaactataattatagatttgtccatttatccttttaattatgttattttatattccatagttttaaaaataactaacagacattttaaagaaattttgaggctgggcgcggtggctcacgcctgtaatctcagaactttgggaggccaaggkgggcggatcacgaggtcaggagatcgagaccatcctggctaacacggtgaaaacccgtctctactaaaaatacaaaaaattagccaggcgtggtggcggacgcctgtagtcccagctactcaggaggctgaggcaggagaatagtgtgaacccaggaggtggagcttgcagtgagccgagatcacgccacagcactccagcctgggtgacagagggagactccatctcaaagaaaaaaaagaaattttgagttacttgaacatttagtggtaagtacagagagttcccaataccttctcaccaacccccaacttgtgaggggtttgtactgaagtctattttgtgtgatattaatatagttgctctagttttcttataattgatgtttgtgtattacttttcttttgctacttaatacagtactacaaaattagtgggttaaaacaacaatcattatttcagtttatgtagatcaaagtccagtcatagggtatctgggttctcttgtcagagtcgtacaaagctaaaatcaagatgttagccaggaatacagtctcatcctcagtttgggtgcccttccaggttcattcaagttgtatacagaattcagtttcttgtgttgtttgactgaggttcctgtttacttgatggctgtcaactgaaggttgttctcagctcttagaggccaccctcagacccca

SEQ ID NO: 705190 - DNA, 2218 bp, Homo sapiens
caactaacttgcttcaacttgaacttcaagctttctcctggaaagtggtgaaatttcactggtgttccttaatccttagttgctgtctgcctcttgcctgtatgatcccggagtgagctagagatttggtggagtttatgcacagaatttgagtctccttcactcttgctatctttttctgtttctgcctcactttccagcaattacggttgttgtgacctctgtcttctcttttgtgtggaaattttgcgttttgtttgtttttaatcaaagatttagctgccaaacatggtgttgatttcagtttacttttggaccaaaagctatgaaaacagcataattaattgctccgtgtggttccatttttccatacgacagctttcttccacaaccagtctgcttttctcactctccggtccctttaagtgatttttgggggacattttcaacttttaaaactttctctcaaagatgttttggttccagtgggaactacccatctatctagaagtgtgcagttggccctctggatcccagggttctgcatccacagattcaaccagccacagatcaaaaatattcaaaaataaataaataaataaaattttaaaacaaaaaaaatcaaacaattcaacaattaaaatcatacaaatagaaggccgggaaaggtggctcacgcctgtaatcccagcactttgtgaggccgaggcaggtggattacctgaggtcaggagttcaagaccagcctggtcaacatggtgaaaccccgtctctactaaaaacacaaaaattagccgggcatggtggcgcacccctgtaatcccagctacttgggaggctgaggcaggagaattgcttgagcccgggaggcagaggttgcagtgagctgagatcgtgcactgcactccagcctggccgacagagcgtgactgtctgaaaaaaaaaaaaaatcatacaaatagaaaaacagtatagtgcaacaattatttacatatcatctacattgtattaagtattgtaagtagagatgtagagatggtttagagtatatgggaggatgtgcataggttgtatgtaaacacaaagccattttataacaggcacttgagcctgttataaatctgcagattttcggatcgagaatcctggagccacttccttgtggatactgagggacaactgtaactgaaagtttatgctctctcttagtgaatgctcttgaaaagaatgtacaatcttaaattgttggttttagagttctataaacagactatgctgtttgttaagtgttattcaaatctattttcttagtaatttttttctccttattcaatcaatcctggcggaaagagtattaagtatcttcaactataattatagatttgtccatttatccttttaattatgttattttatattccatagttttaaaaataactaacagacattttaaagaaattttgaggctgggcgcggtggctcacgcctgtaatctcagaactttgggaggccaaggggggcggatcacraggtcaggagatcgagaccatcctggctaacacggtgaaaacccgtctctactaaaaatacaaaaaattagccaggcgtggtggcggacgcctgtagtcccagctactcaggaggctgaggcaggagaatagtgtgaacccaggaggtggagcttgcagtgagccgagatcacgccacagcactccagcctgggtgacagagggagactccatctcaaagaaaaaaaagaaattttgagttacttgaacatttagtggtaagtacagagagttcccaataccttctcaccaacccccaacttgtgaggggtttgtactgaagtctattttgtgtgatattaatatagttgctctagttttcttataattgatgtttgtgtattacttttcttttgctacttaatacagtactacaaaattagtgggttaaaacaacaatcattatttcagtttatgtagatcaaagtccagtcatagggtatctgggttctcttgtcagagtcgtacaaagctaaaatcaagatgttagccaggaatacagtctcatcctcagtttgggtgcccttccaggttcattcaagttgtatacagaattcagtttcttgtgttgtttgactgaggttcctgtttacttgatggctgtcaactgaaggttgttctcagctcttagaggccaccctcagacccca

SEQ ID NO: 705191 - DNA, 1439 bp, Homo sapiens
ggtaatacaatgtaaatgctatgtaaatagttgctatactgtattgtttagggaataatagcaaggaaaaaagtctgtaaatgtttaacagagatgcaatttttaaaaaatatttttgatctctagttggttgaatccatggatgcagaaatccgtggatgtgggcggcaactgtccaagagttttacctttgcaccaaagcataatgtagtcttgaggttctgattagtaatggtgagtatgctttcatcatattagtaagacgaccctaattccactttgtrtccttgaacaggggctagagttttactaggaagcagcctttcttgcaaagtatccattttcatctccctccagatacaaagcttactgctgggctcctgctctgtctttggtattcaaagcgtgcagctttcatctggttgtgtaacctgggccatatggcctccaatcctactcagttatttattgatcctctttatcattgatacctgaagaattcacttcttgctttcaaaattggcaatgtattttttaaaataatttaatccactatcttgtatttttatgtgtttggagtagagaatagtgagttaatgaggccacttccagaatttgcctggtctaccgacttgaaagagagccagaatattctttaaacttctaagtgcagtcatgtttgtcaagaaatgctggtgtgtctgctggaaatttatcataaaaattctaacttctctgcctcttcctgacaaaataaataaattagatcaattgcttgaacccaagatcaaactatatacattataaaaatgtatatacatatcaaaacataatgtacactataagtaggtatgatttttatttgtcaattatcccttattaaatctgagaaaaaacaaatgaaataaatacataaaaataatagttatctgtgttaggggaaaaaaatttatagcctttaaccttatccccaactttattaccaatagatgagagtgcattattaggctttacttcaagtatttttctcagctgtgccttggtctaatacaataaaccatgtatcatgaaaaaatgtaaaatgttaccttcataagctaagaaattatgcattagatagcctatttactggtgttggtggtagagaaatagcctgtcttggacctcatttccaaagaggtttactatgaagtattcaacagacttcattatcaaacagtgtcttctgttttctcattactgtgttgcttccaaggaccatagtcaggagtcagaggtcatttgagagtataatcctacaaatatatatgtacacatttcactgatggaccttgttgctgcctatctgaagaaactatactatttactcagcagcaaaatcagcaccactgctctttttcccccaaagtctcaaacaacacccagcccatagtaggacc

SEQ ID NO: 705192 - DNA, 1439 bp, Homo sapiens
ggtaatacaatgtaaatgctatgtaaatagttgctatactgtattgtttagggaataatagcaaggaaaaaagtctgtaaatgtttaacagagatgcaatttttaaaaaatatttttgatctctagttggttgaatccatggatgcagaaatccgtggatgtgggcggcaactgtccaagagttttacctttgcaccaaagcataatgtagtcttgaggttctgattagtaatggtgagtatgctttcatcatattagtaagacgaccctaattccactttgtatccttgaacaggggctagagttttactaggaagcagcctttcttgcaaagtatccattttcatctccctccagatacaaagcttactgctgggctcctgctctgtctttggtattcaaagcgtgcagctttcatctggttgtgtaacctgggccatatggcctccaatcctactcagttatttattgatcctctttatcattgatacctgaagaattcacttcttgctttcaaaattggcaatgtattttttaaaataatttaatccactatcttgtatttttatgtgtttggagtagagaatagtgagttaatgaggccacttccagaatttgcctggtctaccgacttgaaagagagccagaatattctttaaacttctaagtgcagtcatgtttgtcaagaaatgctggtgtgtctgctggaaatttatcataaaaattctaacttctctgcctcttcctgacaaaataaataaattagatcaattgcttgaacccaagatcaaactatatacattataaaaatgtatatacatatcaaaacataatgtacactataagtaggtatgatttttatttgtcaattatcccttattaaatctgagaaaaaacaaatgaaataaatacataaaaataatagttatctgtgttaggggaaaaaaatttatagcctttaaccttatccccaactttattaccaatagatgagagtgcattattaggctttacttcaagtatttttctcagctgtgccttggtctaatacaataaaccatgtatcatgaaaaaatgtaaaatgttaccttcataagctaagaaattatgcattagatagcctatttactggtgttggtggtagagaaatagcctgtcttggacctcatttccaaagaggtttactatgaagtattcaacagacttcattatcaaacagtgtcttctgttttctcattactgtgttgcttccaaggaccatagtcaggagtcagaggtcatttgagagyataatcctacaaatatatatgtacacatttcactgatggaccttgttgctgcctatctgaagaaactatactatttactcagcagcaaaatcagcaccactgctctttttcccccaaagtctcaaacaacacccagcccatagtaggacc

SEQ ID NO: 705193 - DNA, 603 bp, Homo sapiens
aaaacttggaataaaagatatttttgagccttatttcacacatgacaaacaatctgtataaataggaattactctcatctcttactcagatataaactttctgtaaagcaaaggactttatacactccccagtattctgacaggaaggggtaaaaaagcaagaatcaactgcatacactgaacctgaggtgagaaaaaaaaatccacttagtaatatggtaagtagtaattaatgtgataaaaatacatagatttcttcaaaaactcaataactgaaatcaataccaaattgggtcacaatttgctattgcttctgaccacagatcaaataagaagactcttgcttgcttaattaccacctcctaagagaaataaagaggtctttcatcaagattaatttcatttagagaacccatcggtgggtgytcagggaacagaatgtacttgaagcaatgtccctccactttgttgggtcatatctccaccggtccacaaggcagaaagaaaaaatggactttcttcactcgattttagtcagtgggagggaactggaacaacttaatcctaatttcacatttagatcattcacgcacttatgcagaa

SEQ ID NO: 705194 - DNA, 596 bp, Homo sapiens
tgagtgaagcttgtatgactagcagtacttaaactagtactgctaggagagacgaaaaaatatcacgtgaaaaaagcagaccttgggaattwaaaaaaaaaaaaaaaaacacactaagagaagagatgttttgttttcagttattgccaaactccagatctaacagtgcattagttcatctggtcctttatagctaaatgacattctgcactcattagaagatatgcagatttttattagagtttttcattactatacaaactgaccaatttcttgatattttgactaattaacaagaaagttgtttataaaaatggaagattctgtgtcccattgtcaaaacatcagcattttgaactagggaagacatgtaacactgagatcatgtgttatgaaaaatataaaatatatcccagtatttgaggaaaccgccggcttcatcagtctgtgtcagggaattaattttcagtcatacatccctgctgatatatctgaaacctgagaaagtccaatttccttccttcatatgtgtctaatagagtatgaatagttcaagtgtctgagggaaatcagaggccgagctagagactcacttt

SEQ ID NO: 705195 - DNA, 596 bp, Homo sapiens
tgagtgaagcttgtatgactagcagtacttaaactagtactgctaggagagacgaaaaaatatcacgtgaaaaaagcagaccttgggaattaaaaaaaaaaaaaaaaaacacactaagagaagagatgttttgttttcagttattgccaaactccagatctaayagtgcattagttcatctggtcctttatagctaaatgacattctgcactcattagaagatatgcagatttttattagagtttttcattactatacaaactgaccaatttcttgatattttgactaattaacaagaaagttgtttataaaaatggaagattctgtgtcccattgtcaaaacatcagcattttgaactagggaagacatgtaacactgagatcatgtgttatgaaaaatataaaatatatcccagtatttgaggaaaccgccggcttcatcagtctgtgtcagggaattaattttcagtcatacatccctgctgatatatctgaaacctgagaaagtccaatttccttccttcatatgtgtctaatagagtatgaatagttcaagtgtctgagggaaatcagaggccgagctagagactcacttt

SEQ ID NO: 705196 - DNA, 1287 bp, Homo sapiens
ttcaaaggtactcaggcagggggagagttccctcttgccctcagaaggtcagcctttttttctacccaagactctactgattggatgaggcccaccacagtagcaatctgcttgacccagtctattgatctaaatggtaaactcatccagaaaacccctattaattaattaattaattaattaattattgagatggagtcttgctctgtcacccaggctggagtgcagtggcacaatctcggctcactgcaatctctgcctcccgagttcaagcaattctcctgcctcagcctccctagtagctgggattacaggcacccgccaccatatccagctaatttttgtatttttagtagagacagggtttcatcatgttggccaggctggtctcaaactcttgaccttgtggtctgcccatctcggcctcccaaagtcctgggatgacaggcgtgagccaccgtacccagcctcctatttagaataatgtttaaccaaatatctggggactttgtggcccagttaagttgacacataaaattaatcacagatctcaagccaatcagattctctctccagaggaattttctactgggacagagagaccagctggtctctgccttggtaggacctggggacctgatgggcagacaactttgctcctggcctccttctcaggcccttgagaattgtaggacaccacccctccctgcccctgtatcttgatcagacgcataccttccaccttagatgagcttgggctgagtttcttgcctgcatccccaccgggacccctgtgaaggctggctcccctcagtcaggctctccctcctctgtggggtcttcacccrtccctcgcatgttttcttacggctgggctgggtcatacttagagaactgactaaatacagagtctcacatcctcagtgattattacaataattcgagtgaacacggaagactagatttttatttgtgggagtgtgtgtgtgtatgtgtgtgtgtgtgtgtgtgtttctaacaccagccacttgcttccagagacacatttccatctgtgtggtcactagcctgcaaagttgtggcacttcttggtgcctccttcagggcaagtctgaaatattttaatagacgacttaaacgtcctttaggtagaggtttccagaaaagccagtggagttggatatatggttttaataacaattctagttactgaggcttctcctcccatccttggcttgggtacatacagtatagttaaaactaaactgtcgaaggggaatgatttaa

SEQ ID NO: 705197 - DNA, 1287 bp, Homo sapiens
ttcaaaggtactcaggcagggggagagttccctcttgccctcagaaggtcagcctttttttctacccaagactctactgattggatgaggcccaccacagtagcaatctgcttgacccagtctattgatctaaatggtaaactcatccagaaaacccctattaattaattaattaattaattaattattgagatggagtcttgctctgtcacccaggctggagtgcagtggcacaatctcggctcactgcaatctctgcctcccgagttcaagcaattctcctgcctcagcctccctagtagctgggattacaggcacccgccaccatatccagctaatttttgtatttttagtagagacagggtttcatcatgttggccaggctggtctcaaactcttgaccttgtggtctgcccatctcggcctcccaaagtcctgggatgacaggcgtgagccaccgtacccagcctcctatttagaataatgtttaaccaaatatctggggactttgtggcccagttaagttgacacataaaattaatcacagatctcaagccaatcagattctctctccagaggaattttctactgggacagagagaccagctggtctctgccttggtaggacctggggacctgatgggcagacaactttgctcctggcctccttctcaggcccttgagaattgtaggacaccacccctccctgcccctgtatcttgatcagacgcataccttccaccttagatgagcttgggctgagtttcttgcctgcatccccaccgggacccctgtgaaggctggctcccctcagtcaggctctccctcctctgtggggtcttcacccatccctcscatgttttcttacggctgggctgggtcatacttagagaactgactaaatacagagtctcacatcctcagtgattattacaataattcgagtgaacacggaagactagatttttatttgtgggagtgtgtgtgtgtatgtgtgtgtgtgtgtgtgtgtttctaacaccagccacttgcttccagagacacatttccatctgtgtggtcactagcctgcaaagttgtggcacttcttggtgcctccttcagggcaagtctgaaatattttaatagacgacttaaacgtcctttaggtagaggtttccagaaaagccagtggagttggatatatggttttaataacaattctagttactgaggcttctcctcccatccttggcttgggtacatacagtatagttaaaactaaactgtcgaaggggaatgatttaa

SEQ ID NO: 705198 - DNA, 1133 bp, Homo sapiens
tgagtccaggagttcaagaaccagcctgagcaacatggcaaaactgtgtctctatcaaaaatacaaaaattagctgggagtggtggcacatgcctgtgttcttagctactcaggaggataaagtgggaggattgctggggcctaggaagttgaggctgcagtgagccatgattgcacccctgcactccagcctcggtgacagagcaagaccctgactcaaaaaaaaaaaaaaaatgcagtccagatgtactggaacaagcttgtgtgggatggctacactcctttcctgttctaacacacctgttacctggatgagctcctatatccttatccaggtaccagatctgccacacctggtaccggcatgagcctgtggggaacataccagcagagacattayacttccaccgagacaaaataaagccacattgacttttagtactcatattattgactgacattaaacccatggcaactaaaatctcgttgtttttttttttttattctgggggtgagggtacaacttttagagaaagtatctctccctaagactgccaatcactctaaatttgcatctaacacttctacataactttatctaccgagtaggcagtatttaccgtctgctgtttcatcttgtagcataattttcttttatatttccaggtgtgaaaatattcaaactgacccctaattctcagctttcagagctatctgctacttcccaggtcactttggtttttaagcgctttcacatgctgttgttggacatctgggttattcccaaatcttgttttcacgtaggcagctgtcaagtcaagatagccatggccctgcctggcatgttctttaagattgcattttatttttattattttattttatttttcttggagacaagagtttcactctgttgcccaggctggagtacagtggcatgatcttggcttactgcaacagatcttgacttactgtaacctccgagtcccaagttcaaatgattctcctgcctcagcctcctgagtagctgggattacaggcaccagccactatgcctggctaatttttgtatttttagtagagatggggtttcaccatgttggccaggctggtctcgaactgctgacctcagg

SEQ ID NO: 705199 - DNA, 644 bp, Homo sapiens
cagctatttttttttttgagatggagtcttcttctgttgcccaggatggagtacagtggcacaatcttggctcaccgcaacctctgcctcctgggttcaagtgattctcttgctgcagcctcctaaatagcagggattacaagcacgtgccaccatgcccggctaatttttgtatttttagtagagatggggtttcaccatgttggtcaggctrgtctcaaactcctgacctcgtgatctgcccacctcagcctcccaaagtgctgagattacaggcatgagccaccgcacccagccatataacagctatcttatggcaaattgtctttgtagttcagtgcactttcaattcaattcaccagggacactcaatcagagatatggggtaagtatgagacccttcataggtgctgaatctaaggaaaaaatttttcaatctgcactcccacctttgtcctaaataaattgaaaataatttattttaatgagagctattactgacaggcacgtattgtgcacatgactggtatagaaatgaggagacaaaatacagagccactgttccagacagcactgtctccccagtgactccgctttgtttatgtatatgcttattgatttttcacccaaatgcgctcaaaaaa

SEQ ID NO: 705200 - DNA, 2641 bp, Homo sapiens
tttgtttttcttaaatagctgcattattcgtctgatgttgaaaatggcatctgcactgtatgtaatttccatactcgcttggcaccatcaactgcctttgatgacactcaggactgcatcttttttgtctcctccttccctccagctgcaagacccagatgtcaggttcagggatgcattttctctggcagggatatctggctcctctcggcagtccctaagttggtggctattgtggaaccgccagcaaaatagcagaagatcacgctaaagatgggattcagatggctttttgaaaacgaaaaacagagtccgaatctgggaagaaaaacatatttcttatgtctctaattataagccaggaaagtggcaggccgtgcctgagaaaattgcaccaccccccggcccccctgccaccatttatctgctgctcatccattttcccctcttgacagttttttatctccccactctgcatctgaaatcagcagctgggtatgatgaagggtttgcctaagttaatcaaacctggggtagtgacaggatcaggcctgatgtaaaatatgtggacagggaaaagaaaaaagaaaggaaggaaggatagaaggaagggagggaggaaggaagccagcctaaaggaattggccaggtgtaacaaagataaagaacagaagactacccagtacctctatgcccgaggaggcaatttgtagcagcattcaggtcacctgggcattgatacatcacaattagctttcctttttgaagcagcctttgtaaatatgaatggagatcaagcgccaacctgcccacatcccggcctggcttacrctgagtctagcttcaaaggcatcttgaataagtcgtaagctcaaagaaccatgccccaaagcactacataccagtgggggctgtgtcagaccaggaggcgaagagaatctcaagccataaggggcccttgtggtgtctaattatttttttttcctttcccagccactgtgctgggccgagcagtcgtgcagggcagagtttggaagcttcccacgatcaactccgtctcctgagtgcccacccagccgccccacacttactgcctctaaaatcccaacagttcaaaggagttcgctgaaactcagtcagtgagagcctgtctcccaggccaaaatccaggttatccagtgcttttagaagtatgaagtgttgcatcttaatggaatttagtgcccatgaattcacccatccacggtatgcaccgttttgtatgccgccctgacatttcactgcatggcccttgtgaatctagattatatctctgtcttagtctgtttgggctgctgtaacaaaatgccacagatcaggtagcttataaaaaacagaaattcctatctcactgttccagaggctgggaggtccaagatcaaggtgctggcagatttggtgtctggtgagggcccacttcctggctcatagacagtaacctcactccaacctcacatggtagaaagggtgatgaggggtctctctcaggcctcttttataagggcactagtcccattcataagggctctgtccccttgatctatttgcctcccaaaggtcccacctcctaataccatcactttttaggggtgaggatttcaagatacgaatttgaaagagccataaacatttagattaaagcagcctctgtttaagggaggtccactccaatgtagactgattcttttgcttccctccacgggctaactccctgagaccctcctccatcctccatctgtgaatcttgagaatggactcagtgcttgggaacaccagctgaccagaagagatcaacacctgcaggctcccctggaagtttatacccagccatgtcctccatccacctcaccctcatccattcaactctaggatcattttgattcaacgcggacccaaagggcaagtcagatatagagattttgaagattggccatacactctggagcacagaaaatacagcacatctattttacccctgtaagggaaagtggccatagtggtgaatttgttgaaaggagttgcatgcatatcaaagggcataagtaaaagcatgaactctacagtaaagtcttttttaaaagatcataggacttaagaatgattagagttttaggggaatgattagagttttaggggaataattgggacatttttagagaaagaatggctttacccaaatttgtgttaatgctgcccctcaggatggcagccctcaggtcagatgagacaccactgcccaggctgcacaaggacagggcaggatgacaatgtctttctttccagccagtgtgcctccttagccccctcatcacccgcttttgccccaacagctgccctttggctagactcctctgctcacagtttcagccagactggccttccctctgcttggttactcatttaccctgaattacttgaaagagatcttgaatgtttctctctgcccggtgaacacaacaaactcttctgtaacttgggggctttagttgtctccacaacaggctatgtgcacctccgttttgcaccacagcctctcatggaaactgcatcttgtacccctgggtacccacacactccaggaggctcttccgacctggctctt

SEQ ID NO: 705201 - DNA, 953 bp, Homo sapiens
caacggggccaggaattggctcgttttgcctatttaaattaataaactggaagagtcttttgtttcatagccatcgtgtggttgagtgacagctctatgccttcgcctgatgctgaggctccatgggaaacatcatgtactcttgctgaactctgattaaaaaacaagtgctacaaactgtttaattttcagattgtacctgtcattcaccttacctttccaatgcctcgcggtgataagaaactcacctaatatctgtcattccaaatatcctaaacaaggctggttcattctgtaaccttaagaagatggcagaaactgcattatagcaagcaataacaatatagkcacagactgtcctgcagtgagcattagagattactgagaatatgtttagaaatatcacagggagcttggcatggtggctcatgcctgtaatcccagcactttgggaggccaaggcaggcggatcacaagatcaggagatcaagaccattctggccaacatggtgaaaccctgtctctaccaaaaatatgaaaattagccaggcgtggtggcatgaacctgtagtcccagctacgctggaggctgaggaagagaatcacttgaaccagggaggtggaggttgcagtgggccaagatcacgccaatgcactccagcctgggcaacaagagtgaaactccatctcaaaaaagaaaaaagggaaaaagaaatatcatagagaataaaatgactagctaagcaaagaaaataaaagtacatacaattggggcttaaagggcaaactgtaggtatatctaaaattggcaacctcaaagacaagagtaagagaaagaactaaaataaatttaggttaaataaatttagactatagaggggcttagttcctgactaatgtcaaaagctgattgtccttttccaggagtggggcaaaaaaaaaaaaacccttca

SEQ ID NO: 705202 - DNA, 2102 bp, Homo sapiens
tcctcccttccttctttccacaaactattttgagtgcctacaatgtgcagagctctgctaggtgctgggagagacactagatgaatagcatacagtccttagcctcaagacacctaagtccagtatgggagataaaatagggacataaaaaactgtgataaaagccagagcaggatgggcagtgcaagtgaagtacaaacaaggcccagcagggaaagaggaggcctttcacataggaaaggcatgtgaagaatgggtaggtattgattggaaggtattcagcaggaaggaggaaagcctgactcaagtgagaaggcatgaatgaaacgttggagctgcaaacagggatcagctagtttgactggaatataggctggagttctgtctgcaggggtacattaggccagagcatagatggttttatagacaaggctaagaggtctggactttattctatcaagtaacagsaaaactatgaagatttggggttggagaataatatgctcagagcttggctttagaataattaatctataaatgtagtgtcaaatgaattggaacgagaaagctaaggtggacagaccagacagaaatctatctggatagctcaggtggaaggttgtaaaggtctgggctagccacacatggtggcaattgcaaggctgctaatgggtggaagagatcttggagaaccagcatctggtgacttattgatgtggggctgagaaagaagggagagatgaagggagactggaatttcagctaagatgtgaagaatggaggtcaaggggagagactatttcggaggggaggggatgctgtttagagaaagtctgaaggcttacccttgtatttttcaaagtttgtatgttggtttctcagtcaccacctgcatctgacttgtgggcttttgtgtagcacaatgatatcctgttacttatgtcatcgaagtgacttcatctcctgtcacatctcaaacaacaacgatcggaggtggcaaaacttggcagacaaaaaaaaatgcaggctttgagatcctttccttacatttctaaggttactacctgggtaaggccaaatctggattttagggggaaggacatttgttagatcaaagaaatcagtatgtgggtatcagttagtgctggggacttttttctatgggaagaaaggcagaaggaaagaagcaagtgtcacaagaagcttaaatacgagttcaaatcaacatctgtgatgtaataatagttccaatacaatcatgtgtaacttttatggttaaagatgaattacacagaaaataaggagttgatagtgtcccccatcagaccaatagtatcagaatgagcagggttggggctcagtagttcagatgagaaacaagttgttccaacccaatgtgccctgggaaagttttgcaggagagatggactctgaagctgagctttacggcagtccacattaccactacagcacccacttcctggttgggcacattgttggaatgtcataccaaggcacccgaagtttaaataatttcaggactccttaactgcaaatataatttttagcagaacattgaaaataacttgctctagacttatgcctttatctgtaaattttatcacagtcgttcttaaggaaaataggcaccctttgcttccagacctttggtcccttataactgttgctttgccaagtgtcctggtctacttttgagtgtccaactttggttcttagagtgcagttccaagctggccctaaatataacttgttattatatgtaggttctcagagtgtggctccattcttcacatcttagctgaaattccaggcttccttcacctcctccttctttctcacatcagtgagtcatcatatgctggttctccaagatctcttctatccattagcagccttgcaattcccaccactgtgtggctagcccagacttttaaaactttccacctgagctatccaaatagatttccgcctggtctttacacctcagctttctccttctcatccatttgtttgttttcagacccattttctctttccttcttggcctcagattatgtttctggcccttcggttacttacca

SEQ ID NO: 705203 - DNA, 2102 bp, Homo sapiens
tcctcccttccttctttccacaaactattttgagtgcctacaatgtgcagagctctgctaggtgctgggagagacactagatgaatagcatacagtccttagcctcaagacacctaagtccagtatgggagataaaatagggacataaaaaactgtgataaaagccagagcaggatgggcagtgcaagtgaagtacaaacaaggcccagcagggaaagaggaggcctttcacataggaaaggcatgtgaagaatgggtaggtattgattggaaggtattcagcaggaaggaggaaagcctgactcaagtgagaaggcatgaatgaaacgttggagctgcaaacagggatcagctagtttgactggaatataggctggagttctgtctgcaggggtacattaggccagagcatagatggttttatagacaaggctaagaggtctggactttattctatcaagtaacagcaaaactrtgaagatttggggttggagaataatatgctcagagcttggctttagaataattaatctataaatgtagtgtcaaatgaattggaacgagaaagctaaggtggacagaccagacagaaatctatctggatagctcaggtggaaggttgtaaaggtctgggctagccacacatggtggcaattgcaaggctgctaatgggtggaagagatcttggagaaccagcatctggtgacttattgatgtggggctgagaaagaagggagagatgaagggagactggaatttcagctaagatgtgaagaatggaggtcaaggggagagactatttcggaggggaggggatgctgtttagagaaagtctgaaggcttacccttgtatttttcaaagtttgtatgttggtttctcagtcaccacctgcatctgacttgtgggcttttgtgtagcacaatgatatcctgttacttatgtcatcgaagtgacttcatctcctgtcacatctcaaacaacaacgatcggaggtggcaaaacttggcagacaaaaaaaaatgcaggctttgagatcctttccttacatttctaaggttactacctgggtaaggccaaatctggattttagggggaaggacatttgttagatcaaagaaatcagtatgtgggtatcagttagtgctggggacttttttctatgggaagaaaggcagaaggaaagaagcaagtgtcacaagaagcttaaatacgagttcaaatcaacatctgtgatgtaataatagttccaatacaatcatgtgtaacttttatggttaaagatgaattacacagaaaataaggagttgatagtgtcccccatcagaccaatagtatcagaatgagcagggttggggctcagtagttcagatgagaaacaagttgttccaacccaatgtgccctgggaaagttttgcaggagagatggactctgaagctgagctttacggcagtccacattaccactacagcacccacttcctggttgggcacattgttggaatgtcataccaaggcacccgaagtttaaataatttcaggactccttaactgcaaatataatttttagcagaacattgaaaataacttgctctagacttatgcctttatctgtaaattttatcacagtcgttcttaaggaaaataggcaccctttgcttccagacctttggtcccttataactgttgctttgccaagtgtcctggtctacttttgagtgtccaactttggttcttagagtgcagttccaagctggccctaaatataacttgttattatatgtaggttctcagagtgtggctccattcttcacatcttagctgaaattccaggcttccttcacctcctccttctttctcacatcagtgagtcatcatatgctggttctccaagatctcttctatccattagcagccttgcaattcccaccactgtgtggctagcccagacttttaaaactttccacctgagctatccaaatagatttccgcctggtctttacacctcagctttctccttctcatccatttgtttgttttcagacccattttctctttccttcttggcctcagattatgtttctggcccttcggttacttacca

SEQ ID NO: 705204 - DNA, 2102 bp, Homo sapiens
tcctcccttccttctttccacaaactattttgagtgcctacaatgtgcagagctctgctaggtgctgggagagacactagatgaatagcatacagtccttagcctcaagacacctaagtccagtatgggagataaaatagggacataaaaaactgtgataaaagccagagcaggatgggcagtgcaagtgaagtacaaacaaggcccagcagggaaagaggaggcctttcacataggaaaggcatgtgaagaatgggtaggtattgattggaaggtattcagcaggaaggaggaaagcctgactcaagtgagaaggcatgaatgaaacgttggagctgcaaacagggatcagctagtttgactggaatataggctggagttctgtctgcaggggtacattaggccagagcatagatggttttatagacaaggctaagaggtctggactttattctatcaagtaacagcaaaactatgaagatttggggttggagaataatatgctcagagcttggctttagaataattaatctataaatgtagtgtcaaatgaattggaacgagaaagctaaggtggacagaccagacagaaatctatctggatagctcaggtggaaggttgtaaaggtctgggctagccacacatggtggcaattgcaaggctgctaatgggtggaagagatcttggagaaccagcatctggtgacttattgatgtggggctgagaaagaagggagagatgaagggagactggaatttcagctaagatgtgaagaatggaggtcaaggggagagactatttcggaggggaggggatgctgtttagagaaagtctgaaggcttacccttgtatttttcaaagtttgtatgttggtttctcagtcaccacytgcatctgacttgtgggcttttgtgtagcacaatgatatcctgttacttatgtcatcgaagtgacttcatctcctgtcacatctcaaacaacaacgatcggaggtggcaaaacttggcagacaaaaaaaaatgcaggctttgagatcctttccttacatttctaaggttactacctgggtaaggccaaatctggattttagggggaaggacatttgttagatcaaagaaatcagtatgtgggtatcagttagtgctggggacttttttctatgggaagaaaggcagaaggaaagaagcaagtgtcacaagaagcttaaatacgagttcaaatcaacatctgtgatgtaataatagttccaatacaatcatgtgtaacttttatggttaaagatgaattacacagaaaataaggagttgatagtgtcccccatcagaccaatagtatcagaatgagcagggttggggctcagtagttcagatgagaaacaagttgttccaacccaatgtgccctgggaaagttttgcaggagagatggactctgaagctgagctttacggcagtccacattaccactacagcacccacttcctggttgggcacattgttggaatgtcataccaaggcacccgaagtttaaataatttcaggactccttaactgcaaatataatttttagcagaacattgaaaataacttgctctagacttatgcctttatctgtaaattttatcacagtcgttcttaaggaaaataggcaccctttgcttccagacctttggtcccttataactgttgctttgccaagtgtcctggtctacttttgagtgtccaactttggttcttagagtgcagttccaagctggccctaaatataacttgttattatatgtaggttctcagagtgtggctccattcttcacatcttagctgaaattccaggcttccttcacctcctccttctttctcacatcagtgagtcatcatatgctggttctccaagatctcttctatccattagcagccttgcaattcccaccactgtgtggctagcccagacttttaaaactttccacctgagctatccaaatagatttccgcctggtctttacacctcagctttctccttctcatccatttgtttgttttcagacccattttctctttccttcttggcctcagattatgtttctggcccttcggttacttacca

SEQ ID NO: 705205 - DNA, 2026 bp, Homo sapiens
tgccttttcattatcacaaagtcataagtcaagccatcctaagtcggagacagtctgccccaaaaggtgagtgaggagtgagctggtctgatttattgttagaatttgtcaaaatattgacattaaagcaggtaaaaatcagtgtggttttcttcgtggagggtttcactttgactttcaatactgtatctgagggtttgatgaacccagaaatgcaaagtgaaacttgggagtatcagcgcatttcaagccaaacagacctctatgaatgaaagttgagttccagttgagcttcttatcagcatagaccatttgttagatgtcaccctcttctcttcataaaaaaatatggtcccttgtctcaaaggaacttgtttttaaaataagatatattgtcagccaccaaatagcatggcattttctaactcttctcctcaaagttccgtgctcttctggactactttatttttatttatttatttagacagggtttcactctgtcacccaggctggagtgcagtggcatgatcttggctcactgcaacctccacctcctgggctcaagcgatcttcccacctcagccccccaagtggttgggactacaggtgcaagccaccgcgcctggttaatttttgtattttttgtagagacagggtttcaccatgttggccaggctggtctcaaactcctgaggtcaagcaatcatacactcacctcggccttccagagtgctaggattacagatgtgaaccatagcacccggcctggactactttatttaaactaaaggtgccatcttttttttttttttctgttttattattttgaggttctacctttggagggtgggttgtaagatctttctgccccatcttctggaagactggaggaaggggaataatgaaggcaaggctggcggagccctttcccccaacattatctcttatatgggtgggggcacatggtaagggtgccccctgcctcctcccttggctctgacggctctgggaagcaatgtaaaggctagatggtgtgaagaaagggaggtcttgagccaccaaaaacgcattcttctatcttgacacttttgatatgctaggtttgagtagatcagtaaaatagtgtgatggaaagtcaccagtgtatttctcttggtgcacattcaacatagcaaatgcttcattcactcaggctccgggaggttttgtgtaaaagtagaaaaggtacagaagaaccttttgttttcataatactttaaacagacttagtgttcaaggtgaaattcggggtgtatgtctgtgcaatgaatgtgacccttagatctgtaaatccctggagtctgggtacctgagtctgaaaagggtctttcaacaccgcctcccaccccgcttccattgcttgcttacagttgttaaagtttagctgaggcaggatcaaaatcagtgattgaatggcaaggtgctattgtcctggctccgccagagagtttacacatactcagaatattagacgtgattgacagaggggtgtgtgtgtgtgtgaatcaaaccccttgttctgttttgcagtcacagagaatcctttccttttgaaatccaagaaggtccccttctctcagcttgtggagggaattaggcagcaaataacctgaacatttttttttataatcagctaaaactttaattgatgtagagtttatgaagtgagtaggaatttcaggatggcttttttttgcctgtctttcaaatgcagccacctgtagaggggcattagttctgataggtgtacagtcttccctaaatcctcggatctgaccttggttattgttcaaactttacatttaaataaaccagaaatttattttgtataactagatgatattaaaagaaaactggccaaatgatcaaagccgttctgtctgtcttttaaaaaatakttcagaacagaatcctgcatacaggttaggattctatgaaacaaagactttgtatgtgacttgcagaaatgattgtgcacatagtctga

SEQ ID NO: 705206 - DNA, 2399 bp, Homo sapiens
  misc_feature 1126, 1127, 1128, 1129, 1130, 1131, 1132, 1133, 1134, 1135,1136, 1137, 1138, 1139, 1140, 1141, 1142, 1143, 1144, 1145,1146, 1147, 1148, 1149, 1150, 1151, 1152, 1153, 1154, 1155,1156, 1157, 1158, 1159, 1160, 1161, 1162, 1163, 1164: n = A,T,C or G
  misc_feature 1165, 1166, 1167, 1168, 1169, 1170, 1171, 1172, 1173, 1174,1175, 1176, 1177, 1178, 1179, 1180, 1181, 1182, 1183, 1184,1185, 1186, 1187, 1188, 1189, 1190, 1191, 1192, 1193, 1194,1195, 1196, 1197, 1198, 1199, 1200, 1201, 1202, 1203: n = A,T,C or G
  misc_feature 1204, 1205, 1206, 1207, 1208, 1209, 1210, 1211, 1212, 1213,1214, 1215, 1216, 1217, 1218, 1219, 1220, 1221, 1222, 1223,1224, 1225: n = A,T,C or G
tgccctactgtgaaactttttttgacacaagctttttgcattctttagatttgttgttaagtcagcttaaggacatggggtgaaagaagctcccttctattaattaactttcatttttttcagttcattcctgaaggaaagacaaagacatgcagatattgatgcagtctctggacacgcaaaatattcgaagtggggctcctctacatttctgggaaaaaaaaaactgatgtggagactcctggtaatgttaccacatgagccagtatagtattcctcaagtagtaaacgaaagagcctctgagtaagcccgtcgggctggatcagctgccataaaccagggctgcagttggtggagccaccaacagcactgggtggggaaaaaatggaggggtaacaatggagaaacacctccattctattttctgtcacctgctgtccagctactgacctagagataaatcatgccaaagatggggagaaaacctagggaaagggtggctaatagggtgtgcgcagacacagctcctttgtcctctctccaaaagaagcagaaaagctcatgaccccagcctcgcctcagcaggcacactcatgtgatatattctggccaaagagactttgggcagaagtttgcaaaagggctcctaggcagacttttgtttttctagattaaaaaaagagtaatgatggcacctgtcttttcctacccccttacaattcccagagcgttccatcagtcaggtatgcagcagctcactctcaaatataaacgaagagccaaggatcaccagtgtctgataaacacaaggaaaagacagagaacctcagactatgttgacacttgggcaaaaccagtaatcttcaaactctgcttatgtgagataaaaaacttttttttgtttgttttagtcactttcttctacatatagtaggcccaggcattagctggtggaaaaacaagtagaaggaagaagtaaaaatgacaagcagtgctggagaggggaagggagaacaatttctgtggcaatttattagacccaggtagctggttataatatagagtcttgtctatgttcatttatatcagaagccaagcacataatactaatactcatattgcaannnnnnnnnnnnnnnnnnnnnnnnnnnnnnnnnnnnnnnnnnnnnnnnnnnnnnnnnnnnnnnnnnnnnnnnnnnnnnnnnnnnnnnnnnnnnnnnnnnncgatgtcaaacgacgggccaacgtgctaagcattcgggtgacccgcaggctcgaagtttgagaggatccccctttaaagggagacataaatacattaactcataacttgcagactcttgaagaagagaataagcacctggcagatcaaatggcttccctagaacttcagcaagtcacttctgattaccatggggtggagtataaaaagatcagtctaaatagcaattaatgactaatgagttcagaaataacaacaaccagaggtcaggagatgggttttctttgtgttttcataattattaaaaatctaagcagagattcttacagtattcaaacaatagtgatttgagaaaccaagaatttaagggatttattaaacatttgccttcacaatctgtgttactgaaaaatacaaatatatctgatgttttaaaatagttcctcttccataaattatgagcaagaaacttgtattttttttctcatcagacagtttcctccattaggcaatcagtaataagtctgatttctgaaagctatttgacaaggtcagtgcattacaaataagtggtacagttcttaaaataccttctccaggtggggcgcggtggctcacacctgtaatcccagcactttgggaggccgaggcatggtggatcacgaggaaaggagattgagaccatcctggctaacacggtgaaaccctgtcactactaaaaatagaaaaaattagccgggcgtggtggcggatctcgtagttccagctactcgggaggcggcgttgcagtgagccaagatcaggccactgcactccaacctgggcgacagagcgagattccgtctcaaaaaaaaaaaaaaaaatcttctccaagtaaaggggatttraagatatggtcattctgttaagtagctaataattttcttgtgtgctttcgaatacatgaaaaagtattacttacttgcttttaagcatgcaaataatctttgaaaattcctagaagaccccgatgtgactctgttttaacctgagctaaagtctttcaaactgttataagctgctcattacttcaactatgaaaaattatacagactaagtctaaatcttcttatatggtcatggttttcaagccagatttcctacttttgagttttggctgtgacctcgggtatgatc

SEQ ID NO: 705207 - DNA, 2399 bp, Homo sapiens
  misc_feature 1126, 1127, 1128, 1129, 1130, 1131, 1132, 1133, 1134, 1135,1136, 1137, 1138, 1139, 1140, 1141, 1142, 1143, 1144, 1145,1146, 1147, 1148, 1149, 1150, 1151, 1152, 1153, 1154, 1155,1156, 1157, 1158, 1159, 1160, 1161, 1162, 1163, 1164: n = A,T,C or G
  misc_feature 1165, 1166, 1167, 1168, 1169, 1170, 1171, 1172, 1173, 1174,1175, 1176, 1177, 1178, 1179, 1180, 1181, 1182, 1183, 1184,1185, 1186, 1187, 1188, 1189, 1190, 1191, 1192, 1193, 1194,1195, 1196, 1197, 1198, 1199, 1200, 1201, 1202, 1203: n = A,T,C or G
  misc_feature 1204, 1205, 1206, 1207, 1208, 1209, 1210, 1211, 1212, 1213,1214, 1215, 1216, 1217, 1218, 1219, 1220, 1221, 1222, 1223,1224, 1225: n = A,T,C or G
tgccctactgtgaaactttttttgacacaagctttttgcattctttagatttgttgttaagtcagcttaaggacatggggtgaaagaagctcccttctattaattaactttcatttttttcagttcattcctgaaggaaagacaaagacatgcagatattgatgcagtctctggacacgcaaaatattcgaagtggggctcctctacatttctgggaaaaaaaaaactgatgtggagactcctggtaatgttaccacatgagccagtatagtattcctcaagtagtaaacgaaagagcctctgagtaagcccgtcgggctggatcagctgccataaaccagggctgcagttggtggagccaccaacagcactgggtggggaaaaaatggaggggtaacaatggagaaacacctccattctattttctgtcacctgctgtccagctactgacctagagataaatcatgccaaagatggggagaaaacctagggaaagggtggctaatagggtgtgcgcagacacagctcctttgtcctctctccaaaagaagcagaaaagctcatgaccccagcctcgcctcagcaggcacactcatgtgatatattctggccaaagagactttgggcagaagtttgcaaaagggctcctaggcagacttttgtttttctagattaaaaaaagagtaatgatggcacctgtcttttcctacccccttacaattcccagagcgttccatcagtcaggtatgcagcagctcactctcaaatataaacgaagagccaaggatcaccagtgtctgataaacacaaggaaaagacagagaacctcagactatgttgacacttgggcaaaaccagtaatcttcaaactctgcttatgtgagataaaaaacttttttttgtttgttttagtcactttcttctacatatagtaggcccaggcattagctggtggaaaaacaagtagaaggaagaagtaaaaatgacaagcagtgctggagaggggaagggagaacaatttctgtggcaatttattagacccaggtagctggttataatatagagtcttgtctatgttcatttatatcagaagccaagcacataatactaatactcatattgcaannnnnnnnnnnnnnnnnnnnnnnnnnnnnnnnnnnnnnnnnnnnnnnnnnnnnnnnnnnnnnnnnnnnnnnnnnnnnnnnnnnnnnnnnnnnnnnnnnnncgatgtcaaacgacgggccaacgtgctaagcattcgggtgacccgcaggctcgaagtttgagaggatccccctttaaagggagacataaatacattaactcataacttgcagactcttgaagaagagaataagcacctggcagatcaaatggcttccctagaacttcagcaagtcacttctgattaccatggggtggagtataaaaagatcagtctaaatagcaattaatgactaatgagttcagaaataacaacaaccagaggtcaggagatgggttttctttgtgttttcataattattaaaaatctaagcagagattcttacagtattcaaacaatagtgatttgagaaaccaagaatttaagggatttattaaacatttgccttcacaatctgtgttactgaaaaatacaaatatatctgatgttttaaaatagttcctcttccataaattatgagcaagaaacttgtattttttttctcatcagacagtttcctccattaggcaatcagtaataagtctgatttctgaaagctatttgacaaggtcagtgcattacaaataagtggtacagttcttaaaataccttctccaggtggggcgcggtggctcacacctgtaatcccagcactttgggaggccgaggcatggtggatcacgaggaaaggagattgagaccatcctggctaacacggtgaaaccctgtcactactaaaaatagaaaaaattagccgggcgtggtggcggatctcgtagttccagctactcgggaggcggcgttgcagtgagccaagatcaggccactgcactccaacctgggcgacagagcgagattccgtctcaaaaaaaaaaaaaaaaatcttctccaagtaaaggggatttgaagatatggtcattctgttaagtagctaataattttcttgtgtgctttcgaatacatgaaaaagtattacttacttgcttttaagcatgcaaataatctttgaaaattcctagaagaccccgatgtgactctgttttaacctgagctaaagtctttcaaactgttataagctgctcattacttcaactatgaaaaattatacagactaagtctaaatcttcttatatggtcatggttttcaagccagatttcctacttttsagttttggctgtgacctcgggtatgatc

SEQ ID NO: 705208 - DNA, 1346 bp, Homo sapiens
gaagtgtggacacaaagggtgaggttggagcgaaagtttaataagtgaaagaagaaagctctctgtcatggagagggggcccagaagagggttgctgtttttacagttgaacgcaaaggcttttataagaaactgaagagggctgggcrtctcatttgcataagccacgaatttctggtagctccactcctgttctcctagtgtgcatacaggcccttagcttgagttactccatattgctttgctccccttactgtgcatgtattagaggatggaattttccattgagggcatgtcttagacaaggccttctgtacaagttcccttatctgtgcctgcaggctgatttttcaggctattcttttgtttgaaagaattcaaccaaggacccaccctaactgcctgcttgaccactttccctctttctcctctctccaactgaagttcactcttatccttcctgaggacatacacctataaattctatttcttccatttatctacctaattgcatatttattaacaaatgatattatcagttctgccccacagtgtgatttctcccctctcagcataggccagaggccatgagcccacaggattataaaacagatagaatcctggtcctggacacaggtgtatttagtgtggcttgtgcaatgctttaacaatttttttttttaatttgcattcctttactgtggaaggcacactccaagcctgacctcaccactctttattggcttacaacagctgaatgcacacatttacctgcttagtgacatgggcagtgggtctggtctctctatagctcctcagtttgactcatattcatatatctcattttctccagcatacaggatttatttgcctctagctgcaacttcccttcaccaaaatgatcatttttccctttctcagatggcctgacctagaaaactagaaaagatctcttgactgtggaacttggtcatctctggggaactagctccctctaaatctgctgacatcatccaaacagcagttccttagtggctctctggatttaataatgacttgaaactctcgggtaaagtggtggaatgtgtaatctaaatatcaaggttatgtgtcctgcccactttctttgtatctttcagtggtatctattgaagcaggtcagctgaagaatgacaaggttcatacaagtggaaaggagagctttatttctcataaagagttgcagcctgcaaggtggctattctgataggctgggaggcacggcctctggccagatgccagaaacagactgctttgagggtgggacaaataggacagggttttatgctgaatgagatggccaaata

SEQ ID NO: 705209 - DNA, 1130 bp, Homo sapiens
tagcaactgagcatttgaataaccagagatgatgttattattacatttttgatgccataaacgtgcacaatttgtgtggtacataaagggaagtcaacttgggtttaaaaattggggaaaaaagtcaaccaaatatgtttaggtatcaaaactggtcctagcagttagtaaggaaagtaactaactttattcttcgtttggaaatttaataggcatataagtgccactagggggcwctctaatattccataggtgggaggcctgactatcacagcaggggtaatagaataatgaataaaaatgctctgtaatttaaagtatattccttagtcatattaacatttgcatgtttgtacaaagcctgaaaaatggaactttattattttaaggttttctagtgttaaaaatgtatttatggtaaataatttagaaatgcaaatgtaaatatgcacctgataaagaaaggaataatgtgcttcattgcactcaatttctttggtgtaataaaaaggggaaaaaaagagcttcctctagtttcctgattacttttcttcctgagtaatacaaaacaaaatgtttaaaatttttgccacctgaattattccatcaattaatagataattatttatagatatgaaatatgtatctctatacatatatataattggatattaggttgtttaaccttattcaacagaatatacagaataaagcttttaaattgtaaatactaatatattaccagttaaaggaattcattaaaaggcttggtcctatgtggatatacttatgaaaaaaggtaacttattagggtatatttcatttactgttctaagatatgcaaaatgcaaaacttgtttaacaacttttcctaggaacattaaaacatattaaaacaaaagcattattaccagggaaggaaatattgggtatttagcatcctttatattgtatattgtaatttatgtttgtttccatgctttcaaatatgttccaattataagaattccgtgttgcatatttcttatatttttctatgattgtcaaatgttgtggcataaatatataaaattctgtatagaactatatttggagtctattttgtgctctggaaaatatgagcactttga

SEQ ID NO: 705210 - DNA, 1613 bp, Homo sapiens
aaatgtcttacttagaaaatttctcttaaggcaagcagtaaacgatttcatcagaaatagttattttttaaatggtatttttcaaggttattgccaagtttttttgggggtgggtcatctttgtaaatttgcaagactccagtgatcagttttcttcaattattctgtatcctgtatgatatgattgtatttttctaagcatcaaaatctgattcattgtggaatactgaatggatagccctactgtaatagtcttctgtctaccctgtaaacataaccttagagggccaaataaattacgtattgcagcctcattcattatagattttctaaggcctctaggtgcagactggacctgggctctgttggataaacttggttgagaaacattttgtacttacagaattaaaaggaggagaagaatctgcatcatgtgagattagatgacttgattcactgacgtctatgatgggtgtgttgtgcagatgagctgagaagaaagagcctgctttttcttctgttgaactattcacaggaaaccacccatgtctgtgtttttcagaaaacatgaagatatctccagctagtggaatagcagcctcttttcaactgcctttgacttttctttctgctgcttttgaaatgactctaaaaaagtgaaagattaaaggaaagcagtctgccaaatacctgaaagaaacccgtttttggaactgagcttataaatgtaagcttataaacaaggactcaggctccaacagaaaaagaaaggataaaagggccaaggaattcctctgtcctctgtactcagagaatgttccttctttgttgaagggagaaaaatgaatagaatgaacagctcttggccccagtttgtgccaggatggtgttgaggaggtagatgaactttcagacatgtgtgaagggtagaattatttttcccattattattttagactgtgtgaattcactcttctcaggggccaccctgcaccattgcaaggacaaggctgcaggagaaagcagggaagtcacatgcttgggctttttctataattgtttatkggttcctagtcaagctaattttgaggataagaaagacatttcccagtggatctatgctgctagctgatgtgttgctttcccctttaaatctgacacagcgatacccttgcctttatttttcagtgttcttttcagttgaaccttcatgcagagtatgaggctttttacaggtatctagtccctcccagcattcagccaaagtttcaatattgtttaaaaagacataaatacagggcatcttggaatgatgaaagaaactctgaacaattatagctccctttctgaagtttctgctttgagaagactatttcatatctccctttagtgccttcatatagtcagtccaaaccttggagcaccttccttgaataaatctgaattcttttgctctacccatcttcagtattttatcttggttctcatggatgattaggttccacttaaatacactttttcatatgctgtgctcctcctagcaagatagaaattgttggaaaactattttttgaatcattaggaaggctttctcttattttgatattcatcac

SEQ ID NO: 705211 - DNA, 1613 bp, Homo sapiens
aaatgtcttacttagaaaatttctcttaaggcaagcagtaaacgatttcatcagaaatagttattttttaaatggtatttttcaaggttattgccaagtttttttgggggtgggtcatctttgtaaatttgcaagactccagtgatcagttttcttcaattattctgtatcctgtatgatatgattgtatttttctaagcatcaaaatctgattcattgtggaatactgaatggatagccctactgtaatagtcttctgtctaccctgtaaacataaccttagagggccaaataaattacgtattgcagcctcattcattatagattttctaaggcctctaggtgcagactggacctgggctctgttggataaacttggttgagaaacattttgtacttacagaattaaaaggaggagaagaatctgcatcatgtgagattagatgacttgattcactgacgtctatgatgggtgtgttgtgcagatgagctgagaagaaagagcctgctttttcttctgttgaactattcacaggaaaccacccatgtctgtgtttttcagaaaacatgaagatatctccagctagtggaatagcagcctcttttcaactgcctttgacttttctttctgctgcttttgaaatgactctaaaaaagtgaaagattaaaggaaagcagtctgccaaatacctgaaagaaacccgtttttggaactgagcttataaatgtaagcttataaacaaggactcaggctccaacagaaaaagaaaggataaaagggccaaggaattcctctgtcctctgtactcagagaatgttccttctttgttgaagggagaaaaatgaatagaatgaacagctcttggccccagtttgtgccaggatggtgttgaggaggtagatgaactttcagacatgtgtgaagggtagaattatttttcccattattattttagactgtgtgaattcactcttctcaggggccaccctgcaccattgcaaggacaaggctgcaggagaaagcagggaagtcacatgcttgggctttttctataattgtttatgggttcctagtcaagctaattttgaggataagaaagacatttcccagtggatctatgctgctagctgatgtgttgctttcccctttaaatctgacacagcgatacycttgcctttatttttcagtgttcttttcagttgaaccttcatgcagagtatgaggctttttacaggtatctagtccctcccagcattcagccaaagtttcaatattgtttaaaaagacataaatacagggcatcttggaatgatgaaagaaactctgaacaattatagctccctttctgaagtttctgctttgagaagactatttcatatctccctttagtgccttcatatagtcagtccaaaccttggagcaccttccttgaataaatctgaattcttttgctctacccatcttcagtattttatcttggttctcatggatgattaggttccacttaaatacactttttcatatgctgtgctcctcctagcaagatagaaattgttggaaaactattttttgaatcattaggaaggctttctcttattttgatattcatcac

SEQ ID NO: 705212 - DNA, 1613 bp, Homo sapiens
aaatgtcttacttagaaaatttctcttaaggcaagcagtaaacgatttcatcagaaatagttattttttaaatggtatttttcaaggttattgccaagtttttttgggggtgggtcatctttgtaaatttgcaagactccagtgatcagttttcttcaattattctgtatcctgtatgatatgattgtatttttctaagcatcaaaatctgattcattgtggaatactgaatggatagccctactgtaatagtcttctgtctaccctgtaaacataaccttagagggccaaataaattacgtattgcagcctcattcattatagattttctaaggcctctaggtgcagactggacctgggctctgttggataaacttggttgagaaacattttgtacttacagaattaaaaggaggagaagaatctgcatcatgtgagattagatgacttgattcactgacgtctatgatgggtgtgttgtgcagatgagctgagaagaaagagcctgctttttcttctgttgaactattcacaggaaaccacccatgtctgtgtttttcagaaaacatgaagatatctccagctagtggaatagcagcctcttttcaactgcctttgacttttctttctgctgcttttgaaatgactctaaaaaagtgaaagattaaaggaaagcagtctgccaaatacctgaaagaaacccgtttttggaactgagcttataaatgtaagcttataaacaaggactcaggctccaacagaaaaagaaaggataaaagggccaaggaattcctctgtcctctgtactcagagaatgttccttctttgttgaagggagaaaaatgaatagaatgaacagctcttggccccagtttgtgccaggatggtgttgaggaggtagatgaactttcagacatgtgtgaagggtagaattatttttcccattattattttagactgtgtgaattcactcttctcaggggccaccctgcaccattgcaaggacaaggctgcaggagaaagcagggaagtcacatgcttgggctttttctataattgtttatgggttcctagtcaagctaattttgaggataagaaagacatttcccagtggatctatgctgctagctgatgtgttgctttcccctttaaatctgacacagcgatacccttgcctttatttttcagtgttcttttcagttgaaccttcatgcagagtatgaggctttttacaggtatctagtccctcccagcattcagccaaagtttcaatattgtttaaaaagacataaatacagggcatcttggaatgatgaaagraactctgaacaattatagctccctttctgaagtttctgctttgagaagactatttcatatctccctttagtgccttcatatagtcagtccaaaccttggagcaccttccttgaataaatctgaattcttttgctctacccatcttcagtattttatcttggttctcatggatgattaggttccacttaaatacactttttcatatgctgtgctcctcctagcaagatagaaattgttggaaaactattttttgaatcattaggaaggctttctcttattttgatattcatcac

SEQ ID NO: 705213 - DNA, 633 bp, Homo sapiens
agttttcaaaaatagaaagcagttgaagccactggttgccctatgagtaaaagcaaaacatttcttttgcagggggtgaaaatcactgtcttatgcattatttgtaagtagcaatcattgagcattagtacctatataaactttaaaaataaaccactgttccccactgctagggaagagggtaagagcctaagagcagttactctatctatgaagccactaacttccttcatggcaagaatagctcctttggggttagccatattttcagaaaatgcctgagccactgtaactgatggagaataaaggtgagatgaaactctctggtctttatcttttgctgtcctactttcatctgcttatgatttaaagggtgaaactacagtcttgtccagcaacagaaggccttyctaattctgatggccctaagtcaggctcttgtcttttgtccagcttcatctccctccacatcctatcagtcttccctcatgctatgctgaaaagcttgtcactccctagctccctgaacacatcatgtagattgctaccctgacgtgtctctttggtacattcatcctaactcctactcatcctgaaggcggaggcatgtcacctttaggatgttttttctga

SEQ ID NO: 705214 - DNA, 590 bp, Homo sapiens
aaagttgcaaagatagtacagagttcccatatacccttcacccagtttcccctaatgttaacaccttacataaccaaggtgcatttgtcataaataagaaagtaacactggcacgttattattaataaaacgccagtctttatcagatttcactggttttctactaatgtcctttttctgttccaggagcattgcaattcagaataccatattgtatttagtgtgtgttttttaaaatcaaatattgacttgattttgaataagaaaaacagcttcaaaaagtgattaaacatctyggccattcttcctgttttctttctctgacatgtgatggataggccggccctcctttcctggtctcagccaggaagagcacagcaaggaaagtcctcttcactggctgtcatagctgttccctcatgtgggctgagaatatttcaatcaggtcagcacacagtttctaaagaaaagaaactgaggtagagtagagatcattgcaaagataacaaccaggaataaaaagcatcctgagttggtgtttcaaaagggtcacaggaggattgaaagttctcaaatattctccaagaggc

SEQ ID NO: 705215 - DNA, 590 bp, Homo sapiens
aaagttgcaaagatagtacagagttcccatatacccttcacccagtttcccctaatgttaacaccttacataaccaaggtgcatttgtcataaataagaaagtaacactggcacgttattattaataaaacgccagtctttatcagatttcactggttttctactaatgtcctttttctgttccaggagcattgcaattcagaataccatattgtatttagtgtgtgttttttaaaatcaaatattgacttgattttgaataagaaaaacagcttcaaaaagtgattaaacatcttggccattcttcctgttttctttctctgacatgtgatggataggccggccctcctttcctggtctcagccaggaagagcacagcaaggaaagtcctcttcactggctgtcatagctgttccctcatgtgggctgagaatatttcaatcaggtcagcacacagtttctaaagaaaagaaactgaggtagagtagagatcattgcaaagataacaaccaggaataaaaagcatcctgagttggtgtttcaaaagggtcacaggmggattgaaagttctcaaatattctccaagaggc

SEQ ID NO: 705216 - DNA, 808 bp, Homo sapiens
tggaggatttgcagcaagaggggaaaagtgagtatggctgggaaaggctgagaagtgggggaaggcatatgaggcagcaggggatatgctgtcaagggacagtgtagatgccagtttgacatgagtaatgagttcatgtggcaagacagagagaaaatcctggaaagttaggttagagcttagctgtacaaagttttaagtacccggttttggagcttattgtcggcggggaggcatgggcttttgtatcayttagacctgagttcattcattaattcttttgtaagtcatttattgaaatgccaggtaccattccaggttctggtgatacagtggggaacacaaaggctagtctctacatttacagaacttacattctagtggattcaaaccctcgctttgttattttccagctgggtaaacttaaacaggttatttaacctttctaagtctcaatttgttcgattgtaaaatagggatagttggacctaaatgaaataatgtaaatcaaagggcctggtatatggctgctatccaagtgtgttagctccccgcttcctcttcctccctgccatccctcttcctctatcttccttccataggttttgagagtctttgttctctcctacatctgttgctctgacagaagagcactgtatcttctaacattcagctacaatttagcggtctccttaggtacttggcctaatgtatttgcttcctagaagtgacatctaattgatgtaggtcaagatggttcatcagtagtagaaattaacctgtaagtgcttgggaagttctccaggac

SEQ ID NO: 705217 - DNA, 604 bp, Homo sapiens
aaaaacaaaaacccagctcaaatggcagtcatccatcctcactaggaattaagcgcaatatataattttttttttctcactctgtccccaggctggcatgcaatggcgcgatgtcaactcactgcaagctccacctcctgggttcacgccattctcctgcctcagggtcccgagtagctgggactacaggcgcccgccaccacgcccagctaattttttttktatttttagtagagacggggtttcaccatgttagccaggatggtctcgatctcctgacctcgtgatccgcccgccttggcctcccgaagtactgggattacaggcgtgagccaccgctcccgtcctataatttcaaatatatgcttcttgagagaaaacaaagcagaaatattttcctgatttaaatgcacgaattttcttaacttatataaggtgaacatactctacacttacttatttgccttttgtctttgatttcttcactgttatatccctcatgctttaaaaagtgcctagcacatggtaggaaattgctaggtatttaattttaaaagtatattttctaataaatactcttaataataacattaattaatattta

SEQ ID NO: 705218 - DNA, 936 bp, Homo sapiens
tgtcttatctttaaggaagcactggcaggaaaagaggcaagatttcaaccattgcagcccttacagaagctgccaaacccaaatcaaaacaccaacttggaacctaagccattacggtcagttagctacattctcttctctacaaaaaaaaaaaaaaaaaaaaaaaaagtmctgagataagtgccccatgaagtacatataacattgttacattatctacttacttgtctgtatttctactagagtgtatatcctgaaaaaaaaacatactcatttttttactattatagtctccatatcccacatggcacccagcatatagtagttataattaatatctttttgataaatgaatgaatgatttggtagagacattatagttaaaagactttttattatccctacctccctatccagtaattgactttcctcccctgtggctgcctcaagtgaatttagggaataaagttcatgtaacctatggcctctcacgtaatatagtctgaagagccagtactttccacctaactagcccaattatgcccaaacattaattgtccgtggtccatggagccttcagtagtctatcacactacattacattgtctctcattgatgggttaccacaatctagaagttttgagtagtgtcatttaagaagtgcaacatttctcccccttgaaattgccattgaatcctgcagatttgtattagtttgttctggctgccatagcaaaatgccaccaattgggtggcttaaaaacagaaatgtattttgtcacaattctggaggctacagacctaagatcaaggtgttggcggggttgaagcctgaaggcctctctccttggcttacagatagtcatatccctgtggcttctcatggtctttcctctgagtttatctgtagcttaatttcctcttcatataaggata

SEQ ID NO: 705219 - DNA, 687 bp, Homo sapiens
taattatcgatattatttaaatatgaaggttggaaaaattctaaagcatcataaattgtaaccctcaatttcacatgaagagactgaagctcagagaagttaactgacatccaaggttgttaatgacaaatgatttaatctgttgactcccagtctagtgccatttcaatacaataaaatgcccactttagataaaatcatggattgtgaaagctaatttggattttgcaggtgaactataccatgctcctcctctccagtaaggaagctaaggactcgctagtgcccagtttccctaggagccctcgttctcttccccaggcaagacccacctaattgaatgaggagataaagaccttgagtagaaraggacatgtgaactcaagatgaccaaaggagacttgcctcataatctatattaggcctaacgttccagaaatgcatctccctttagagtaccttcacttttaaaagggaatttaattgtgggaattcaagcacaatatggaccaatgaggtaaagatctttgagataagtgatgccttaaggtcttcaaaccagttcatttaaaccagaacttgctccatctctgtgtaaggcctccctgtgcacaatcacaaccattttcccaaccctgagggatgacaaaaaacaagtcagtattgtcagtgctaatacatgaatca

SEQ ID NO: 705220 - DNA, 987 bp, Homo sapiens
  misc_feature 887, 888, 889, 890, 891, 892, 893, 894, 895, 896, 897, 898,899, 900, 901, 902, 903, 904, 905, 906, 907, 908, 909, 910,911, 912, 913, 914, 915, 916, 917, 918, 919, 920, 921, 922,923, 924, 925, 926, 927, 928, 929, 930, 931, 932, 933: n = A,T,C or G
  misc_feature 934, 935, 936, 937, 938, 939, 940, 941, 942, 943, 944, 945,946, 947, 948, 949, 950, 951, 952, 953, 954, 955, 956, 957,958, 959, 960, 961, 962, 963, 964, 965, 966, 967, 968, 969,970, 971, 972, 973, 974, 975, 976, 977, 978, 979, 980: n = A,T,C or G
  misc_feature 981, 982, 983, 984, 985, 986: n = A,T,C or G
tgaggatacttttccttatttcatattttctcatgaataaatgagatgatcaatgaaaagttcttagcacaatacctggcccacaaagtgttaatatattattagtagtaaatataataccaaagaatttatgttttaaaaataaaaggcgaaactactctgggccgggcacggtggctcacatctgtaatcycagcactttgggaggccgaagaggccggatcacgaggtcaggagttagagaccaacctggccaacatagtgaaaccccatctctactaaaaatacaaaaaaaaatagctgggcatggtggcaggagcctgtaatcccagctactcagaaggctgaggcaggagaatcgcttgaaactggaaggcggaagttgcagtgagccaagattgcaccactgcactccagcctgggcggaagagcaaaactccgtctcaaattaaagtattacccatatgatatagacagcagtttctaacccttgtgttgctgacattttgggccatcctgttcattataaaaagcttaacgcaccagatgctagtagtactcagttgtgatgaccaaatatctttggagacattgccaaatgccccctggggacaaaatcaggcctgcttgagaaccactgctgcagaacctccgcttagagtttttcaattactacttttttttttctccaagttattggtagaaaagagaattactgctttctattagacaacaaaagcaaaagcacagaacaagtttaacccctctgagagaaagatatctgtgcttccttattgttacattttattgaagccactagattaatgtctatctcacccactagaataaaagcttcacaaaggtactatgtctggctcttttctgcnnnnnnnnnnnnnnnnnnnnnnnnnnnnnnnnnnnnnnnnnnnnnnnnnnnnnnnnnnnnnnnnnnnnnnnnnnnnnnnnnnnnnnnnnnnnnnnnnnnnt

SEQ ID NO: 705221 - DNA, 648 bp, Homo sapiens
tgagttgacacaccacatgtttcagggagcacagggttgggggtaaggttatagattacagaacaaaatggagtcccctatgtctacttctttctacacagacacagtaacaatctgatctttcttttccccacaaggaaggaagcatgtttcattctgaatctcatatatcatgtactgtctttgaaatcaacatggagtattagcagagtgagacaatgtaacacatataagagggcatgtttgctcatttctgtttgccaacataatttcacaaagcccttgactctaataatgtgtagctctctagaaagatactttgaagacgaaacaggatagagcacacagccccgtagatctcttgccggagtcactgtacactttaaaagataaatgaggccccacaccatggctcacrtctataatcccagcactttggaggccaaggctgtcagattgcttaagcccaagagtacgagaccagccttggcaacatggtgaaacccatctctagcaacaaaaatttaaaaattagctacgtgtggcggcacacgcctcagcctgggtgacaaatccagaccctgtcttaaacaaacaaccaaccaaataaataaacaaatgataaagactctagtccttgccttttcc

SEQ ID NO: 705222 - DNA, 648 bp, Homo sapiens
tgagttgacacaccacatgtttcagggagcacagggttgggggtaaggttatagattacagaacaaaatggagtcccctatgtctacttctttctacacagacacagtaacaatctgatctttcttttccccacaaggaaggaagcatgtttcattctgaatctcatatatcatgtactgtctttgaaatcaacatggagtattagcagagtgagacaatgtaacacatataagagggcatgtttgctcatttctgtttgccaacataatttcacaaagcccttgactctaataatgtgtagctctctagaaagatactttgaagacgaaacaggatagagcacacagccccgtagatctcttgccggagtcactgtacactttaaaagataaatgaggccccacaccatggctcacatctataatcccagcactttggaggccaaggctgtcagattgcttaagcccaagagtacgagaccagccttggcaacatggtgaaacccatctctagcaacaaaaatttaaaaattagctacgtgtggcggcacacgcctcagcctgggtgacaaatccagaccctgtcttaaacaaacaaccraccaaataaataaacaaatgataaagactctagtccttgccttttcc

SEQ ID NO: 705223 - DNA, 636 bp, Homo sapiens
acagggagcagaagaccctgagatcctgcagaccttgattttgttttcaaagactcccctggccctggctgtcctcatgcctgtctacccctgctctgggcacatttatttctttttcttcttttttttttttttgagaaggacttttgctctcgtggcccaggctggagtgcagtggcacgatcttgactcactgcaatytccacctcccgggttcaagcaattctcctgcctcagcctcctgagtagctgggattacaggcacgtaccaccacctggctgtttgtatttttagtagagacagagtttcatcacattgggcaggctggtctcagaactcctgaccttgggtgatccacccgactcagcctcccaaagtgctgggattacaggcatgagccatcatgcatggcctctggacatatttcgatgtgctcctctgagcatctcgcctggccttcctgctctctgagcccacagaccccagggaggaggggaggtgccaggacaccggggcccagaggagatcctgaatctgcccttgggtgaggaagtcagtccagctttcttccaggggcccttgaccctctgtgcacctgacctatgcccagggagggcttgccctcatgctcttgg

SEQ ID NO: 705224 - DNA, 641 bp, Homo sapiens
tgaccattggttcagtgattctatcagaaatcacctggggaatgcaaagaaattaagattcctgggctccaacccagacaaagagaatcagaatctctttttaagtgaaaacttgttttaawttacaaaagtcgtacatgctcattataaatgaatcccaaccatacagaaataatgagagtaaaacggtctctcagaggtaaccactcttagtggtttggtgtgtgtcctctagggttttggctttttttttctttcccctggaaagagctaagcatatagcttttatttttcccattaaactagatccccactcacttaaaaaaacaaaaaaccgaatatagcttagacatctttccacatcagtacacatatgtctacctcactctgttctacagctgcagagaattccattgtgtagcttgttgtggatgacttaaccctttccctgttggtggatatttgggctgtccctggtgattcacatgcagccctcccagccactgcccatgtttagcaacctctgctttctacagatgggcaaatggaggcccagggaaggtacaagaaagagcaggtagcttcacggagcaaattagtggcagagcaggacttacaaccctggtttcctggcatgctct

SEQ ID NO: 705225 - DNA, 1306 bp, Homo sapiens
cacctgaggcaacatttattgtgtatgtagtatttgccaagtaccatcataagcagttttatttattaatttattcaactatctgagttagaaaacaccaatagtctcaattgactgaggagttgacagaggtacagagaagtgcaatatttgaacactgccacacaccttgtgcgtgatacagctgtgaytccaactaggcagccttgctctaaagcttacgttactacgttatgacccactgtgtgtatgtgaggagtgtgtgtgtgtgatttccaggtgacaaagattggaagctataggtttagttggcactcctactctcttttcctttgtgcaatatggataacctatctcttttagaaaaagaagaaaataatagagagagagagttaagaagagtcatatggaaggtaacaaaggcttaaaaatattcaagtaaaataaaagatatatgagactaaaagaagcaagcttaaagtatagagaatttgtgccctgaaaaacatggcttaaaataaatagagttgaatcattcaagaagactttcttacagtgaacttgaaactttaaaacaatgagacgtatcctgataaaacactggactttcagaacagggaaaaaattatattcatctgggcaaaaacaatcaagtcattcataaaaataaaattgagcctccctttcaattacttccagagcagcattctaagctagaaggcagaggagagattctcactaggtgctcttggattcaaacgttctgctgggccttctccttgggctggtgggggctgcaaggcagtgggggctgtgcatggagctcactgagggagtcccctgctggaagcctacagactttcagttataagactggcagtgatatgctgtttgctcacaaagcctatcttgttcttttcatctagttttctccacttgtgcttatttaatcttcttttaatcacctttctgtttcttcttgcctacagtcatcatccttcccattttcagctgcctgtttggccacaactgtcttaaatctcaggttcacgaccctcctccctacaaaatcggccacttcctcctcctgtttctcaccagctccttcctctgcccagtctgcctggatttcagtttcttgttccaggtttttctttcaaccagtcccattatctggtgcatttctttgtttcgtcttctgatcccctacttcctctacttacacactttgtggagacctaggcgtgatgactaaagttttaatgtgttaatatatatgatggaaacttgatctccaaggcaactg

SEQ ID NO: 705226 - DNA, 1395 bp, Homo sapiens
ttctcactttgcgtcatttccttgttgctgcaggaagaaagtttccttctactgctgcatagaacaccatgataaggatacaccagtttcagctcttctattgctgcgtagaacaccgtgataaggatacaccagtttcagctcttctatttctgcgtagaacaccgtgataaggatacaccagtttcagctcttctatttctgcgtagaacaccgtgataaggatacaccagtttcagctcttctatttctgygtacaacaccgtgataaggatacaccagtttcagctcttctatttctgcgtacaacaccgtgataaggatacaccagtttcagctcttctagtcgctgtgtagaacgccgtgataaggatacaccagtttcagctcttctatttctgcgtagaacactgtgataaggatacaccagtttcagctctcagccactgaatggcacctgggtcacttccagtttttagctattacaggtaaatgagcgtcggcgcccaggcatttcgtgtgagcctaagtctttgctttcctgggatgagcacccaggagggtggatgcggggtcatgtggtgagcgcatgtggacacggggtcacatggtgagcacacgtttagttttttaagaagctgccaaactgtttcccagtgaggctgcaccacgtcacacccccatcagcagcgtacaagggatctggtttctttgcatcctcagcagcgtgtggtgttgtcactgttttttgagttttgttttgtttttgagatggggtctcgccctgttgcccaggctggagtgcagtggggtgaccacggctccctgtagcctcgaactgccaggctcaagtgatcctcccacctcaatcttctgagcagctaagactagcaggtgcgcaccaccactgccagctaatttttgtatttttttagagacagaatctcactatgttgctcaggctggtttcaaactcccgggctaaagtaatgcttccaactcagacgcgcaaaatgctgggatcacacgtatggcccagatctgggccggtcactgctctttactctagctctcctaagaggtgtgtgttcctatcaaaatctcagcaagatactttggtagataggaacaagcgtattctaaaaattacaggaaaaggcaaaggaatagctgaaacaattctggtaaagaacaaagtgggaggaatcactccacctgctctcgtctcacagaagcgagagaccagttgtgtgcggaaggacagactcacagagccagcacagacccccacatgcacctgagctccggcaaaggtgcaagcacaacttggtggaaagaagacagcatttcagaccagtggggctggagcacttttccacaggcagaaaatgaacc

SEQ ID NO: 705227 - DNA, 1395 bp, Homo sapiens
ttctcactttgcgtcatttccttgttgctgcaggaagaaagtttccttctactgctgcatagaacaccatgataaggatacaccagtttcagctcttctattgctgcgtagaacaccgtgataaggatacaccagtttcagctcttctatttctgcgtagaacaccgtgataaggatacaccagtttcagctcttctatttctgcgtagaacaccgtgataaggatacaccagtttcagctcttctatttctgtgtacaacaccgtgataaggatacaccagtttcagctcttctatttctgcgtacaacaccgtgataaggatacaccagtttcagctcttctagtygctgtgtagaacgccgtgataaggatacaccagtttcagctcttctatttctgcgtagaacactgtgataaggatacaccagtttcagctctcagccactgaatggcacctgggtcacttccagtttttagctattacaggtaaatgagcgtcggcgcccaggcatttcgtgtgagcctaagtctttgctttcctgggatgagcacccaggagggtggatgcggggtcatgtggtgagcgcatgtggacacggggtcacatggtgagcacacgtttagttttttaagaagctgccaaactgtttcccagtgaggctgcaccacgtcacacccccatcagcagcgtacaagggatctggtttctttgcatcctcagcagcgtgtggtgttgtcactgttttttgagttttgttttgtttttgagatggggtctcgccctgttgcccaggctggagtgcagtggggtgaccacggctccctgtagcctcgaactgccaggctcaagtgatcctcccacctcaatcttctgagcagctaagactagcaggtgcgcaccaccactgccagctaatttttgtatttttttagagacagaatctcactatgttgctcaggctggtttcaaactcccgggctaaagtaatgcttccaactcagacgcgcaaaatgctgggatcacacgtatggcccagatctgggccggtcactgctctttactctagctctcctaagaggtgtgtgttcctatcaaaatctcagcaagatactttggtagataggaacaagcgtattctaaaaattacaggaaaaggcaaaggaatagctgaaacaattctggtaaagaacaaagtgggaggaatcactccacctgctctcgtctcacagaagcgagagaccagttgtgtgcggaaggacagactcacagagccagcacagacccccacatgcacctgagctccggcaaaggtgcaagcacaacttggtggaaagaagacagcatttcagaccagtggggctggagcacttttccacaggcagaaaatgaacc

SEQ ID NO: 705228 - DNA, 1395 bp, Homo sapiens
ttctcactttgcgtcatttccttgttgctgcaggaagaaagtttccttctactgctgcatagaacaccatgataaggatacaccagtttcagctcttctattgctgcgtagaacaccgtgataaggatacaccagtttcagctcttctatttctgcgtagaacaccgtgataaggatacaccagtttcagctcttctatttctgcgtagaacaccgtgataaggatacaccagtttcagctcttctatttctgtgtacaacaccgtgataaggatacaccagtttcagctcttctatttctgcgtacaacaccgtgataaggatacaccagtttcagctcttctagtcgctgtgtagaacgccgtgataaggatacaccagtttcagctcttctatttctgcgtagaacactgtgataaggatacaccagtttcagctctcagccactgaatggcacctgggtcacttccagtttttagctattacaggtaaatgagcgtcggcgcccaggcatttcgtgtgagcctaagtctttgctttcctgggatgagcacccaggagggtggatgcggggtcatgtggtgagcgcatgtggacacggggtcacatggtgagcacaygtttagttttttaagaagctgccaaactgtttcccagtgaggctgcaccacgtcacacccccatcagcagcgtacaagggatctggtttctttgcatcctcagcagcgtgtggtgttgtcactgttttttgagttttgttttgtttttgagatggggtctcgccctgttgcccaggctggagtgcagtggggtgaccacggctccctgtagcctcgaactgccaggctcaagtgatcctcccacctcaatcttctgagcagctaagactagcaggtgcgcaccaccactgccagctaatttttgtatttttttagagacagaatctcactatgttgctcaggctggtttcaaactcccgggctaaagtaatgcttccaactcagacgcgcaaaatgctgggatcacacgtatggcccagatctgggccggtcactgctctttactctagctctcctaagaggtgtgtgttcctatcaaaatctcagcaagatactttggtagataggaacaagcgtattctaaaaattacaggaaaaggcaaaggaatagctgaaacaattctggtaaagaacaaagtgggaggaatcactccacctgctctcgtctcacagaagcgagagaccagttgtgtgcggaaggacagactcacagagccagcacagacccccacatgcacctgagctccggcaaaggtgcaagcacaacttggtggaaagaagacagcatttcagaccagtggggctggagcacttttccacaggcagaaaatgaacc

SEQ ID NO: 705229 - DNA, 600 bp, Homo sapiens
ctcccctgttggggggggctccccgaaggccccaggcaggtgtggtctgtgtgtgtgttctagctcctggtgtctagaaggatcctagtgagtcctgcctgccagaagtgtaacgtcccattcccaatcctcaaaccattaattccctctttctttgcagataccctgttccagttgaaggtatgtaccgaatggccgttcaccccagccctgttctggtgaggacagatagtataagccacgctcactcagagccacagaaacagtcgggcagattatataacagttgagtgaccgccacacagggctcagactgctgaccaaggaggggattattgagccaccttggtgacatattagctcttttcttatctgaggctaagtggaggcagatccttagggtcatccatgaaagccatgaaagaaatagtgttatctttcttttattttattatttttttttgagacggcgtctcactccgtcgcccaggctggagtgcattggcgtgatctcggctcactgcaacctctgcctccyaggttcaagcgattctcctgccttagcctcctgagtagctgggactacaggcgcccaccacc

SEQ ID NO: 705230 - DNA, 600 bp, Homo sapiens
ctcccctgttggggggggctccccgaaggccccaggcaggtgtggtctgtgtgtgtgttctagctcctggtgtctagaaggatcctagtgagtcctgcctgccagaagtgtaacgtcccattcccaatcctcaaaccattaattccctctttctttgcagataccctgttccagttgaaggtatgtaccgaatggccgttcaccccagccctgttctggtgaggacagatagtataagccacgctcactcagagccacagaaacagtcgggcagattatataacagttgagtgaccgccacacagggctcagactgctgaccaaggaggggattattgagccaccttggtgacatattagctcttttcttatctgaggctaagtggaggcagatccttagggtcatccatgaaagccatgaaagaaatagtgttatctttcttttattttattatttttttttgagacggcgtctcactccgtcgcccaggctggagtgcattggcgtgatctcggctcactgcaacctctgcctcccrggttcaagcgattctcctgccttagcctcctgagtagctgggactacaggcgcccaccacc

SEQ ID NO: 705231 - DNA, 804 bp, Homo sapiens
agacatacagccaccgtgtgtcccagatattctagtttgatcaatcatattatcatgtagtttttacccactggctcccataaagttctctaagccttagttacttcgtgcataaaatgaggttagaagtcctgttctggagcataatgataatgtatataaaatgccttacacacaagactcaatttagaattattattgtcttaaaggttgtgcaaagctaaattgttatttatctttgtaaagatttcactatgcatatattggtaaatttaaaaatcctttgtcagattatttattcctcctaaaccagaaaattttcaggatgtcaataatactgagtgtagttgtggtcacttcagtgtaggccaatggaacacatgtgcaatgtagaccaagctaggcttcaatctcatctgggcctcatagtagctcagttcakctatgcaaacttggcaagctccttggccttgcagacttaagtttcttcatctgcacaattgttatactgcaacacaccttgcaaggattttgtatacatgagctatctatcatatactggggactcaatatgttagctctctttccccagcaacatagcctttccaagatatccatttttactaattgaagataatgccttgccttgttttatctggtgtgggattttataatgttaatgttcctccgtgagtgaaagctgccttagattaggctcttaatacatgacctaaaacatggataacccatccccctcaccacccacctcctcctgtaactcaaagatttgtttctcatctagaa

SEQ ID NO: 705232 - DNA, 646 bp, Homo sapiens
cagtttcccctggggattggagagtggggttggctgacagttctctgggtaagagaccaaggcattattaaaaaattatccccataccacactctgttcccagtccccaaaagtcaaattgcaaagcctgattttaaactctgaagaaatgcccaatctcatgattgtagacaaacagagcagaggaggtccctgggattgaygggaaagacttcactggaagaagctcaacttcccaagacagggataaggggaggagtcaggaagaaaagagaggaaacaattgtcattcagcttctaaagggtcagaggcagcaccaggggcaaatcctttaatttgccacttaggaagatttagaaaggttttggggggataggggaggtcagtgagaaaatgggagattacaacaattataaaggaaaagaattctgttcacccggtaccttggggaaagttttaaggcagacaagatagagaaaagatattagtaaaactctctaggaattaatagtattgccagtgacacagatttgtaatcttccgggttaaactcagacaagatcaaatccttttggaaatgcagtctgcgctttcggaacgacagcagtcactgtgacttcttcactttatgtgctattttgcttc

SEQ ID NO: 705233 - DNA, 646 bp, Homo sapiens
cagtttcccctggggattggagagtggggttggctgacagttctctgggtaagagaccaaggcattattaaaaaattatccccataccacactctgttcccagtccccaaaagtcaaattgcaaagcctgattttaaactctgaagaaatgcccaatctcatgattgtagacaaacagagcagaggaggtccctgggattgatgggaaagacytcactggaagaagctcaacttcccaagacagggataaggggaggagtcaggaagaaaagagaggaaacaattgtcattcagcttctaaagggtcagaggcagcaccaggggcaaatcctttaatttgccacttaggaagatttagaaaggttttggggggataggggaggtcagtgagaaaatgggagattacaacaattataaaggaaaagaattctgttcacccggtaccttggggaaagttttaaggcagacaagatagagaaaagatattagtaaaactctctaggaattaatagtattgccagtgacacagatttgtaatcttccgggttaaactcagacaagatcaaatccttttggaaatgcagtctgcgctttcggaacgacagcagtcactgtgacttcttcactttatgtgctattttgcttc

SEQ ID NO: 705234 - DNA, 647 bp, Homo sapiens
tgccacatccagaccacctcaggggtcccaccaccctgccacagcccccgccacttacaggtcctaattcattcatcacaactctgctgtttaataaggatatgaaactctaccgcagggatcactacaacactgcaaagtctgatagcccttaatatataaaatctgtgcaggccgggcgcagtggttcacgcctgtaatcccagcactttgggaggccaaggcaggcggatcacgaggtcaggagatcgagaccatcctggctaacatggtgaaatcccatctcaactaaaaatacaaaaaaattagccgggcgtggtggcgggcgcctgtagtcccagctactggggaggctgaggcaggagaatggcgtgaaccygggaggtggagcttgcagtgagccgagatcataccactgcactccagcctgggcgacagagcgagactccatctcaaaaaaaaattaaaattaaagttaaaaaaaatatatatctatatctatgtataaaaaatctgtgcaagtgggtaatttttcagatatgttgccatgccttggttcatgagtttttcatgtctgctggcaaccacagagcctcttttgtggcttatccccttatgtccttcgcctattttctataatgtttaca

SEQ ID NO: 705235 - DNA, 648 bp, Homo sapiens
tcaagactatcctaattagtaatttgattttacactataatgcttattgaatttctgaaggctatgcaggttgtaatttcaaagttgaggagtctcatggagtatttatagagcaagggcattaaaatcatgcctaaaagcaattgtgaatgtgacagaatacagattggaacaatcaactatccaaacattctgattaacttttttcataaatattctttgtagtgctgagtttgctttacttatttcaagatgcaataaagaaacagcttagaacagaggactgattggtatatgtttaggtgtaactgtggtttaacttygcatcttattgtacctctactcacagattggcgggcctaaccccagcatgtctgatccaggtctgatatggggtctgagaatgtctttctatgtccccagatgatgctgaggctgctgtacgtgcactacattttaagaaccactgccatagagtgtagatacttacatctctttaggttgaggactctgtatgaagactcaaaatttgcatttaatatttacttagaatttaatgttaaattaatctttaaagtaagaattaatttaaagcacgtagtagttttatatgttcatgcaatgtgaaaggctcgtatctttacatac

SEQ ID NO: 705236 - DNA, 648 bp, Homo sapiens
tcaagactatcctaattagtaatttgattttacactataatgcttattgaatttctgaaggctatgcaggttgtaatttcaaagttgaggagtctcatggagtatttatagagcaagggcattaaaatcatgcctaaaagcaattgtgaatgtgacagaatacagattggaacaatcaactatccaaacattctgattaacttttttcataaatattctttgtagtgctgagtttgctttacttatttcaagatgcaataaagaaacagcttagaacagaggactgattggtatatgtttaggtgtaactgtggtttaacttcgcatcttattgtacctctactcacagattggcgggcctaaccccagcatgtctgatccaggtctgatatggggtctgagaatgtctttctawgtccccagatgatgctgaggctgctgtacgtgcactacattttaagaaccactgccatagagtgtagatacttacatctctttaggttgaggactctgtatgaagactcaaaatttgcatttaatatttacttagaatttaatgttaaattaatctttaaagtaagaattaatttaaagcacgtagtagttttatatgttcatgcaatgtgaaaggctcgtatctttacatac

SEQ ID NO: 705237 - DNA, 648 bp, Homo sapiens
tcaagactatcctaattagtaatttgattttacactataatgcttattgaatttctgaaggctatgcaggttgtaatttcaaagttgaggagtctcatggagtatttatagagcaagggcattaaaatcatgcctaaaagcaattgtgaatgtgacagaatacagattggaacaatcaactatccaaacattctgattaacttttttcataaatattctttgtagtgctgagtttgctttacttatttcaagatgcaataaagaaacagcttagaacagaggactgattggtatatgtttaggtgtaactgtggtttaacttcgcatcttattgtacctctactcacagattggcgggcctaaccccagcatgtctgatccaggtctgatatggggtctgagaatgtctttctatgtccccagatgatgctgaggctgctgtacgtgcactacattttaagaaccactgccatagagtgtagatacttayatctctttaggttgaggactctgtatgaagactcaaaatttgcatttaatatttacttagaatttaatgttaaattaatctttaaagtaagaattaatttaaagcacgtagtagttttatatgttcatgcaatgtgaaaggctcgtatctttacatac

SEQ ID NO: 705238 - DNA, 648 bp, Homo sapiens
tcaagactatcctaattagtaatttgattttacactataatgcttattgaatttctgaaggctatgcaggttgtaatttcaaagttgaggagtctcatggagtatttatagagcaagggcattaaaatcatgcctaaaagcaattgtgaatgtgacagaatacagattggaacaatcaactatccaaacattctgattaacttttttcataaatattctttgtagtgctgagtttgctttacttatttcaagatgcaataaagaaacagcttagaacagaggactgattggtatatgtttaggtgtaactgtggtttaacttcgcatcttattgtacctctactcacagattggcgggcctaaccccagcatgtctgatccaggtctgatatggggtctgagaatgtctttctatgtccccagatgatgctgaggctgctgtacgtgcactacattttaagaaccactgccatagagtgtagatacttacatctctttaggttgaggactctgtatgaagactcaaaatttgcatttaatatttacttagaatttaatgttaaattaatctttaaagtaagaattaatttaaagcacgtagtagttttatatgttcatgcaatrtgaaaggctcgtatctttacatac

SEQ ID NO: 705239 - DNA, 614 bp, Homo sapiens
agagtattaaaatatttcttagtaaggtcatagaatattttaattaacaaaattttatacagaatttcaatgttttcaagtagatctattgcttagaaaaagcmtttcccaagctggtttttcactagtcccaaaatgtactttgcacaaaaagggatctaaggtcaagtcaagctaaggggaaagcttcatattttatccaccagcccagatattctcagtactcattaatatattcaaagctttgtgaatttctgtagtaaagatgctattttaattcagcatttcccaattttattggattgtggaatattcttcatttaaatgaatgctattgggaacctgcagagttagttttccccaaaatacatttaggaacacattgtatatctgatgaagggtcacctaagaaagacaaatggtaacttttagtgtccatgtaaagttctaacatttaccaatgcaagtttctggaagcgttcagagcttgtgaccagagtatgttatgtaaacaatgcatagaacatcaattcctatataagctgaggatcagaatgcccagtattttatcatggtttgactaagattgggacatagtgtttgttagctatgaa

SEQ ID NO: 705240 - DNA, 614 bp, Homo sapiens
agagtattaaaatatttcttagtaaggtcatagaatattttaattaacaaaattttatacagaatttcaatgttttcaagtagatctattgcttagaaaaagcatttcccaagctggtttttcactagtcccaaaatgtactttgcacaaaaagggatctaaggtcaagtcaagctaaggggaaagcttcatattttatccaccagcccagatattctcagtactcattaatatattcaaagctttgtgaatttctgtagtaaagatrctattttaattcagcatttcccaattttattggattgtggaatattcttcatttaaatgaatgctattgggaacctgcagagttagttttccccaaaatacatttaggaacacattgtatatctgatgaagggtcacctaagaaagacaaatggtaacttttagtgtccatgtaaagttctaacatttaccaatgcaagtttctggaagcgttcagagcttgtgaccagagtatgttatgtaaacaatgcatagaacatcaattcctatataagctgaggatcagaatgcccagtattttatcatggtttgactaagattgggacatagtgtttgttagctatgaa

SEQ ID NO: 705241 - DNA, 614 bp, Homo sapiens
agagtattaaaatatttcttagtaaggtcatagaatattttaattaacaaaattttatacagaatttcaatgttttcaagtagatctattgcttagaaaaagcatttcccaagctggtttttcactagtcccaaaatgtactttgcacaaaaagggatctaaggtcaagtcaagctaaggggaaagcttcatattttatccaccagcccagatattctcagtactcattaatatattcaaagctttgtgaatttctgtagtaaagatgctattttaattcagcatttcccaattttattggattgtggaatattcttcatttaaatgaatgctattgggaacctgcagagttagttttccccaaaatacattyaggaacacattgtatatctgatgaagggtcacctaagaaagacaaatggtaacttttagtgtccatgtaaagttctaacatttaccaatgcaagtttctggaagcgttcagagcttgtgaccagagtatgttatgtaaacaatgcatagaacatcaattcctatataagctgaggatcagaatgcccagtattttatcatggtttgactaagattgggacatagtgtttgttagctatgaa

SEQ ID NO: 705242 - DNA, 614 bp, Homo sapiens
agagtattaaaatatttcttagtaaggtcatagaatattttaattaacaaaattttatacagaatttcaatgttttcaagtagatctattgcttagaaaaagcatttcccaagctggtttttcactagtcccaaaatgtactttgcacaaaaagggatctaaggtcaagtcaagctaaggggaaagcttcatattttatccaccagcccagatattctcagtactcattaatatattcaaagctttgtgaatttctgtagtaaagatgctattttaattcagcatttcccaattttattggattgtggaatattcttcatttaaatgaatgctattgggaacctgcagagttagttttccccaaaatacatttaggaacacattgtatatctgatgaagggtcacctaagaaagacaaatggtaacttttagtgtccatgtaaagttctaacatttaccaatgcaagtttctggaagcgttcagagcttgtgaccagagtatgttatgtaaacaatgcatagaacatcaattcctatataagctgaggatcagaatgcccagtattttatcatggtttgactaagattgggacatagtgtwtgttagctatgaa

SEQ ID NO: 705243 - DNA, 1317 bp, Homo sapiens
ttctaaaatgtgtctttccttggtactacaaaagaaactactaaatacagtgtttgtcagcatcactatatcttgtccagcaggcaaaacacttggaaataaaattatatatgtatataaacacatatatgtaatttatatacataattcatatgtatatacaactcatatatatacgaataagcttaaaataaattgtcatgtaaacaatggctataaaattctagtgcaatcgtgtgtgatctacctttatgtgaaacaaaaggttttccttttaatttgtcaagtaatattctcctgagatgtcacattataagcagcattcccaaaggatatttatttagcataggccagtgagaaaacctaggttatggcagtttatgttgatggttctgtayccattccagagaatttactcgcaagagaatagtcatatagaattcaattgcaaaagcacaagtgaaaagaacatctggctctttacaaggcctcagaggaagtgacctgatatgatgggagtcattaaaatcacaaagtcctaatgcattttagaagaaattgcacactatgaactactaattaaaatggtctccagggaaaaccattaaacttatggtagatcaacattcattattaacatttgatgttttgtgtcttctcaggatactctggtgaagtcttttatgctttgatcaaatctctccttataaaaatacaaatgctttaatatattgctaacactggtctctagacatcataattaaattttagtgaaatgaaattattcacctgttagttacctgcagattttaaatagcaatgtacatgttacattccagtacgtagaagctggtaaacacctaagaattcatttagtgcatcttgaagaaaccgcagcccaaagacctactaatgcatttcatagcactcttcatattatgttgattatgagttggaaatatctgtttaattccagatttgtcatttaacaatgtccctggtatgtgaggaacagactcttccttgggcttgtatcaagttctggattctctcaaccaaggggaacgtggggcatttagaggcctcagaggagagaagtactcataattcacattgaacttaacagattagtgaagacttaggaagtattgagcagaaaaactcaggtgaagattgattcgttggggctatgtaataatttataaacactattatgggatgtagaggtttctctttttgctctttgactgtggttaatagaggacagtggccaactatccactcaagatagaacaacaaatgttgaaattaaactgc

SEQ ID NO: 705244 - DNA, 1317 bp, Homo sapiens
ttctaaaatgtgtctttccttggtactacaaaagaaactactaaatacagtgtttgtcagcatcactatatcttgtccagcaggcaaaacacttggaaataaaattatatatgtatataaacacatatatgtaatttatatacataattcatatgtatatacaactcatatatatacgaataagcttaaaataaattgtcatgtaaacaatggctataaaattctagtgcaatcgtgtgtgatctacctttatgtgaaacaaaaggttttccttttaatttgtcaagtaatattctcctgagatgtcacattataagcagcattcccaaaggatatttatttagcataggccagtgagaaaacctaggttatggcagtttatgttgatggttctgtatcmattccagagaatttactcgcaagagaatagtcatatagaattcaattgcaaaagcacaagtgaaaagaacatctggctctttacaaggcctcagaggaagtgacctgatatgatgggagtcattaaaatcacaaagtcctaatgcattttagaagaaattgcacactatgaactactaattaaaatggtctccagggaaaaccattaaacttatggtagatcaacattcattattaacatttgatgttttgtgtcttctcaggatactctggtgaagtcttttatgctttgatcaaatctctccttataaaaatacaaatgctttaatatattgctaacactggtctctagacatcataattaaattttagtgaaatgaaattattcacctgttagttacctgcagattttaaatagcaatgtacatgttacattccagtacgtagaagctggtaaacacctaagaattcatttagtgcatcttgaagaaaccgcagcccaaagacctactaatgcatttcatagcactcttcatattatgttgattatgagttggaaatatctgtttaattccagatttgtcatttaacaatgtccctggtatgtgaggaacagactcttccttgggcttgtatcaagttctggattctctcaaccaaggggaacgtggggcatttagaggcctcagaggagagaagtactcataattcacattgaacttaacagattagtgaagacttaggaagtattgagcagaaaaactcaggtgaagattgattcgttggggctatgtaataatttataaacactattatgggatgtagaggtttctctttttgctctttgactgtggttaatagaggacagtggccaactatccactcaagatagaacaacaaatgttgaaattaaactgc

SEQ ID NO: 705245 - DNA, 1317 bp, Homo sapiens
ttctaaaatgtgtctttccttggtactacaaaagaaactactaaatacagtgtttgtcagcatcactatatcttgtccagcaggcaaaacacttggaaataaaattatatatgtatataaacacatatatgtaatttatatacataattcatatgtatatacaactcatatatatacgaataagcttaaaataaattgtcatgtaaacaatggctataaaattctagtgcaatcgtgtgtgatctacctttatgtgaaacaaaaggttttccttttaatttgtcaagtaatattctcctgagatgtcacattataagcagcattcccaaaggatatttatttagcataggccagtgagaaaacctaggttatggcagtttatgttgatggttctgtatccattccagagaatttactcgcaagagaatagtcatatagaattcaattgcaaaagcacaagtgaaaagaacatctggctctttacaaggcctcagaggaagtgacctgatatgatgggagtcattaaaatcacaaagtcctaatgcattttagaagaaattgcacactatgaactactaattaaaatggtctccagggaaaaccattaaacttatggtagatcaacattcattattaacatttgatgttttgtgtcttctcaggatactctggtgaagtcttttatgctttgatcaaatctctccttataaaaatacaaatgctttaatatattgctaacactggtctctagacatcataattaaattttagtgaaatgaaattattcacctgttagttacctgcagattttaaatagcaatgtacatgttacattccagtacgtagaagctggtaaacacctaagaattcatttagtgcatcttgaagaaaccgcagcccaaagacctactaaygcatttcatagcactcttcatattatgttgattatgagttggaaatatctgtttaattccagatttgtcatttaacaatgtccctggtatgtgaggaacagactcttccttgggcttgtatcaagttctggattctctcaaccaaggggaacgtggggcatttagaggcctcagaggagagaagtactcataattcacattgaacttaacagattagtgaagacttaggaagtattgagcagaaaaactcaggtgaagattgattcgttggggctatgtaataatttataaacactattatgggatgtagaggtttctctttttgctctttgactgtggttaatagaggacagtggccaactatccactcaagatagaacaacaaatgttgaaattaaactgc

SEQ ID NO: 705246 - DNA, 911 bp, Homo sapiens
tttctgaaaacaaatttaaccaaggaggtaaaaagtatttacaattaaaaatatatcaatgaaagaaatttaaaaagacgtaaattttaaaatattttgtatctatggattgaaacaataaatatttttgaagtgccatattattcaaagtgatctatagattcagtgaattcccaatgaaaatttcagtgtttttttttcrcagaaatgcaattttaaaatttacatgaaactacaataaactttgactagccaaagcaatcttgaggaaaaagaaagcaaaagaacatcatactttataatgtcaaactatatttcaacactatagtaatacaaacatagtggaatgtgcagaaaaattaacaaaaaaacactactggaacagaaaccactactctcaaacattttagacataatacaaaaagagaatctaaaaagtagtttaacaaagagtttttcaaaattaggcagatacttgtttgtcccccaaaacaatgaaaaagcagtcagattatgcagtatattatatgccatgaagagggttttggctcactgtaagcttgaacaaagatcactgaggggaaagtagaatccttaaaaaatataaaagcataagacagaagatgcctctatgtgagaggatttttttttttttttttggagacgggggtctcgctttgtcacccaggctggagtgcagtggtgcagtcttggttcactgcaacctcggcctcccgggttcaagcgattctccaacctcagcctcccaagtagctgggactacaggtgtgtgccaccacacctggctaattttgtatttttagtagagacagggtttcaccctgttggccaggctggtcttgaactcctgacaggtgatctgcctgcctcggcctctcaaagtgctagga

SEQ ID NO: 705247 - DNA, 911 bp, Homo sapiens
tttctgaaaacaaatttaaccaaggaggtaaaaagtatttacaattaaaaatatatcaatgaaagaaatttaaaaagacgtaaattttaaaatattttgtatctatggattgaaacaataaatatttttgaagtgccatattattcaaagtgatctatagattcagtgaattcccaatgaaaatttcagtgtttttttttcgcagaaatgcaattttaaaatttacatgaaactacaataaactttgactagccaaagcaatcttgaggaaaaagaaagcaaaagaacatcatacttyataatgtcaaactatatttcaacactatagtaatacaaacatagtggaatgtgcagaaaaattaacaaaaaaacactactggaacagaaaccactactctcaaacattttagacataatacaaaaagagaatctaaaaagtagtttaacaaagagtttttcaaaattaggcagatacttgtttgtcccccaaaacaatgaaaaagcagtcagattatgcagtatattatatgccatgaagagggttttggctcactgtaagcttgaacaaagatcactgaggggaaagtagaatccttaaaaaatataaaagcataagacagaagatgcctctatgtgagaggatttttttttttttttttggagacgggggtctcgctttgtcacccaggctggagtgcagtggtgcagtcttggttcactgcaacctcggcctcccgggttcaagcgattctccaacctcagcctcccaagtagctgggactacaggtgtgtgccaccacacctggctaattttgtatttttagtagagacagggtttcaccctgttggccaggctggtcttgaactcctgacaggtgatctgcctgcctcggcctctcaaagtgctagga

SEQ ID NO: 705248 - DNA, 649 bp, Homo sapiens
tttatttatttttttttgaagccactccacaagtcactctatattgcaaattatacataatagtacacctaatcaatatataaatgttatgggttaaacatctacaacaaacaaaataacatttaacatcaagagaaaagaaatgggaaaaaaaggttaatgaaccagtccatgaagagcaacagagacaaaaagaatctcctggtctgggccaggcagtccagtggtcttgcaaggaacacctttgatgtgggtagagcctttcgtggcagatgccagagcctttcatggcagatgccatggagcttatcttttttttttttttttttttaaattgatcattcttgggtgtttctcgcagagggggatttggcagggtcataggacaatagtggagggaaggccagcagataaacaagtgaacaaaggtctctggttttcctaggcagaggaccctgcggccttccgcagtgtttgtgtccctgggtacttgagattagggagtggtgatgactcttaacgagcatgctgccttcaagcatctgtttaacaaagcacatcttgcaccrcccttaatccatttaaccctgagtggacacagcacatgtttcagagagcacagggttaggggtaaggtcatagatcaaca

SEQ ID NO: 705249 - DNA, 1405 bp, Homo sapiens
ccatcagcctgtgagtgaggaaaggtctaggaccctgactgaggacaaaggcggagtggcaaatgagccccatttacccatgagactgtactaagggctttgcaagtgagttgctggctgacattttcgccaatgagagcaaaaatagtttatgccatcagacacccctacatcctagttttgaccagctttttcttttgcagcgtgcatttccccacctgggacctgacagtcctcccacaggtaaagtacacagctaaaaatgtgagccgctgtgacgggcgtagcgtggcttaaaggcctagagctaggcccattcttcactaagttggcccagaagtaccaaaaaccttccaggcacctttctgttttctcctcttttgagttcacagtcccattaggtctagtctctcctagaagcactggttttcctaaccggtacactctatttccacccgctagttagaagtggagatgttgactttggtctcctgcgtctctggaaggtgaccctcgtaattgttctattctcctgaaaggcctgtgtgtttctgatttggtgactgttcaggagacccaaggttgagtcttgggaagagcatcatgaaggccaccgggaggctgggacctggcccctgctgtgcagttcttacctgatttgcttccttctgatgcacaaaggaaggtaaggggagaactgtccagccatggctccctctgagtcagctctccaggcttgtggacttgtggacctcattttcgggacagatatccctctcctgtctttcttggcctctccctcaacactcatctytccaatgttgctccttatccgttaccactatttctctgctacagttcccggtgcctccccaaatctcttttcccctagcaagatggtcgtaagctgaggtacccttcaagggcaaagaactcccagttgggataatgttggtcaccaatttcctctgtctctgtgttagtccatttgcagtgctataaaggaacacctgaggctgggtagtttataaagaaaagaggcttatttgactcatggttctgcaagctgtacacaaaggatggtgccagcatctgtatctggtgagggcatcaggaagcttcctgtcatggcagaaggtgaaggggatgcagcatgccacatggcaagagagggagcaagagagaggaggaggtgccaggctccttttaaacaacaagttcttgggtgaattcatatagtgagaactcactcatcaccaagagaattaggtgatagtgctaagccattcatgtggagtccaccgccatgatccaatcacctcccaccaggccccaactccaaaactggagatcacatctcaacatgagatttggagggacaaacaccgaaaccatatcagtgtcc

SEQ ID NO: 705250 - DNA, 603 bp, Homo sapiens
ctctgctgccttcactaatggccttggagagaatcattcataggtgatttgaagtgatacagtaaccacagataaaccagccatggctgacttgagaggctaagaaacttgtcttcagctttcatgtctgtgaacttggctctgctgctcctcccatttcaaatcatgcagatgaagaaaccacagttcaaacagtgtgacttctccaaggccacaagactagaaggtggcagagctggaatctaaatctagagtttctttctgacctagtgtcactgccactgacaacctggtttaagaaaaccctagaggttagaggaagccctagtttcctaayttgcctttggcctagctgtgtggcttgcctgtcctcatccaaaaagcattttcctaccttattgtccaattttctcaacagtgcaaaccaggagagctactctcaaaagcagctccatccatttgtctttgagctcttaaaaatgccgagtgtcctgtcaggtggtaaacaacaactcaagagcaggctccaggcagagtgcttggtgcatagtaggcactcaatacttaccaggtgttgacttggagaaatggtttgcaaaaagc

SEQ ID NO: 705251 - DNA, 1730 bp, Homo sapiens
tttcttccagaacttctcagcagacagagctagaaaatacagttatgtatactaaccacccccaccacacacacacaaatctgtttaattctgtatctatctacatatctattaaaaagccaagagttcatactgatagatcaattccaatctaacatcacatggttcattctaaccttcctctgtttcttatttgtaacttctttctcaaagaaggagaaagctggctcttattatctaacatgtatttctgtatttgttcaatcttagtatacacagtttctgaacttctaacccatacccctgtgagaaacaaatttactaatagcacacagtatttgtgtaaagttctgtctttagcctcagagtatccaggcaaaatactgttttccagttacttcagttcttttcttctacgtgcccttcagtgtggttacattactcacttgtaacacaggctcatttgtaacttgtaactttttttttagactatggctctgtcgcccaggctggagtgcagtgtggcacagctcactgcaacctccgccacctgygttcaagcgcttctcccgcctcagcctctgaagtagctggaattacaggcacatcaccatgcctggctaattttcatttgtaaatttttgttttccattttggttcccccacatcatggttacttttaattacttatttactttctgagtttgtgagctatcactatagttctgagagaaaactcagaaaagtatgctcagagaaatgtcactctcctccgtattatgctattttcatgcccctttcttcccattcaccctaggtttctcttcagtttcaggtttatctttcttgtattttctctgcacaaataagcaaatacatgaattttttaatatctccttgtttcttatatgaagggtggaatactatagatactcttacttttttttttttttttaacacttaactatatatatgcaggaaatcattccacgttggctcatggagctccttctcattctttgtaaacatttttcaaaagcagtttttttcagaaaaagaatcattagcttaatcagattctccaaggagttgatgcttcccagaaacataaaaaataaaataaaacactgctctaaagtatgtgactgacagtttatctttaaactgcctggctaactgcatatgtgactgacttttttgagaaattaaacagaaaaaagcaaaacactgcagcaccacacagtaccaatgatcaccctctgccatacttgcttcaggtctttcacccgtttaacttttcaatgacagaaaataaacatcacaaatcaggtggaaggtcctgtgcagcccatccttcccccagcacctttcctccctggaagatattgagaggtgacagcgtgctggcagccctcacagccctcgcttgctctcggcacctcctctgcctgggctcccactttggcagcacttgaggagcccttcagcccgccgctgcactgcgggagcccctttctgggctggccaaggtgggagccggctccctcagcttgctgggaggtgtggagggagaggcgtgggtgggaaccagggctgcgggcagtgcttgcgggccagcgcgagttctgggtgggcatgggctcagcgggtgggtgtgggctaggcgggccccatactctggagcagccagctggccccaggcagtgaggggcttagcacctgggccagca

SEQ ID NO: 705252 - DNA, 1730 bp, Homo sapiens
tttcttccagaacttctcagcagacagagctagaaaatacagttatgtatactaaccacccccaccacacacacacaaatctgtttaattctgtatctatctacatatctattaaaaagccaagagttcatactgatagatcaattccaatctaacatcacatggttcattctaaccttcctctgtttcttatttgtaacttctttctcaaagaaggagaaagctggctcttattatctaacatgtatttctgtatttgttcaatcttagtatacacagtttctgaacttctaacccatacccctgtgagaaacaaatttactaatagcacacagtatttgtgtaaagttctgtctttagcctcagagtatccaggcaaaatactgttttccagttacttcagttcttttcttctacgtgcccttcagtgtggttacattactcacttgtaacacaggctcatttgtaacttgtaactttttttttagactatggctctgtcgcccaggctggagtgcagtgtggcacagctcactgcaacctccgccacctgcgttcaagcgcttctcccgcctcagcctctgaagtagctggaattacaggcacatcaccatgcctggctaattttcatttgtaaatttttgttttccattttggttcccccacatcatggttacttttaattacttatttactttctgagtttgtgagctatcactatagttctgagagaaaactcagaaaagtatgctcagagaaatgtcactctcctccgtattatgctattttcatgcccctttcttcccattcaccctaggtttctcttcagtttcaggtttatctttcttgtattttctctgcacaaataagcaaatacatgaattttttaatatctccttgtttcttatatgaagggtggaatactatagatactcttacttttttttttttttttaacactyaactatatatatgcaggaaatcattccacgttggctcatggagctccttctcattctttgtaaacatttttcaaaagcagtttttttcagaaaaagaatcattagcttaatcagattctccaaggagttgatgcttcccagaaacataaaaaataaaataaaacactgctctaaagtatgtgactgacagtttatctttaaactgcctggctaactgcatatgtgactgacttttttgagaaattaaacagaaaaaagcaaaacactgcagcaccacacagtaccaatgatcaccctctgccatacttgcttcaggtctttcacccgtttaacttttcaatgacagaaaataaacatcacaaatcaggtggaaggtcctgtgcagcccatccttcccccagcacctttcctccctggaagatattgagaggtgacagcgtgctggcagccctcacagccctcgcttgctctcggcacctcctctgcctgggctcccactttggcagcacttgaggagcccttcagcccgccgctgcactgcgggagcccctttctgggctggccaaggtgggagccggctccctcagcttgctgggaggtgtggagggagaggcgtgggtgggaaccagggctgcgggcagtgcttgcgggccagcgcgagttctgggtgggcatgggctcagcgggtgggtgtgggctaggcgggccccatactctggagcagccagctggccccaggcagtgaggggcttagcacctgggccagca

SEQ ID NO: 705253 - DNA, 827 bp, Homo sapiens
  misc_feature 812, 813, 815, 819, 821, 823, 826: n = A,T,C or G
gcactccaatctcggactttcaggatccagaactgtgagaaaatacatgtatgttggttaatccatccagtcgatggtgttttgttatggcaacccaagctgaataaggcacattttggtactgagaagtggggcgctgctgtcacaaatactgaaaaaatgtgaaaacagctttggaactgagtcatgagtggaggttagaggagttttgaggtaaaagctagaaaaagtctagattgccacaaataggatgttggcagaaatatgggcattaaagatcattctggtgaagtctccaatggaaatgaggaacacgtattggaaactggagggaaagtgatccttgttataaagtggcaaagaaaggactaaactgtgttctgctgttttgcaagaggtggaacttgcaaacaatgaaattggatatttagctgcggatacgtctgagcaaagcatggaagaagcagctttgttcctcctactgcatgtagtaaaatgcaaggggagaggggtgaattagaaaaagaatgtttaggcaaaagggaaccaaaaattaaagagttggaaaattctcagcctacccattctgagaaaaatgagggagcatgttctgaagagaacgccaaaaatgtggctggactatcatttaataaaatgctyatggaattataggaacagaaagaaacactgccagtttgaactgaaggggaagagacaagacaattgaaggaaggctgtcagacttcttggatttgacggtaaaaaacaatgaggtactcagctgtgaacatgcatttttttttttttttttnngngacngngnctna

SEQ ID NO: 705254 - DNA, 324 bp, Homo sapiens
ccttaggatttcagatgagccattcagctcctcctccccaagttacccaggctggccttcaagcaaacccttcaaggaacaaatgggctatttattcattgagcagaggccttgacttcatagctgtttttctctaatgttcatcctcctgaaagacagctgccatttcaaagagccattgactctttgcttttgcttttctgatgatgatacaatgaaaatcaagcacaatgactttcttcgwcatcttccataaacagtggaaactgtccccccgcccaacctttctattgcaggtgcctggcctatggtaagtgcactcag

SEQ ID NO: 705255 - DNA, 1523 bp, Homo sapiens
cagcctgactgagcacaaagtatagtgtccttgagtaggagcctactgctgggaagaaaatgtcatgaaatagagaggctggtttgtgtttaaatgaatgccaagataaattagaaacatgacaccatccacctaaggcatataatctttatatggttaacacagagatcctaactcaatgctgtaaacataatttatgcacctgagctgattatactttcgaacactgctgggaaggatggaagctgtgaatctcatagttgttgtcttcagaggagtaatctgcacaccatgacttcaatatttctgcgatccaaaatgccaacagagccatgttgaggaaaacctctgttgagtttgttatataacaaataaattttgcagggaggaaagtagacagatgtctctagaccctagttactgccctgggagggaatgcaggcttccctgacatcttacagagagggaccctggtcaatccggtgcaataggagggtattgtgttgcctggatagaaggagagatgcaaagagaaaaacgaaatttaaaaagagggttaaaggacataattttctccagggtttgacttggtaagaagttccatagggtcagcacaggtcaggtagctgtgaatatttccttggccatggctgtaagatgactcttcaaatactatagttcatgtaagacccatcagagtaaaaccatgactattaaaatgaggggaaagaacrgcataagtgaggaagaatttaaaaggaaagaacaggtacagcactgcccagggtcagactatttcctcagagcagacaaagaaacttatgcaaaatttatgacggacttagatctaggacagtgcatgctttgaaactccaatctatttaaatgatgataaatgtcacagctgtcctcctttatggaatgatttgcccagtagaagagaaagatttcaaactgtcttttccaaagaggggataaaaatcacttaaaactggtcattcagactgtctcatgagtcttttgagctgcaggaagttatattcctttaaagagaacctacaaataaatgattatataactataaattaatggtccatttagtcctggttttggttataattaaaataggatattctcttgttatgccaaccacaaaagtttagtggtaaactctctatttcttttttcaataacccatcatttagttgtccctttgttgttttagtaaaatgacttggaacccagcagtcataccttattctatttcatatggtactgaaattcgcaacttgtgtaaagaaatacagtgcttcaattttctggacactctcaagaatgaagattcacacccctaggatctagtgagcagctagatatttcacccttctacaaagttcaatattgtatttttgcccacttgagcttcctcctttagaccgactgctgttggggtgaaggcaaaacaaagaagcacgtctgaaagatacctcaggaagtgtttttccctgttcaactgtggctat

SEQ ID NO: 705256 - DNA, 937 bp, Homo sapiens
gattcaaaggatacatgtgcagatttgtttcatgggtgtattgcatgatgctgacatttggggtatgaatgaccccatcacccaggtagggaacatagtacccaacagtttttcagcctttgtcccatctccttctcccggtagtcccgagtgtctattgctgccatctttatgtccatgagtattcaatgttcagctcccacccataagtaagaacatgtggkatttggttttctgtctctgtattaattcacttaggataatgacctccagctgcatccacgttcctgcaaaggacatgattttgttctttttttgtggctgcgactctgtcctttttgagacagcagccactccttggttatggagttggggactgagatacttggaaataattgatgcctttggcagagatggaacactggaacctgttcttttttggttccagcatctatcatgttatttttattatttttttttttaaggaaaacctaagtcttaggtctgggggttcaggtaggatacataccacttctgtactccagggactagcacatgaccaatcagagcactccatcccttagtgattggttcagagaagagcatgcgacccaaccccagtgagttcagacctaggtttagtccagggtctagttcaggtttgaagatggacaagagtaaatcctttgaactttagtggcttttgctttttgtttcacaactaaagcagctaataagcaatataaagggataaagaggaaaacctggaggtggtgaagcctgcaggtggatcccacttcctcctcatcatctcattgaggcacatgtggccatttggtggcctcagtagactgagatgtttgccgtgtcaaagttgagaagaacagacttgctgtcttttatagtctaccaagtcagcagtcaggatcaggattta

SEQ ID NO: 705257 - DNA, 937 bp, Homo sapiens
gattcaaaggatacatgtgcagatttgtttcatgggtgtattgcatgatgctgacatttggggtatgaatgaccccatcacccaggtagggaacatagtacccaacagtttttcagcctttgtcccatctccttctcccggtagtcccgagtgtctattgctgccatctttatgtccatgagtattcaatgttcagctcccacccataagtaagaacatgtggtatttggktttctgtctctgtattaattcacttaggataatgacctccagctgcatccacgttcctgcaaaggacatgattttgttctttttttgtggctgcgactctgtcctttttgagacagcagccactccttggttatggagttggggactgagatacttggaaataattgatgcctttggcagagatggaacactggaacctgttcttttttggttccagcatctatcatgttatttttattatttttttttttaaggaaaacctaagtcttaggtctgggggttcaggtaggatacataccacttctgtactccagggactagcacatgaccaatcagagcactccatcccttagtgattggttcagagaagagcatgcgacccaaccccagtgagttcagacctaggtttagtccagggtctagttcaggtttgaagatggacaagagtaaatcctttgaactttagtggcttttgctttttgtttcacaactaaagcagctaataagcaatataaagggataaagaggaaaacctggaggtggtgaagcctgcaggtggatcccacttcctcctcatcatctcattgaggcacatgtggccatttggtggcctcagtagactgagatgtttgccgtgtcaaagttgagaagaacagacttgctgtcttttatagtctaccaagtcagcagtcaggatcaggattta

SEQ ID NO: 705258 - DNA, 1133 bp, Homo sapiens
ttttttttttttttttgattaccttttctgatcactgaagttgtgtgcatgttgggattgaagagttgggcagactgttcattgcctgccttatatccattgccctttcccctttgtaagaggatccaggttttgttcagagcagcactgagcccagacccaggctatggattataatcggtcaaagttctgttatctaatttccaagctttccttgcatctgagatggtatatgacccagctctgtccaaaaggtctgttgcaaaatgttctgggaaaaaaaaatttattgtcctggaaaaagggacagatgcagcactttccccttccatttttttcctgtcttgaatttggatgtgatggctggaactgcagcaactgttttgtcaaaatattggtcaagatgtggctgagctgccgaacctgaacatgaagctgaccacttctggaattcttattatgtaagaaaggactattaaattaaagcatatagtgaggcattcttattacttggagctgaatgtattactaatgggtaaaatgatgtttctaaagatttccctcaaaggcaaaataaaatcccaatattcatagtttttttgttttttttttactcaccccatcccctttacccccaaagagtttaagaccttctattctatgtcaggataaaaattgctacacccatttaaaagacgataatgcagaggattgagcagggatttgctattcaaaatttcaaagcagagccmagagccttggtgtacacactgtggcttccattcaaagactacatgctgtctctcattggcttaacacaccattcatattccttagaaggctgaaagggccatattgatgctgccagaacctcagacagtggttccagggagtctagagggttgaaacccagcacttaaggctcgcatgctgtttttctggcttggaaatttatgccacagctttgaaattctggaatttgttgagcagtgatttgtgactgcacgttaagaggtgcttatgcggtaatgttgcctgcgtctttatgaaggtggtggatgctgctctgagccttccaaactgctaatattctggatattatctgtgtccacacagccatcaatgctcaagca

SEQ ID NO: 705259 - DNA, 591 bp, Homo sapiens
ttttttggcaagagcctattccaagagaacatcaaaggaggaagacaggaaaacagtagattactgttaaggctctcagctttaagtgctttaactattaatctcactgctcaggcaggcaaagagtagaagagggaatataaatacattagaataaataatgagaaatgaacatatagctttaaagtaattatttacttcattgaaggattcaacaagattcaaagatttcagaaaatgatctcacttgcaactataacagggtccatactgggcaatacggaaagtattttagatttctcagttgaaaaaaaaaaagaaaaaaaaaagacttatcagttgaaagcttccaaagagctctaatctttaagacagagtcaatagaaagcaaggcagcaatggactgcagtaataaggatgagattagtctatgcgtaggtttgtcttgtcttgtgtttgaatgctcttaccagcaaaaagaaaaaaaaatggagatagtggttatatgagcctaactcacactgtataaagactaccattaattgcatayatatgacatacctgtaacacctgataattatcaccactaaa

SEQ ID NO: 705260 - DNA, 675 bp, Homo sapiens
aggcaactacctcttatttattatctgtctcatatcaagaggttttaaggtaacatttttgtaaacctcttgctacatcaatgaatctgtaggctaccttagagcggaaattgtttgagtctcagatctgcaatttgctacctaggaccctaaagcaagtacttaaattttttgtttgtttgctttgttgtgatgtttaatctctaaaatgaggacaatattaaataatrctactatctatccaaactatgacacaggattgctacatatgactcatgaaactttgccattgaaaacactttgtaaatattgatcatatacacatatttaaggtatgttaatttttattgttttctgtctgccaaaatgctagtacaatggtaactgaagaggaattactgtaaagtcatatattaagttggtgcaaaagtaatcgtggtttttgccattgaaagttacttaataacggaattaaagtaattctagttggtgtctttgatatactaacagacacccataaaattatagctctcattagcattagggtttattttattaaaaggatgaaaggagtattagccattattaaaaattcactgaagcattcatgataatatggtacacttccactggttttatgttgtagtgtaggcattcaggtttctattactccaa

SEQ ID NO: 705261 - DNA, 625 bp, Homo sapiens
agcaagactccgtctcaaaaaaaaaaaaaaaaagttacatactaatattatatccattttacagatcatggaaccaaagcacaaagacgctaagcaggtcataaagtaagaagtggcagagtcagggtttggaaaccagacagtttcactccagagttcctactctgaaccactaagctatcctgcctgaacatggtggtgggggatatacaggatataatgagaaatgccgatgcactgaagtcatagacacctattcaaatcctgtctctgcccattgtggggcagacactggttgtgtggcttcagcaatatatttaatttctctgaaattaattttctaagatrtagaatagtgacagcagtacttacattcaaaagcttattgtacataaataatgcacataaagcatctaccatgagggtaaagcatgcttcatatgtttaagtgtatgagtgggtggaaatgaggaagatatttttgtgcaatgggattttgcacaaccattcagctgcccttctcagtctgtgtatagagcggccaatgtggaacacttgcagcagcagtgtcagataggtcagcccagtgttgtcagtcagaattgggagaatgttaagagcaatg

SEQ ID NO: 705262 - DNA, 625 bp, Homo sapiens
agcaagactccgtctcaaaaaaaaaaaaaaaaagttacatactaatattatatccattttacagatcatggaaccaaagcacaaagacgctaagcaggtcataaagtaagaagtggcagagtcagggtttggaaaccagacagtttcactccagagttcctactctgaaccactaagctatcctgcctgaacatggtggtgggggatatacaggatataatgagaaatgccgatgcactgaagtcatagacacctattcaaatcctgtctctgcccattgtggggcagacactggttgtgtggcttcagcaatatatttaatttctctgaaattaattttctaagatgtagaatagtgacagcagtacttacattcaaaagcttattgtacataaataatgcacataaagcatctaccatgagggtaaagcatgcttcatatgtttaagtgtatgastgggtggaaatgaggaagatatttttgtgcaatgggattttgcacaaccattcagctgcccttctcagtctgtgtatagagcggccaatgtggaacacttgcagcagcagtgtcagataggtcagcccagtgttgtcagtcagaattgggagaatgttaagagcaatg

SEQ ID NO: 705263 - DNA, 1538 bp, Homo sapiens
acacacacacacacacacacacacacgcacaagcacacgtagcggaagactggaggtgggcaaaaaaggttacagtattcaaaaagaacaataaggtggatttttactgacatataatctttactgtgaatgggtagggccttagaaaaagacaaaaggatgattatatcctagtagttactagagctcataaagaggttggttaataatacaatttcaaytccttctttcataaggttactttacagagcaaggaaacgttgtgtgaaagttaaccagacttggtcaggcgcagtggctcatgcctgtaatcccagcactttgggaggccgaggcgggcggatcacgaggtcaggagatcaagaccattctggctaacacggtgaaaccccgtctctactaaaaaatacaaaaaattagctgggtctggtggcaggcgcctgtagtcccagctactcgggaggctgaggcaggagaatggtgtgaacccaggaggcagagcttgcagtgagcggagatcgcgccactgcactgcagcctggggacaaagcgagactcaaaaaaaaaaaaaaacaaaaaaaaacaaaaaagaagagaaaagttatccagactcaacaataaaaaatcaattattagaaaaactaaataaatataagaaaatagcaaagtaaattaacaggtaagacatggagtgctaaaaatgattattaatattgtacatcagcatgagatttttgcaggcaagacagaaatatatgctaatacaactaaatatattagatagaaaaggaccaatctagaaagaggtgttttcttaacgcactgttgggttcctaattcctgaatgattcgaaatttttgttagaaatttgaagacctagaagttgtatttacccaatctataagcaactcaaagctaggtaaaaatcggcaatacgttacatgacagaattgggatctggacaaatgggaatgagaggttaaatttaattggtatagaagtatggcctcttacatttaattcccaaaacataactgtacaaatatggcatataagaaatgcaacaccatatatgcaaagacaaaagttcagtttactcaaagctaaaaaatgcattaatttggtgttaattagcatgactgatgtaagtgccttccctcactcccaaagcatgtgtgttctcaggcagtagggccaggaacgtaatatctaacaaagggaggtaacagatctattttactttgccttggacatacacacctattatgtaacaggctcatctgtaaaataaagatacaaaaacagtacacatcttattaaatgtgtaaatacatgtaaaccctttgaacttaccttgacacacagtaaatgacaaatacattttagctatttttactgttctttaagaatatttgcagatccattctgcagagaatagccttctcccaccccagatgaggaagacctcaaaccatttcagatatggaaggtttaataagatttttaaaacaagaggaaaagagaatcagtatatgat

SEQ ID NO: 705264 - DNA, 850 bp, Homo sapiens
tacacgtacagtatttatttattttacatggagtctcactctgttgctcaagatgaagtgcaatggcacgatctcggctcactgcaacctccgcctcccaggttcaagccattctcctgcctcaggctcccgagtagctgggattacaggcgcccgccaccatgccccgctaatttcttgtatttttagtagagacggggttttgcaatgttggccaggctggtcttgaactcctaacttcaggtgatccacctgcctcagcctcccaaagtgctaggattacaggcgtgtgagccaccacgcccggccagtattaatcttttctttcccccttaaaccatgcaatctcaaatgggattaccacctccatctgtcctcattttccacctccccaggagtttaagattagtgcctgacagatctatgttagtgtatgaagatacaatgyatgtaaagttttcacaagtccctgataaaattcacctggaatgcttgtcggacatataggttcttccactccacccacccctctcctgattgtgatttgggaggactggggtgaggcctgggacataaaatccatacaaactcttcaggtgatccttgagattaggcaatggctccgccacattagagcctcgattatttaccactgactatcccacgtgttgataaacaatgtttcttatcagcaatcaggtggattcgaggcacccatctaaccaagtcagaaattggaaggaatgaagttttgaacaaaagaggaggaaaattttcaaagccaaatgcacatcagattcttaaacaggtgaggaatttctctcttctctctcaaattagaaatgaatta

SEQ ID NO: 705265 - DNA, 1046 bp, Homo sapiens
atttttctttctctctctcttttttttttaagacggtgtctagctctgacgcccaggctcgagcgattctcctgcctcagcctcccgagtagctgggattacagttgcccgccactatgcccagctaatttttgtatttttagtagagacagggtttcactgtgttggcccggctggtctcaaactcctgacctcgtgatccgcccatctcggcctcccaaagtgctgggattacaagcattagccactgcacccagcctctttttttaagagaaaaaaaaattacactccggtaaatttctggggactttcaaaatcaaatgtaggtagaagtcttatgtaaagtaagagtatgccgtatgccagctctgagtaagggtctgtggggctgtcagaagttcatgagtatccaacagatttaaccaccttaaaatgtttccttacgttttttttttagcttatattattggtcctgtttaaaacttattacagatatttgtgtgaatgaagtatcatttcatctttttagaaacttgtatcagaggtacctaggctaatttatcaccaaatttttcatcttgcctgatgagcatttccagtcctgatacagctcctcagtgaccaaataccmggggagtctcccctggacttttttggcttttgtttttccaatgagtcataaaggcttagtcattttccattaactttaggagttttaactgcatatagtaaaactatgaatgacttataaggatatctttccctcttcaccgcttccccatcagcaacaaattctgttttgtttattgactatggaggagtccatgattgactttaagtattatattcactaatttttgagtagcatcttcccaccaaatactttgaaaatattaggtttttcttttatattatgaaggtctgtgtaaatatcgaatacaagagttgacaaatactgtgaaagactctttttgtctagatgggagtcctgacgtagaagaaagagaaagataggggctcacttaatggtccacgttcttcccatc

SEQ ID NO: 705266 - DNA, 1046 bp, Homo sapiens
atttttctttctctctctcttttttttttaagacggtgtctagctctgacgcccaggctcgagcgattctcctgcctcagcctcccgagtagctgggattacagttgcccgccactatgcccagctaatttttgtatttttagtagagacagggtttcactgtgttggcccggctggtctcaaactcctgacctcgtgatccgcccatctcggcctcccaaagtgctgggattacaagcattagccactgcacccagcctctttttttaagagaaaaaaaaattacactccggtaaatttctggggactttcaaaatcaaatgtaggtagaagtcttatgtaaagtaagagtatgccgtatgccagctctgagtaagggtctgtggggctgtcagaagttcatgagtatccaacagatttaaccaccttaaaatgtttccttacgttttttttttagcttatattattggtcctgtttaaaacttattacagatatttgtgtgaatgaagtatcatttcatctttttagaaacttgtatcagaggtacctaggctaatttatcaccaaatttttcatcttgcctgatgagcatttccagtcctgatacagctcctcagtgaccaaataccaggggagtctcccctggacttttttggcttttgtttttccaatgagtcataaaggcttagtcattttccattaactttaggagttttaactgcatatagtaaaactatgaatgacttataaggatatctttccctcttcaccgcttccccatcagcaacaaattctgttttgtttattgactatggaggagtccwtgattgactttaagtattatattcactaatttttgagtagcatcttcccaccaaatactttgaaaatattaggtttttcttttatattatgaaggtctgtgtaaatatcgaatacaagagttgacaaatactgtgaaagactctttttgtctagatgggagtcctgacgtagaagaaagagaaagataggggctcacttaatggtccacgttcttcccatc

SEQ ID NO: 705267 - DNA, 555 bp, Homo sapiens
ctgcattttgctgtaactatttacacctactgaccacccacccaccccaccccacatagaagacatgtgttaccttgtttaaaacctctgccatccttttctggtaatgggattcatgctattgggatattcctcctcctctgactccacaggctgctggtggagctgctactcacccaggaattacagtggagcaaatgaccttatgtcctggaacattttaccttgctacaagaattgtgggatatatccaggagcagtagctcacacctgtaatcccagcactttaggaggccaagacgggcagattacttgagcctmggaattcaagaccatcctgggcaacgtggggaaaacccatctctactaaaaaatacaaaaaattaaccaaacatggtggcaagcatctttagtcccagcgactcaggaggctaaggtgggaggatcgcttgaggaggaggcagaggttcaggaggcagacgttgcagtgagctgagattgcaccactgcactccagcctaggcaacaaagtgagactgtgcctcaaaagaaaaa

SEQ ID NO: 705268 - DNA, 1127 bp, Homo sapiens
tgcctcccaaaattgtacctaggaatgaacaaggacagcttggaggtttagaagcaagatggaaatggttaggtcagatctctttcactatcccagacataattttgcaacrgcgatttcatgagcagtcccataattgtgctccctagtaccagtctggctgcctccaccctgctagtgtgatgttctggtctttttttttttttttttgtctgttttgagacaggttctcgctctgttgcccaggctggagtgcagtggttggatctcggctcactacaacctccgcctcccaagttcaagcgattctcctcagcctcccaatagctgggattacaggtgcgcaccaccacgcccagctaatttttgtatttttagtagagatgggctttcaccatgttggtcaggctggtctcaaactcctgatctcaggtgatccacctgcctcggcctcccaaagtgccagaattataggcataagccactgtccccagcctgtttttttgggctttgacacagggtctcactctgtcacttaggctagagtgcagtggcacgatcacagctcactgcagccttgacctcttgggctcaagcaatcatcccacccctcagcctcctaagtagctgagactacaggcatgcaccaccacacccagctaatttttgtatattttgtagaggcaaggttttgccatgttgcccaggctggtcttcagctcctggcttaagtggtccacccaccctggcctctcaaaattctaggattacaggtgtgagccaccactgcacccagccacgtgatgttctaaacacaaatcagaaccctggctccgcatccaccatatacgaagtccatggtctttagaatggcccattgaggccatttcttgcctcccccaggccaacttggggcccctctctcagaccttcacgtatgtcccctgcactggggattgcacagcattttaattctttgcttgcaaaattatctccctcaaggccgggcacagtggctcatgtctgtaatcccagcactttgggaggccgaggcaggaagatcacttgaggccgggagttcaagacaagcctgggcaacatggtgaaaccctgtgactactaaaaaa

SEQ ID NO: 705269 - DNA, 368 bp, Homo sapiens
ttttttagacggagtcttgctgtgttgcccaggctacaatgcagtggcacgatctcagctcactacaacctccatctcctgggttcaagcaattctctgcctcagcctcctgagtagytgggattacaggcgtgcaccaccacatccagctaattttttttgtatttttagtagagacagagtttcaccatcttggtcaggctggtcttgaactcctgacctcgtgatccacccacctcggcctcccaaagtgctgggtttactggcgtgaaccaccacgcctggccgaaactttcatctcttaacttttgatttctaaacgtgtaatctcactaatttgggaagcagaggtgggaggactacatgag

SEQ ID NO: 705270 - DNA, 368 bp, Homo sapiens
ttttttagacggagtcttgctgtgttgcccaggctacaatgcagtggcacgatctcagctcactacaacctccatctcctgggttcaagcaattctctgcctcagcctcctgagtagttgggattacaggcgtgcaccaccacatccagctaattttttttgtatttttagtagagacagagtttcaccatcttggtcaggctggtcttgaactcctgacctcgtgatccacccacctcggcctcccaaagtgctgggtttactggygtgaaccaccacgcctggccgaaactttcatctcttaacttttgatttctaaacgtgtaatctcactaatttgggaagcagaggtgggaggactacatgag

SEQ ID NO: 705271 - DNA, 581 bp, Homo sapiens
ccaaagtatctaatataataataatttttgtccatcttgctctatattgataactttatttctctgtgatatatatttattatattaattttaatcatccatatctcataggtttttaaattcaattactatatttttatttttggatatcctttgccaaatctgctcttcatttctttttaaatgtctttagtgtttatgtatgttcattagatattattaattttataatttttttcaaattattcatctatttttacacatacttttaattctgctgttttacatctgctgactcttattgctgkttttttttttttttttttgagacagagtctcactttgttgcccaagctgggttgcaatggtgcaatatcagcttgctgcaacttccgcctcccaggttcaagcaattctcctatttcagcctcccaaatatctgggattataggcgcctgccaccatgcctggctaattttttgtatttttagtagagacggggttttgccatgttggcctggctggtcttgaactcctgacctcaggtgatccacccgcctcagcctccgaaattgctggga

SEQ ID NO: 705272 - DNA, 581 bp, Homo sapiens
ccaaagtatctaatataataataatttttgtccatcttgctctatattgataactttatttctctgtgatatatatttattatattaattttaatcatccatatctcataggtttttaaattcaattactatatttttatttttggatatcctttgccaaatctgctcttcatttctttttaaatgtctttagtgtttatgtatgttcattagatattattaattttataatttttttcaaattattcatctatttttacacatacttttaattctgctgttttacatctgctgactcttattgctggttttttttttttttttttgagacagagtctcactttgttgcccaagctgggttgcaatggtgcaatatcagcttgctgcaacttccgcctcccaggttcaagcaattctcctatttcagcctcccaaatatctgggattataggcgcctgccaccatgcctggctaattttttgtatttttagtagagacggggttttgccatgttggcctggctggtcttgaactcctgacctcaggtgatccacccgcctcagcctccgaaattgytggga

SEQ ID NO: 705273 - DNA, 608 bp, Homo sapiens
gaagcaatttagcaaaataacattaagattgcttggttaaataaataaatatagattgatatataacagtgtcataaatctgtgaggttatctgttctactaaggagatatatttgtatctttacaggaaaaaaaagttcatggtgcaaaatccctttactaaatctggtacctttaattattattgtatagcacttaagtataggaacttgaatatagccaatatattcctaaagatctaaattactctccaaataaaatgctttttgtacataattttttctattcccattaattatctttcacagttttattttgttttgattttttcatktgttccttccccctccccttggcattcagttaattcttctattttctttcccaaacaggcacattatcattaaatgtaatggttggctgaatcataaccacatttaaatattgctctgttttgccatttgtttttcttccttctttctttcctttcttcgttcttgcttttcttggcaagcttatgaagttttatttgtgtaattgctacacaaagaaacttcattgtgtttgtatttgcccttcaattggatcataaatgccttggtggcaat

SEQ ID NO: 705274 - DNA, 612 bp, Homo sapiens
agatcccattgagttggttgtcttcctgcctgccctgtgttgtaaactgggggttccttactgcattatctaatggaaggcaagcttgagacatctaggattaaaaaacaaacaaacaaacaacaactcttaaaaatattcttttaaaacttctaattattaggtwtttttttatctcttcagtacattaaaatgtctggtggtaggaaaatactggactcatatatgactgtctacatgatttgcagggcccagcgcaaaatgaagtggatgttgtacctcgttcaaagtgttaagcgtttcaagatggcaacaggagagcattaggccaagtatgaggtcattatgtacatgggtccttgtgtgaccacacaggtcacaggaacatgaagctagacctgagtgtatattcagataggtaaatcttacagatttttaaaactcaataaaagaaaaactacatttcatgtgtgaacacaaaaattggaattaaattggcaatagcattgggatttgtgctcagagtcacagtttacatctgaccacaatttctatatgaattttttaagataaaacagtaagaattttaaagaaggtttctgaaatttaaaa

SEQ ID NO: 705275 - DNA, 612 bp, Homo sapiens
agatcccattgagttggttgtcttcctgcctgccctgtgttgtaaactgggggttccttactgcattatctaatggaaggcaagcttgagacatctaggattaaaaaacaaacaaacaaacaacaactcttaaaaatattcttttaaaacttctaattattaggtttttttttatctcttcagtacattaaaatgtctggtggtaggaaaatactggactcatatatgactgtctacatgatttgcagggcccagygcaaaatgaagtggatgttgtacctcgttcaaagtgttaagcgtttcaagatggcaacaggagagcattaggccaagtatgaggtcattatgtacatgggtccttgtgtgaccacacaggtcacaggaacatgaagctagacctgagtgtatattcagataggtaaatcttacagatttttaaaactcaataaaagaaaaactacatttcatgtgtgaacacaaaaattggaattaaattggcaatagcattgggatttgtgctcagagtcacagtttacatctgaccacaatttctatatgaattttttaagataaaacagtaagaattttaaagaaggtttctgaaatttaaaa

SEQ ID NO: 705276 - DNA, 612 bp, Homo sapiens
agatcccattgagttggttgtcttcctgcctgccctgtgttgtaaactgggggttccttactgcattatctaatggaaggcaagcttgagacatctaggattaaaaaacaaacaaacaaacaacaactcttaaaaatattcttttaaaacttctaattattaggtttttttttatctcttcagtacattaaaatgtctggtggtaggaaaatactggactcatatatgactgtctacatgatttgcagggcccagcgcaaaatgaagtggatgttgtacctcgttcaaagtgttaagcgtttcaagatggcaacagsagagcattaggccaagtatgaggtcattatgtacatgggtccttgtgtgaccacacaggtcacaggaacatgaagctagacctgagtgtatattcagataggtaaatcttacagatttttaaaactcaataaaagaaaaactacatttcatgtgtgaacacaaaaattggaattaaattggcaatagcattgggatttgtgctcagagtcacagtttacatctgaccacaatttctatatgaattttttaagataaaacagtaagaattttaaagaaggtttctgaaatttaaaa

SEQ ID NO: 705277 - DNA, 612 bp, Homo sapiens
agatcccattgagttggttgtcttcctgcctgccctgtgttgtaaactgggggttccttactgcattatctaatggaaggcaagcttgagacatctaggattaaaaaacaaacaaacaaacaacaactcttaaaaatattcttttaaaacttctaattattaggtttttttttatctcttcagtacattaaaatgtctggtggtaggaaaatactggactcatatatgactgtctacatgatttgcagggcccagcgcaaaatgaagtggatgttgtacctcgttcaaagtgttaagcgtttcaagatggcaacaggagagcattaggccaagtatgaggtcattatgtacatgggtccttgtgtgaccacacaggtcacaggaacatgaagctagacytgagtgtatattcagataggtaaatcttacagatttttaaaactcaataaaagaaaaactacatttcatgtgtgaacacaaaaattggaattaaattggcaatagcattgggatttgtgctcagagtcacagtttacatctgaccacaatttctatatgaattttttaagataaaacagtaagaattttaaagaaggtttctgaaatttaaaa

SEQ ID NO: 705278 - DNA, 629 bp, Homo sapiens
tcattaatttaaaatgcaaatattttggactaaatgtttgtgtccctcccaccccaaatttaaattttgaagccctaatccccagtattatggttttggagatgtgggcctttggaggtcaaaaggttgagatgaaaccatgaggatggagtcctcatgatggaattagtgaatttattataaaagacacagaagagcactttcttgtayacttcctttgtctctgtctctctgtgtgtttctctatctctcttccctttgggaacacaacaaaaggtatctgtgtgacaagcatgaagaataccctcagcagaaactgactatgtgtatgctgatcgtgtacttcttagcctccaaactatgcggaaaaaattttgttgtacaagacaccaagtttattgcattttgttacggcagcctgagcagtctaacaagaaagcaataaaaagtataagtaattaagatgaaactaaatttatcatccaaattctcaccataaagaaataaccattttcaaaatatgtagaacaagattttacatattttcctaaagtttatagacagagataattgataaagattttatacaaactgactattaagaaatgattgtatttaattataacaga

SEQ ID NO: 705279 - DNA, 629 bp, Homo sapiens
tcattaatttaaaatgcaaatattttggactaaatgtttgtgtccctcccaccccaaatttaaattttgaagccctaatccccagtattatggttttggagatgtgggcctttggaggtcaaaaggttgagatgaaaccatgaggatggagtcctcatgatggaattagtgaatttattataaaagacacagaagagcactttcttgtatacttcctttgtctctgtctctctgtgtgtttctctatctctcttccctttgggaacacaacaaaaggtatctgtgtgacaagcatgaagaataccctcagcagaaactgactatgtgtatgctgatcgtgtacttcttagcctccaaactatgcggaaamaattttgttgtacaagacaccaagtttattgcattttgttacggcagcctgagcagtctaacaagaaagcaataaaaagtataagtaattaagatgaaactaaatttatcatccaaattctcaccataaagaaataaccattttcaaaatatgtagaacaagattttacatattttcctaaagtttatagacagagataattgataaagattttatacaaactgactattaagaaatgattgtatttaattataacaga

SEQ ID NO: 705280 - DNA, 629 bp, Homo sapiens
tcattaatttaaaatgcaaatattttggactaaatgtttgtgtccctcccaccccaaatttaaattttgaagccctaatccccagtattatggttttggagatgtgggcctttggaggtcaaaaggttgagatgaaaccatgaggatggagtcctcatgatggaattagtgaatttattataaaagacacagaagagcactttcttgtatacttcctttgtctctgtctctctgtgtgtttctctatctctcttccctttgggaacacaacaaaaggtatctgtgtgacaagcatgaagaataccctcagcagaaactgactatgtgtatgctgatcgtgtacttcttagcctccaaactatgcggaaaaaattttgttgtayaagacaccaagtttattgcattttgttacggcagcctgagcagtctaacaagaaagcaataaaaagtataagtaattaagatgaaactaaatttatcatccaaattctcaccataaagaaataaccattttcaaaatatgtagaacaagattttacatattttcctaaagtttatagacagagataattgataaagattttatacaaactgactattaagaaatgattgtatttaattataacaga

SEQ ID NO: 705281 - DNA, 629 bp, Homo sapiens
tcattaatttaaaatgcaaatattttggactaaatgtttgtgtccctcccaccccaaatttaaattttgaagccctaatccccagtattatggttttggagatgtgggcctttggaggtcaaaaggttgagatgaaaccatgaggatggagtcctcatgatggaattagtgaatttattataaaagacacagaagagcactttcttgtatacttcctttgtctctgtctctctgtgtgtttctctatctctcttccctttgggaacacaacaaaaggtatctgtgtgacaagcatgaagaataccctcagcagaaactgactatgtgtatgctgatcgtgtacttcttagcctccaaactatgcggaaaaaattttgttgtacaagacaccaagtttattgcattttgttacggcagcctgagcagtctaacaagaaagcaataaawagtataagtaattaagatgaaactaaatttatcatccaaattctcaccataaagaaataaccattttcaaaatatgtagaacaagattttacatattttcctaaagtttatagacagagataattgataaagattttatacaaactgactattaagaaatgattgtatttaattataacaga

SEQ ID NO: 705282 - DNA, 629 bp, Homo sapiens
tcattaatttaaaatgcaaatattttggactaaatgtttgtgtccctcccaccccaaatttaaattttgaagccctaatccccagtattatggttttggagatgtgggcctttggaggtcaaaaggttgagatgaaaccatgaggatggagtcctcatgatggaattagtgaatttattataaaagacacagaagagcactttcttgtatacttcctttgtctctgtctctctgtgtgtttctctatctctcttccctttgggaacacaacaaaaggtatctgtgtgacaagcatgaagaataccctcagcagaaactgactatgtgtatgctgatcgtgtacttcttagcctccaaactatgcggaaaaaattttgttgtacaagacaccaagtttattgcattttgttacggcagcctgagcagtctaacaagaaagcaataaaaagtataagtaatkaagatgaaactaaatttatcatccaaattctcaccataaagaaataaccattttcaaaatatgtagaacaagattttacatattttcctaaagtttatagacagagataattgataaagattttatacaaactgactattaagaaatgattgtatttaattataacaga

SEQ ID NO: 705283 - DNA, 1521 bp, Homo sapiens
  misc_feature 1342: n = A,T,C or G
tgtctgagtaattgatggccgtcccactcaatgctccaccagtacctgtgtgtcaaatcagaactgattgtagctgaaagatattttagtcaccctgtctaatcctttaaatgcagcagaatcactctctgtactgccacactcctattagaatttcattttatttaatctggaactttttgaatagcagctctttataggcatccgtaaaagagccctctactcctcatgactatttctttagaacaagatgcaacagtccctgytaggctgtttgttccctctgtctgcactatactctcttctgaagaccagtagttccccaaagataaaatcatgacctaagctcacacacccagaagtcttatgttccaggccttgccaggtgccccgtccatcacagcttttctctgaagagttacctccaccctgccatgcattcgttaagatagtggttctcaaactttgtatgcattggaattaccttagacttgttaaaacccagacagctggagcccacctctggcatttctgactcagtaatttaggataggaccaaataatgtgcatgtccaacaagttcccaggtgatgcttataatggtgctgattccagaactacattccgagaaacaatgagttaagcatgtcataagcaacagcttattagtattaaagagctattgtgtgatagtggtttacttagctgaataaattagaatgaaattgaagttgcccacaaaatgtactttgcacactcattcaagtgtacattgtacattagtaaagacgggagttattacggcagtgtgcttgcaactcttataggcacacagctttaagctatattcttttttttttttttttttgagacaatcttgctctgtcgcccaggctggatatattctatatgactgtgcactttgtcttacctgcaggccatcctgacttgctaaccattggcatttgtaggctattacgtgtgagatcccaggattccttgtctctaagcataaattcaagggactaaggttttcctatgaagtagactcaagctgtaggccatagggcatacttcaagaattatcgtaaagggtatccagcttgctctttcttctttagaaaacgataacaaaggcaaaaaacaaaatctatgctgttcagcaagtcacccggcagctgtaggatgtaggggaagcagaatcataagaattaaaaaatctcacatggcagtaagttgtagaggattttcacacagcccaaactttaccttaagcaagttacaatgtctgagttacaacgattgcctaaagtcaggtttatggtttgtgtttatatgttgntgggtatgcaatacaatataataattcttcaaggttataatgtcatcaagaagctgtagattgagagtagtattcatacgtacaaacgaataagtatttcataggtaagtccaaagtaattgaacattatgtctaaagtaaaatttgaagagacacatttgaagataattcagtctgat

SEQ ID NO: 705284 - DNA, 1401 bp, Homo sapiens
gggaacatacagataagtttttaactgtgatgaaaatacctggactcaatcattgttccctcttgaaaacattaatttttcaacctaaatcaaagataaagctaaatgtgctaggtaggtagtctgcctataacactctgtkctttttgatactgtccaattaaaaactacaattatcccttttcatatatcccaggttatactgtgggatatttccagaaagggaaaagtcgagctcatgagagattgtcaagagatgcagaaatattcaaaacattattccctgaatgcatgctcatgctccctcaaggttttctaaactttataaatacgaatacaattctaatatatcaaataaatagtgttgtagctttactccaagaaagaaatgagtatataaaacttttgcttcatctttataggtttacatttatgtgtacacccccccctccaacacacactcatatacatatacagacagtcatccctcggtatccctgggtaattggttccaggacgtcccacggataacaaaatttatggatgctcaagtcccggatataaaaatgtataggagttgcatataacatatgcacatcctcccatatattttaaatcatctctagagtatgtagaatatgaaaaatgtaaatgattgttatatagtattgtttatggaataataacaagaaaaaaagcctatacatgttcagtacagatgcaatttttaaaaatattttccatccgcaggtggttgaatctatggatgcagaatccatggatatcaagggccgactgtgtgtgtgtgtgtgcatacatctatgtatgtttgtttggggggtgtgtgtgtgtataatcactatggtatatgggatttggcataattacctttttttacatgtttatatgaaaacataaaaaactatgggaagaggggaggattcttaattctaataactcactgacaatataattggttttactcttagtttatttcctgttccctcattttctgttttttttctgagtattcaatttttttttcagataactgaaattggtaggatatagatacgaaatggtttttaattttctccgttagctacctgtaaatatgccttgtggaaacttatttccacctcctccagccctcctatccaccctcgcccagctgccctcaccagacatgttcaggcccaaaggacttagtgtataaaagggagcctgatgtgccacttactcctccttccccatccacttacaggtccctctattcctcagtgttttggggaatggaaactaaaggggaagaagaagaggccctcaatgcttcctatatggttgcatccaaacgctggtctctcgtgtgtgtttctggggaccctcctatctgtacatttc

SEQ ID NO: 705285 - DNA, 1401 bp, Homo sapiens
gggaacatacagataagtttttaactgtgatgaaaatacctggactcaatcattgttccctcttgaaaacattaatttttcaacctaaatcaaagataaagctaaatgtgctaggtaggtagtctgcctataacactctgtgytttttgatactgtccaattaaaaactacaattatcccttttcatatatcccaggttatactgtgggatatttccagaaagggaaaagtcgagctcatgagagattgtcaagagatgcagaaatattcaaaacattattccctgaatgcatgctcatgctccctcaaggttttctaaactttataaatacgaatacaattctaatatatcaaataaatagtgttgtagctttactccaagaaagaaatgagtatataaaacttttgcttcatctttataggtttacatttatgtgtacacccccccctccaacacacactcatatacatatacagacagtcatccctcggtatccctgggtaattggttccaggacgtcccacggataacaaaatttatggatgctcaagtcccggatataaaaatgtataggagttgcatataacatatgcacatcctcccatatattttaaatcatctctagagtatgtagaatatgaaaaatgtaaatgattgttatatagtattgtttatggaataataacaagaaaaaaagcctatacatgttcagtacagatgcaatttttaaaaatattttccatccgcaggtggttgaatctatggatgcagaatccatggatatcaagggccgactgtgtgtgtgtgtgtgcatacatctatgtatgtttgtttggggggtgtgtgtgtgtataatcactatggtatatgggatttggcataattacctttttttacatgtttatatgaaaacataaaaaactatgggaagaggggaggattcttaattctaataactcactgacaatataattggttttactcttagtttatttcctgttccctcattttctgttttttttctgagtattcaatttttttttcagataactgaaattggtaggatatagatacgaaatggtttttaattttctccgttagctacctgtaaatatgccttgtggaaacttatttccacctcctccagccctcctatccaccctcgcccagctgccctcaccagacatgttcaggcccaaaggacttagtgtataaaagggagcctgatgtgccacttactcctccttccccatccacttacaggtccctctattcctcagtgttttggggaatggaaactaaaggggaagaagaagaggccctcaatgcttcctatatggttgcatccaaacgctggtctctcgtgtgtgtttctggggaccctcctatctgtacatttc

SEQ ID NO: 705286 - DNA, 1401 bp, Homo sapiens
gggaacatacagataagtttttaactgtgatgaaaatacctggactcaatcattgttccctcttgaaaacattaatttttcaacctaaatcaaagataaagctaaatgtgctaggtaggtagtctgcctataacactctgtgctttttgatactgtccaattaaaaactacaattatcccttttcatatatcccaggttatactgtgggatatttccagaaagggaaaagtcgagctcatgagagattgtcaagagatgcagaaatattcaaaacattattccctgaatgcatgctcatgctccctcaaggttttctaaactttataaatacgaatacaattctaatatatcaaataaatagtgttgtagctttactccaagaaagaaatgagtatataaaacttttgcttcatctttataggtttacatttatgtgtacacccccccctccaacacacactcatatacatatacagacagtcatccctcggtatccctgggtaattggttccaggacgtcccacggataacaaaatttatggatgctcaagtcccggatataaaaatgtataggagttgcatataacatatgcacatcctcccatatattttaaatcatctctagagtatgtagaatatgaaaaatgtaaatgattgttatatagtattgtttatggaataataacaagaaaaaaagcctatacatgttcagtacagatgcaatttttaaaaatattttccatccgcaggtggttgaatctatggatgcagaayccatggatatcaagggccgactgtgtgtgtgtgtgtgcatacatctatgtatgtttgtttggggggtgtgtgtgtgtataatcactatggtatatgggatttggcataattacctttttttacatgtttatatgaaaacataaaaaactatgggaagaggggaggattcttaattctaataactcactgacaatataattggttttactcttagtttatttcctgttccctcattttctgttttttttctgagtattcaatttttttttcagataactgaaattggtaggatatagatacgaaatggtttttaattttctccgttagctacctgtaaatatgccttgtggaaacttatttccacctcctccagccctcctatccaccctcgcccagctgccctcaccagacatgttcaggcccaaaggacttagtgtataaaagggagcctgatgtgccacttactcctccttccccatccacttacaggtccctctattcctcagtgttttggggaatggaaactaaaggggaagaagaagaggccctcaatgcttcctatatggttgcatccaaacgctggtctctcgtgtgtgtttctggggaccctcctatctgtacatttc

SEQ ID NO: 705287 - DNA, 593 bp, Homo sapiens
gacagaaaactcactgggtaggataagcaactgattgctaatatactagagaccgacgtaagacacatgatctccagaggttggaagataaaccctatgaaatttcaggttcwtacagcttcagtgaaacatatagccctgtggtaagcagtgtgctaacatatttccaacaaaataaaaggcaaagtgctctatctagcattctttaccataaataaagaagcacagtgctggaaaggccttattgggctctgcaggcaatatgttttacatctaggaatgctattacagcccataatctgagtaacatagaggttgctaattttgagtagagctatgggtaataagaggtgctatagtaggtccagactatggtgcaatcagctctgtccctttgggtctttgtatccaaccgacctaataaagctgcaggtgtccatccattgttagatggaaatggtgtcactgagaatgagcacaagccaatcttgagagcatgactaagccatatgaataggtaaccctattacctggtgcaagtttaagtaaactggatagccacttggcaccagaacctatctatgcctcactta

SEQ ID NO: 705288 - DNA, 593 bp, Homo sapiens
gacagaaaactcactgggtaggataagcaactgattgctaatatactagagaccgacgtaagacacatgatctccagaggttggaagataaaccctatgaaatttcaggttcttacagcttcagtgaaacatatagccctgtggtaagcagtgtgctaacatatttccaacaaaataaaaggcaaagtgctctatctagcattctttaccataaataargaagcacagtgctggaaaggccttattgggctctgcaggcaatatgttttacatctaggaatgctattacagcccataatctgagtaacatagaggttgctaattttgagtagagctatgggtaataagaggtgctatagtaggtccagactatggtgcaatcagctctgtccctttgggtctttgtatccaaccgacctaataaagctgcaggtgtccatccattgttagatggaaatggtgtcactgagaatgagcacaagccaatcttgagagcatgactaagccatatgaataggtaaccctattacctggtgcaagtttaagtaaactggatagccacttggcaccagaacctatctatgcctcactta

SEQ ID NO: 705289 - DNA, 1391 bp, Homo sapiens
ccagaaccatataaggaaagcaattctgggtaagtttacaccatataaaatcataattctaattgagataagttgacaccatataaaatcactgcagttgtgatacttttagcaatgtaaaaaacttggaaaggcattggaatagatccttaggacrgtgtctccattgattcaaagtgggttggagcagaaagaacctcacagatattgagatcaaataaccaagtatttatttactctaatgttgctgggagagttagccatgcacccccatttcctgcataaaattaaggagtacactgatctgcagtctgtcctatatctgaatgtcaattgtttaactcagccattaaataaacttcaaattagtaatgctaaaagctttccctattcaatctttgccttagtatttggtttatttctaaaacatttttaataagagtttaaagatctatgataagaaaatagatgaaaattacaccaaaaattctgacagttgaaaattaaacgtgaatgcaagttatcaatctgaaaataaagtgtgtttctgtatgtaaaattttaaaaaggtgttgatttatatttgattcatggtgtgagtagctgcattatgaatgatcaatgaacattatcatcagaacaatgtcacactattacaattatggtgcatcaaaaatgcaaacttaattgtttagctcttaatgaaatacaaaagccacatgttaataatgttaaagttgtggttcgatctgacaaagtcaaagttaagatgatgataaaccatcccaaacactttgatatcataatataaaatatatcatagaggttccataccctacagccaccactctccccactatgaacagcagagaacatcttttcaaaatctagttgactggctttttgtaggaaagaacatggtcctgagttaagttgacaactcaacttacttcattttgtccaatctcaaaacagacaaacataaaaaattaggaggcatccaaataaagtgctcctccttatccacagtttcaccttctgaggtttcagttgcctgtggtcaactgaagtctgaaaatattaaaatggggaattccagaaataagcaattcataagtgttgagttatatgctgtgacatgcatcattcctttgtccagtatatctacactctatatgatacctgccctttagtcacttagcagtcatctcagttattagattgactgttgtgatatcacagtacttgtgttcaagtaaccctttttttacttagtaatggtctcaaagagcaagagtagtgatgctggcatattgttataatttttatattttatttttatttattgttaatctcttatgcctaatttataaattaagctttatcataga

SEQ ID NO: 705290 - DNA, 626 bp, Homo sapiens
aaagttgttacctggatggaactagaggcagttatccttaggaaaactaactcaggagcagaaagtctaataccagaagttctcacttataaatggaaactaaactaaatgatgagaactcatggttacatagcagagaacaacagatactagggcctacttgagtgtagagggtaggaggaggaaaagaatcagaaaaaaaataactactgagtacaagacttagaacctgagtggtgaaataacctggataacaaacctccatgacactagtttacctataaaacaaacctgcatatgtacccttgaacataagataagactttttaaaaatttcttacttttggggaaaatgactggttatatttaagatraggaaactcaagttttcaacttttaattttctatgtgtgctgggttaaattgtggcccacaaacaaacaagcagaaaccatatgttccctaaaagctatgaaggtaaccttacatatttggggaaaaaaaagtatttgcacatgaaattaagttaaaaatattgaaatgggattatcttaaattaggttgggcaataagtccaataataagtgaagggtacttatagggcctttggagaaagacatgtgaag

SEQ ID NO: 705291 - DNA, 2403 bp, Homo sapiens
gtctttataacagaatcatttatattcctttgggtatattcccagtaacgggattgctgggtcaaatggtatttctggttctaggtctytgaggaattgccacactgtcttccccaatggttgacctaatttacattcccaccaacagtgtaaaagcgttcttatttctccacagcctttccagcatatgttgtttcctgcagccatcactggagctccagtctgccatttttcccctgtgggtgccggggagactggacagtttggaggaattccccacagcgcagcgcagcacagcacagtgacacactattgctagactgcctctttagtgtttattgtctggtaactattatcattgtcattactattgagatgtttgagatgtgctaaattgatactaaatgagtatataagctcttacggtgagtgacatagtgaatgtttagtagcgtctactgccagtgtggtggtggtagaagaggattaaaaataacaatggaggtgtttcatttatttaaatactttcagatcaaacttttccaatcttcctataatgcacagaatttgaggacattatcacctattcctagatgcgctggaacagcccacaagcttttaattttttaggagaaccttggtagaaattatttgggtccacctctgagtgaatatctgtggccttctggtcaggcacctgtcctttttaggcccctcacatttcatagtggttgttaatctcaccttctgtttcattgattgttgtagcatatggcttagcacaaactggcagcacaaaatagctgcattccaaatatttgttaggaagtgtgaccttgacagtgatgactgataaaagttggattaaaagaacattttgatcagatcttttttagtgacatgtttaaatctctccctggataaatcaaagaatcagagtttttaaaattttatgatgagattttatttactccttttccctacatccatataggttttttaaaattaattgagctatgagtttttgaaatttatttatatatttacttttaaattgttgttgaagatagatagcattcagtacattgtgaattttttaacaaaaattttctctgtggtttctgtacctggaatatttgaaatactttgagccacagtttgtctacaactcatgaacaccgtaaatctggtatttgggccatgctgcatttttaattctgattgctaaaaatattcaaatcatttttttaccatcttcccctttcataaatgtatagacacttattatatgcattttgtatgatatgttaacattacttctggcattatgttaacctgaataaattagtcttttacatttttatttttcttgtatttttaattttacaatattttggtgacctataaagacaatatattcaaggatatcatgtgaagatatatatatatatatatatatatatatacacacacacacacacacacacacattgtgtaatgattaccacaatcaaattaattaacacatctatcaccacccatgctgttcattagatcctcaggattcattcatcttataactgaaagttataccctttaaccaacattaccctgtttccctcaatccatagacactgacaaccccactctactctctgcttctctgagtttgacttcttcagatacacataaaagtgagatcataccaatttactatttaatacttattaagtatgatgtatgtacagaaacataactcataaatgtataacttaattaattagcacactgggaacatgcctgtggaatggcactcagaatgagaactgggacagtaccagcagtgcagatgctcccagaatctcccttaatccataccactctcttcttaaagtcaatcaatcaatcaatatcttgatttttaacatcataattaacagagagcatatgaatggaactttatggtctataactccatattatgtttatattattcttccgtgctattgtatgtagcagtggatttacttttattactataaaaatatatttttaaaaaactcttcacatctgcagatatcagatctttgacaaagttgagaaaaataagcaatggagaaaggacacactttgcaataaatggtgttgggatagatggctagtcacatgcagaaaaatgaaactgggccctaacttttactatatacaaaaattcactcaagatgtattaaagatttaaatctaagacctaaaattacaagaatcccagaagaaaacctaggaaacaccatcctggacattgtctttgggaaagaatttatgactaagtcctcaaaagcaatgagaacaaatataaaaattgacaagtgagacctaataaaaccaaggaaattctgtacagca

SEQ ID NO: 705292 - DNA, 2403 bp, Homo sapiens
gtctttataacagaatcatttatattcctttgggtatattcccagtaacgggattgctgggtcaaatggtatttctggttctaggtctttgaggaattgccacactgtcttccccaatggttgacctaatttacattcccaccaacagtgtaaaagcgttcttatttctccacagcctttccagcatatgttgtttcctgcagccatcactggagctccagtctgccatttttcccctgtgggtgccggggagactggacagtttggaggaattccccacagcgcagcgcagcacagcacagtgacacactattgctagactgcctctttagtgtttattgtctggtaactattatcattgtcattactattgagatgtttgagatgtgctaaattgatactaaatgagtatataagctcttacggtgagtgacatagtgaatgtttagtagcgtctactgccagtgtggtggtggtagaagaggattaaaaataacaatggaggtgtttcatttatttaaatactttcagatcaaacttttccaatcttcctataatgcacagaatttgagracattatcacctattcctagatgcgctggaacagcccacaagcttttaattttttaggagaaccttggtagaaattatttgggtccacctctgagtgaatatctgtggccttctggtcaggcacctgtcctttttaggcccctcacatttcatagtggttgttaatctcaccttctgtttcattgattgttgtagcatatggcttagcacaaactggcagcacaaaatagctgcattccaaatatttgttaggaagtgtgaccttgacagtgatgactgataaaagttggattaaaagaacattttgatcagatcttttttagtgacatgtttaaatctctccctggataaatcaaagaatcagagtttttaaaattttatgatgagattttatttactccttttccctacatccatataggttttttaaaattaattgagctatgagtttttgaaatttatttatatatttacttttaaattgttgttgaagatagatagcattcagtacattgtgaattttttaacaaaaattttctctgtggtttctgtacctggaatatttgaaatactttgagccacagtttgtctacaactcatgaacaccgtaaatctggtatttgggccatgctgcatttttaattctgattgctaaaaatattcaaatcatttttttaccatcttcccctttcataaatgtatagacacttattatatgcattttgtatgatatgttaacattacttctggcattatgttaacctgaataaattagtcttttacatttttatttttcttgtatttttaattttacaatattttggtgacctataaagacaatatattcaaggatatcatgtgaagatatatatatatatatatatatatatatacacacacacacacacacacacacattgtgtaatgattaccacaatcaaattaattaacacatctatcaccacccatgctgttcattagatcctcaggattcattcatcttataactgaaagttataccctttaaccaacattaccctgtttccctcaatccatagacactgacaaccccactctactctctgcttctctgagtttgacttcttcagatacacataaaagtgagatcataccaatttactatttaatacttattaagtatgatgtatgtacagaaacataactcataaatgtataacttaattaattagcacactgggaacatgcctgtggaatggcactcagaatgagaactgggacagtaccagcagtgcagatgctcccagaatctcccttaatccataccactctcttcttaaagtcaatcaatcaatcaatatcttgatttttaacatcataattaacagagagcatatgaatggaactttatggtctataactccatattatgtttatattattcttccgtgctattgtatgtagcagtggatttacttttattactataaaaatatatttttaaaaaactcttcacatctgcagatatcagatctttgacaaagttgagaaaaataagcaatggagaaaggacacactttgcaataaatggtgttgggatagatggctagtcacatgcagaaaaatgaaactgggccctaacttttactatatacaaaaattcactcaagatgtattaaagatttaaatctaagacctaaaattacaagaatcccagaagaaaacctaggaaacaccatcctggacattgtctttgggaaagaatttatgactaagtcctcaaaagcaatgagaacaaatataaaaattgacaagtgagacctaataaaaccaaggaaattctgtacagca

SEQ ID NO: 705293 - DNA, 580 bp, Homo sapiens
attcacagaaacattcccctgaactcactcttccttccctggtaccgtgaaaacaactatattgaatttacaattggtgattttaagtatgtgctcgggagaagaacatgggaagaagtgagaaaatctgccctgctcagctatggtgtttatcaaagtccaygcctatggacttaaattcaatatagggaaatctctcatcaaaaggctaatttagtatttaatagatttagagaataaaaccattggcacattatcttttctttcaaagtatagtatctgctttattgatttttagatatttcagtggtggcagccccaggtaccagatcttatttgagatgcctttttttctctatttcaattgagttccatgcttctggcatcctgttacgacaggagctctactggtaagaaagtctaattattgcttataaataataaatcattttttaattgttttttcttttttcttgtcttttatgtatatttcaagttacaaattcaatgtctctatgagttaaatggctagtaatatttctaatgattcctagatcagatttagtaatatacttctttc

SEQ ID NO: 705294 - DNA, 2459 bp, Homo sapiens
ttgcaatgaatatgtagtggcaaaaactttagacttcagagatggcattttaactagaactaaacataacctataatcatatattttagagcattgctaaactacatttacaaattactatacaagccaagatgatatctaaattccacaactaagttatcaatatcaaaagtataatgaagtgtgccaatatacgagtttcaggctgggctttagttccctaccttatcgggaaacaatcattgttctcttaattttatgaaaagtaaaaatgaatatgtttaaaatgcatcatattaaaatgtgtgcaattacttaattaaaaatgtcaatttatgatttctctatattgacatgtatttctaaattgtagttgacattatttaatatattcaaatagcttatatgcatattaataaaacattataataaaaaatcattatatatatttacgaattaatgggatctttaaacatgttaaatttgttttggtgtaatattacgaaccatgttaggttttaaatttcatttgcatttcaatccctggcatgtagatatcaaagctaaatcccagtcttcgttgtaatgaagttcatgttttgaatgtgtttcatgcttagttctatggctgtaagaaggttacagcaaattggccctggggcactattagcagtggttctaaagcaggctttttttttcaaataagcaggtttttttcttttacataatttgtacttaaagaatacctagagttttaagagtcgaaaagcactagtcagcttatgaacattaactgcaggctctgtctcatgcctcccactttccagttcttttagccaaaagtcgccatatgaaacagttttttttaactttattttaagttcaggaatgcatgtgaggatgtgtgggtttgttacataaacgtgtgtcatgggagtttgtggtacagattatttcatcacccaggtattaagccattatccattagttatttttctaatcctccctcctctcaccctccaccctctgataagtcccagtgtgtgttgttcccctctatgtgtccatgtgtattcatcatttagctcccacttataagtgagaacatgcagtatttggtttcctgttcctgagtgagtttgctaagtataatgacttccagctccatccacgttcctgcaagcttgcattcaataactggttcgtcaaaaatgagggtgctccaggcaagagtcaaacgctgacctatgtgaccccccaaactccagacattcaggtcatacttttcatggtgacctcaatcccaagtgaccgtcatttagcttgaggtcaggagattcccttaaaataaaaaattcctcatgcaccattttccttgtaaatagaccagtgatagtataaagagaggaagaagaggatttggatatcttttagcaagcctggcaatgtatgcaacatttcttttcctggttcataaaaaatttaccagttactgaatgcaagctacttatagggaaaaggcataacccttaagtcatactgcttcctttggccatggcaattactggtgaaaaactatataagtttttctataagtcgttaatcagttggggtaatgagaaccttagtacaaaagagagaatctgagcaacccacatttaccatacatcttgactagaagcctctgcagtacactgttatctggctttgctgatgcatttgaagatgcctctcagctccaatccacagtacaggctaaaaccatggaaacacacatcctttccccaccactaatatacatgcaaatctgttcccatgaccaccttctctccttgctttgatattagcggcaaatccaaacatctttcactctcagggtgctccaggcaaaagtcaaacactgacctatgtgacccccaaactccagacattgaggtcatacttttcatggtgacctcaatcccaagtgaccctcatttagcttgaggtcaggagattcccctaaaataaaaatttccccatgcaccattttcattgtaaatagaccaatgatagtataaagcgggggaggagaggatttggatatcttttagcaagtctggcaatatatgcaacatttctttattgctttttaaactggatgaacactaaatcttcatgaccatcacacttaatatattgttacactcctagatccacgaagtcaacaatttctttgacttgaaackttgtgccataaatattttccttagggaatatttgagtaacttgcatctttattgctaaagatgtcattgtttcttgatctaaacaacatttgtaatttctgaaatttttcgtatgaagaaaaacccagtgaagtgtcacatgagttattttatttatctgagtttcttaacttttgcattctcaggtagttgcacttgtctattgtctttgagttaataggcttcagtgaa

SEQ ID NO: 705295 - DNA, 620 bp, Homo sapiens
ggccctatggcagactctcgaatggccagcgtcgtccctcaagagcttggcattgcacagatgcttgcattggacgtctgttaagtgctcactgctgactgttctcaagtagaggaggattatagatcaaactaaaaaatgtaccgttgacagttctctgtcctcagtacagcagagagtgatgcctgcttagctttgaaccccgcatttatttcggtcatgacttcaggaggtcagtcaggtcaaaacatggcagtcatttcctgtmtcatttttcccaagcggctgctcatctttctggatagctcagcaacctctacagagaagccatgttcttaatgtgtgagtctttcctggtgtcctgtgtcctagctccagcctagttgtctctttctgcctcaggttgcctttgtctttcccacactcttcccaactgtaatatatcatcatgttttttaaaggtacattttttagtttggtctctaatcttcctctacttgagaacagtaaccctctattaaaaaatgatttcataatttgtacttttcactgtcagactgatcttcccttcatttagttcaaattactgagcttctattgtgttgagctactctttcacc

SEQ ID NO: 705296 - DNA, 751 bp, Homo sapiens
gcagctggtaagtttccattgcctcactgctacatttcgaagttaaactgcctctttgggaaacagacgttactttgcttagagtgaagctggaggagatagacttcgtcaggacctaactagtaggcaaagtgtgcagactccaagttctagaaagcaggtgttggtgtgaagtggcagaggaggtacagaatctcactgaataggtttggctgtttgcaccaggtttagatttacaagtgtttttctctwagagagcatctggaggagaatcctactgtgtgaaagtcactctaaatatttcagactgaacagcctgtgactggcctgggaagccatacttgctctttggcaagttcggaggttgttcctgggccctttttgctgggataggatggctggctatgaagcccatagtcgtttctgccatgtacaaaaacactacatctttgggttgaaatagcagcatatgagtatctttatacacaatcactctgtttctttgaaggggaaatcattcaatgtatgccaaaacacaaatttggaaggcgatttgatctaacacatagaatgtttacgaaatttatttccatatatctggagatcaaagatgcatataatgctctactctcaagaaaaaccatagcttggtcatggagatgatatgtaaaataagtaagtctagtccaatgagtacataaggtatttcttgttgttgtttgtttttttttggagacagagtctcactctg

SEQ ID NO: 705297 - DNA, 646 bp, Homo sapiens
ttagattaggtattactatagaaattagtccattctctaaagggcaatttgtagacagttattaaaattttagatttacatatattttgacccagaaatgcccattctaggaatttattcctctgataaacatgtaaaaagaaagtatttttttttgcagcatgactatttttaatcgtcaaagactggaaacaaccgaaatgtcccaaaacaagagctgaataaatcatgsgacattataaaaaaggagagggcacagatctatgtcctgatatggaacataaagcaaaagttacacaacagtgagtataatgtgctaccatttatactgggagaagggaggaaaagaaaaaagaagaggtgaaggagatgtatctgtatatgtttatatttgaatacaaaaatctctgaaaggattcaaaataaactgttagcagtagaaagagcctgggaaaaacttagcgttcactgtgttaacttttttactgttttaattttttactgtatatacacattatctatttgaaatcatttaaaaactttttcaatcctatacatttcatgtacagttattcataacagcaaaaaattaaaaacctgaatgtccgtgaagacagggtaataatctatcatttagccatactca

SEQ ID NO: 705298 - DNA, 1465 bp, Homo sapiens
cattttacatataaatatataatttgcttgtacgttatactttcacggtgtcgataaactgtgtgtataatgggaaaaatctgttttagaattcaaaattctgatagttctgaaatatattgagctgagacataccttttatttttctggagaaaggatgaataaacaatttaattagtaaagatctccaattttaaatccttttgcatagtttagaggactccaaatacaaatagtaatactacttaaggtaagcaaattctcacaacgctcaatattttmtagaagtacttagtgtttctcagtctagctagtggatctataattattaaagtttcatatgtatacaaaatagtctgcaattcacaatttactttccccacgctcatgttacaaatgatggtaggttgaattttagtaatacaaaataagaggctcatggtgaccagcaaccattttatttaacccctaatcttttttatcaccacacccacttaatctatataatgcatctgggattctccccacatgggttttgagtcattctcatttgtaccttgaaatacaaatttccttcaacacataatgggggaagttctgtgagactttggtcagaaacggaggggatagttatcatgcagatagggctttttaatttaatctaataatttaatttaatttaatttaattttgttttaacagaatgtgctttttgtaagtccaaataatggaatttaaagtctgagtttataaattccttatggagggaaatagaaagaaaaactagagtaaaatttaaggaacgagtcttttcccaaattagacctttccgcctctttaaggctcaatgttaaactctatgttagcagaacctctgcttcccacatcctaaaagttgtttttttgtaacacaataattgatatttacattttcaaaattgcgctaatttatatatcatgagaaaactcgactagtttgcaaaacggcaggcttttggcaggtgtagaagtagtgtctttctttttaaaaacatatttttactggacttaacttctagctataaaattaatgtttgtttatatattcatgacaatattggagatatgttgacatgtttaaaaagtcagattaaagtcaccaagaattccattggccagatataatctgttattattttggtgcatgccttgtaagtattttgaaaaggaatctgtgtaaatacgtagacgtaatcatggacttaaatacaaagttgggaaatacagtgcatactatcttttagctgcttttatatttaagtgaaaatacagctacaaaatacaattattttggcagaaacaatacagcaaagggaagagtatacagtattccacacctgcaaggactcatagaaataacaccaagttgccttctcggctggagtgccaggggaccatgtgacccacatctggtacttctttattc

SEQ ID NO: 705299 - DNA, 1465 bp, Homo sapiens
cattttacatataaatatataatttgcttgtacgttatactttcacggtgtcgataaactgtgtgtataatgggaaaaatctgttttagaattcaaaattctgatagttctgaaatatattgagctgagacataccttttatttttctggagaaaggatgaataaacaatttaattagtaaagatctccaattttaaatccttttgcatagtttagaggactccaaatacaaatagtaatactacttaaggtaagcaaattctcacaacgctcaatattttctagaagtacttagtgtttctcagtctagctagtggatctataattattaaagtttcatatgtatacaaaatagtctgcaattcacaatttactttccccacgctcatgttacaaatgatggtagrttgaattttagtaatacaaaataagaggctcatggtgaccagcaaccattttatttaacccctaatcttttttatcaccacacccacttaatctatataatgcatctgggattctccccacatgggttttgagtcattctcatttgtaccttgaaatacaaatttccttcaacacataatgggggaagttctgtgagactttggtcagaaacggaggggatagttatcatgcagatagggctttttaatttaatctaataatttaatttaatttaatttaattttgttttaacagaatgtgctttttgtaagtccaaataatggaatttaaagtctgagtttataaattccttatggagggaaatagaaagaaaaactagagtaaaatttaaggaacgagtcttttcccaaattagacctttccgcctctttaaggctcaatgttaaactctatgttagcagaacctctgcttcccacatcctaaaagttgtttttttgtaacacaataattgatatttacattttcaaaattgcgctaatttatatatcatgagaaaactcgactagtttgcaaaacggcaggcttttggcaggtgtagaagtagtgtctttctttttaaaaacatatttttactggacttaacttctagctataaaattaatgtttgtttatatattcatgacaatattggagatatgttgacatgtttaaaaagtcagattaaagtcaccaagaattccattggccagatataatctgttattattttggtgcatgccttgtaagtattttgaaaaggaatctgtgtaaatacgtagacgtaatcatggacttaaatacaaagttgggaaatacagtgcatactatcttttagctgcttttatatttaagtgaaaatacagctacaaaatacaattattttggcagaaacaatacagcaaagggaagagtatacagtattccacacctgcaaggactcatagaaataacaccaagttgccttctcggctggagtgccaggggaccatgtgacccacatctggtacttctttattc

SEQ ID NO: 705300 - DNA, 622 bp, Homo sapiens
tgatatttaatgtatgctgtattatcagggccagtttctgtttcagtagcaatttataactcaccattccctaacagatgctggtttgtgtccttctttgtgtacagtatatctggaattatatactctcagaattataatatgctattagatttcattgtaatatttgctgcacaaccgtgaacattcttatttatttatttatttatttttttgagacggagtctcgctctgccacccagactggagtgcagtggcgtgatcacagctcaatgcaggctccgcctacctgggtgacgccattctcctgcctcagcctcccgagtagctgggactgcaggcgcccgccaccagrcccggctaattttttgtatttttagtagagacgggggttcaccatgttagccaggatggtctcgatctcctgacctggtgatccacctgcctcagattgtaaaacgtttaaatcataaaatgttttatgtttttattttttaaatcagctgactttcagattcaaattcttataaatcttaaagatggttttccagaggctatgagatacagattagtctatctgtccagcacacacacacacacacacacacacacacacacacac

SEQ ID NO: 705301 - DNA, 588 bp, Homo sapiens
ttatttccacattttaaacgtttttattgtacttcattgtaagcacagatcacagacccaaacttaaatctcatgacttttatcttttcttagaatattgttgaaacattactcaactcctgcttgaattcttcccctcacaaggaacttgctattttggctcaagttcttttcattgttgaaaacttttcttacattgaacagaaggctctgtcattgtyattcttgctcattagttggcagaatgaaactgtgcctatttcctcttccttgagaatctttcaacaatttgaaaagttgtgtctcccttaatgcttctccattcacattttcattctttgccatttctattttcaagaaaggttttgaaggacttctttaacttgtaatcttcttcttttaaaaaataatctgataccttttataatgacttatgctttgagaatgctgtggaaatatatttgagtgtggattgctgtgtgggtaaaattgtagtgtagaaagtcatttgaattaataagactatacgtgatatcgatatggtacagattcatatctactaaaggaatgacattaatggttattggc

SEQ ID NO: 705302 - DNA, 588 bp, Homo sapiens
ttatttccacattttaaacgtttttattgtacttcattgtaagcacagatcacagacccaaacttaaatctcatgacttttatcttttcttagaatattgttgaaacattactcaactcctgcttgaattcttcccctcacaaggaacttgctattttggctcaagttcttttcattgttgaaaacttttcttacattgaacagaaggctctgtcattgttattcttgctcattagttggcagaatgaaactgtgcctatttcctcttccttgagaatctttcaacaatttgaaaagttgtgtctcccttaatgcttctccattcacattttcattctttgccatttctattttcaagaaaggttttgaaggacttctttaacttgtaatcttcttcttttaaaaaataatctgataccttttataatgacttatgctttgagaatgctgtggaaawatatttgagtgtggattgctgtgtgggtaaaattgtagtgtagaaagtcatttgaattaataagactatacgtgatatcgatatggtacagattcatatctactaaaggaatgacattaatggttattggc

SEQ ID NO: 705303 - DNA, 636 bp, Homo sapiens
tatataaaaagttaaaaaaaattagccgggtgtggtggtatgcacctgtagtcccaggtacttgggaggctaaggcgggaggatcactggagcccaggaggtcaaggctacaatgagctatgataaccacggcattccagcctgggtgatagagcaagccactgtctcattaaaaagaaaatgtatattcaatagcagagacrtggaatcaaccttaatgcccatcaatgacagactggctaaggaaaatgtggtacgtatacaccatagaatacattacagccataaaaaggaacaagatcatgtcctttgcaggtacacatttacctaggtaacaaacatacacatcctgcacatgtgcccaaaacttgaaaataaaaataaaaaatttactaacaaaaataaacaaaaaacccccaaacaacaacagcaacaacaacaaaatgtgtatgctttttctccagttagtatttcttttgtgaattgattttttactgaacctttagagggctatgtccttggccacgacactggtatggcacatggtggtggaggggatatcatcacaaggaatgtataacctgtttttaggcagagaggaggacagcagacagcttatcctgtgtctgctttttc

SEQ ID NO: 705304 - DNA, 636 bp, Homo sapiens
tatataaaaagttaaaaaaaattagccgggtgtggtggtatgcacctgtagtcccaggtacttgggaggctaaggcgggaggatcactggagcccaggaggtcaaggctacaatgagctatgataaccacggcattccagcctgggtgatagagcaagccactgtctcattaaaaagaaaatgtatattcaatagcagagacgtggaatcawccttaatgcccatcaatgacagactggctaaggaaaatgtggtacgtatacaccatagaatacattacagccataaaaaggaacaagatcatgtcctttgcaggtacacatttacctaggtaacaaacatacacatcctgcacatgtgcccaaaacttgaaaataaaaataaaaaatttactaacaaaaataaacaaaaaacccccaaacaacaacagcaacaacaacaaaatgtgtatgctttttctccagttagtatttcttttgtgaattgattttttactgaacctttagagggctatgtccttggccacgacactggtatggcacatggtggtggaggggatatcatcacaaggaatgtataacctgtttttaggcagagaggaggacagcagacagcttatcctgtgtctgctttttc

SEQ ID NO: 705305 - DNA, 636 bp, Homo sapiens
tatataaaaagttaaaaaaaattagccgggtgtggtggtatgcacctgtagtcccaggtacttgggaggctaaggcgggaggatcactggagcccaggaggtcaaggctacaatgagctatgataaccacggcattccagcctgggtgatagagcaagccactgtctcattaaaaagaaaatgtatattcaatagcagagacgtggaatcaaccttaatgcccatcaatgacagactggctaaggaaaatgtggtacrtatacaccatagaatacattacagccataaaaaggaacaagatcatgtcctttgcaggtacacatttacctaggtaacaaacatacacatcctgcacatgtgcccaaaacttgaaaataaaaataaaaaatttactaacaaaaataaacaaaaaacccccaaacaacaacagcaacaacaacaaaatgtgtatgctttttctccagttagtatttcttttgtgaattgattttttactgaacctttagagggctatgtccttggccacgacactggtatggcacatggtggtggaggggatatcatcacaaggaatgtataacctgtttttaggcagagaggaggacagcagacagcttatcctgtgtctgctttttc

SEQ ID NO: 705306 - DNA, 585 bp, Homo sapiens
aatctcagtgctctgtatttaacttatgagaagattgccactatagtgaatttggtatccattgggagttgtggtttaaaacaagaaataaccacctaatgccttaataggtaattattattaagctaatctaatttttaaaaatatttaaagaagtttaccctgagccaaatatgagtgaccaaggcaattgggttacagtttggttttatacattttagggagacataagacatcaatcaatacatgtgaagtatacattggtttcgtcaggaaaggtgggacaacttkaaggaaggatgcgtgtgtggggtgcttacaggtcatagatggattcaaggttttctgactggcagttgattgaaagagtcaagttattattatccaaagatctggaatcaatagaaaggagtgtctaggtaaagagaaggggcttggagaccaaggttcttattatacgaaatctcataggtggctgcccttagaaacaatagatagcaaatgtttcctgtttagacctttaagaggtgctggactctcagctaatctcttcaaggttgggaggaaaggggaaagatattacgt

SEQ ID NO: 705307 - DNA, 420 bp, Homo sapiens
aaccttacccccaaccccatgctctctgaaacatgtgctgtgtccactaagggttaaatggattaaaggtggtgcaagatgtgctttgttaaacagatgcttgaaggcagcatactcgttaagagtcatcaccactccctaatctcaagtacccagggacacaaacactgcggaaggcggcagggccctctgcctaggaaaaccagagaactttgttcacgtgtttatctgctgaccttccctccactattgtcctatgaccctgccaaatccccctctcagagaaacacccaagaatgatcaataaacactaaaaaaaaataaaaaaawaaaaaagaaagattcaacattagggctccctctttcccagccctttctcccgtcaccctctcccataatgaccatggttgggaaaacaca

SEQ ID NO: 705308 - DNA, 651 bp, Homo sapiens
atgataacttctaaaacattataggcaaaggacatagagaagtcaaagatcgtgtagataattccagctagcttatctactcaaatttgttgttaaacatttgggtgttccggggaaggactaaactctacaggattttgcctgtactgccatgagggggtcaaataattgccacagacagagtgtggcctctcctttctcaggcctctcactgccatggtgtctgcagtgtgggatgcctcttctgtggtggacccagagccacatgaaaatttggggggggtrgggtcagccccattctctctggaagcccataaaaccttgctatcaccctcttcagggatgtatcgctgggatctctatatatgacatgcccagtgcctcagatcagaaatgcctcaaaaagagagatgtgtctgactcttaaaggcccctatccaggggtatgcccatatttgatattctcatccatctttgggactttcttagccttctctcatgtccagaaatcatcagaggcttggcaaccaagaagagcgggtcaagggatttccaagtggcaagagaggattggggaagtttgaaaagcacctataatgttacacttctgcatttttttagtagcgagtttttttggggtaaatttgatca

SEQ ID NO: 705309 - DNA, 3294 bp, Homo sapiens
tcaacttcaacagcagcatcactcataagcctccatacctactaacagcagttgtctttgttttgacaagagatgtgaaggagcctttcttggggcttgactagtgtttgtaacatgtagagccctcttaagtgctgcatccaccaattactcctggttaaacttgaaataattctgatcctcagtgtctaaggctctgctttttattttccgagtaactgtccaaagaagaatacatgatctttacaaaaacaaatactttgctactgcaaatcatcctgctgaaccaatcctctctctctgtctctctctcctctctctcttctctctctctctctctctctctctgtgtgtgtgtgtgtgtgtgtgtgtgtgtgtgtgwgagagagggagagagagagagatattttggacaaagaaaaaaacaagtcttcagaaatagagctgttatagctctgattaaaatggaccaattaattgtcccaattttcttcaagaacgaaacaggagttagagaacttgttttatttatgtgtaacaaaatagcctaataagatgctccctcttccccaacaaagcaatcaattcaaattccaccatttctctgaaattcctttccaaacctctgttttctaattttatctgacctcagactataagaacagtgacatttttcttttttaaaaaattatttttattttaagttctggggcacatgtacagcatgtgcaggtttgttacataggtaaacgtgtgccgtggtggtttgctgcacctatcaacccatcacctaggtattaagcccaacatgcattagctgtttttcctaatgcactccttacccccactccaccccacaacaggccccagtgtgtgttgttcccttccctgtctccatgtgtgctcattgttcagctctcacttataagtgagaacatgtggtgtttggttttctgttcccgtgttagtttgctgaggttaatggcttccagctccatccacgcgcctgaaaaggacatgatcttattcctttctatggctgcatagtattccatggtgtttatgtacgacattttctttatctagtttatcattgttgggcatttgggttaattccatgtctttgctattgtgaatagtgctacagtgaacatatgtgtgtatgtatctttataatagaatgatttatatgcctttgaatctaaaagaaacataaacaaatttacaaaacaaacaaacaaaaacccaaacaacccctttaaaaagtgggcaaagtacatgaatagacacttctcaaaagaagacattcttgcaggcaacaaacatgaaaaaaaactcgacatcactgatcgttagagaaatgcaaatcaaaaccacagggagataccatctcatgccagtcagaatggcgattattaaaaagtcaagaaacaaaagatgctggtgcggttttgaagaaataggaacgcttttacactgttggtgggaatgtaaattagttcaagcattgtgggagacaatgtggcgattctttaaagatacagaaccagaaataccatctgactcagcaatcccattactgggcatatacccaaaggacatttttcaaaattgatatctaaagtgtggttaatgaatatttttccaagtaattcatttattcacataaacatattttatactgcatttgttcatttcaccaccattctagttgctaggagtaaaatcatacaatccctatttttggtcttttaaaaagatgcatgtcattgtctggattatttatttgtccaagtgaaaatatttctgtagacaaggtgacttgggagaacagaagaaggatgtattagtcaagcaggtatagcatccattcccagtgctatttctccagggtaataagaattaaattcagttccccatattaatctgtattcattttccaactattgatgaccttgaaaccatgaaaccacaattcaactgggggctgaacccagctgaaactcccttctaagaatatgctaaagccatagagaaaaataaattcaacccacttgcagccacatctttacaattcccacaactgtccctcttgcataaaaatgctgattctgatggggggatcaatgcattatctgttatttcttataacgtgcatcatcactcctctctatttatgggcaaaatggtggattgaaaacagcacaattaatattaaagatagtaacataatgactttcagaaattgatgctaagaatacaatttgttaacttcacacagccattgacttaactgtctataattgtaatacaggaaaggagggtgtgggtgtgtttctcggtttgggctccacagctcagaaaatacaccagtgaatcctggcccgtgaggacttactagagtgttcaaaaataatgaactcaaaaggacagtgaagaggacaaaatcaacagtatttattctgatttacttaaatcagaggtgtggtaaattaatgtttttttaattgaaaatatttatgaaattttatatgtatttaaaataaaaattgtattaaatgttcattctatagttcctcaaaaacaatgttagctaaatatatatatatatacacacacatatatacacacacaaacactctctttaaagtagctcaaagaatgttcacgtatattttcccatttatcttcataagagtccctatgagatacagagggattattattatcacctcctttgaaacagggaatgtgaaagaacaataggttaaattaatagtggcaaccataaattgatttatagctttgaaacctcgcaaaataaaatcatgcttagtttacaatttatttttagaaataatggcttcccgggtgttttaaaggcattatttatcagcttagactttatctgataattgtaaaatgtagaggtttttcaattaccctagaggctcatattttatttcttgagatataatccacataagaaaataatgcctgaatgatgtatgcaaatattaatagaattttggtcaataattaaccagtgaagaaaattcaacaatttctacataagcatgagtacttgaggaattaatttatggataaacgtcaaaaatgcaattcacgtttcctggtacagctttactattctaaacatacctcacaaaatcattcactttaaactgtgtcatattgaaagatttcatgaggatgtaaaatggctaatatacaattcagattacttttataatttggttcaaatggaaatatggggtggggggacgtccaata

SEQ ID NO: 705310 - DNA, 3294 bp, Homo sapiens
tcaacttcaacagcagcatcactcataagcctccatacctactaacagcagttgtctttgttttgacaagagatgtgaaggagcctttcttggggcttgactagtgtttgtaacatgtagagccctcttaagtgctgcatccaccaattactcctggttaaacttgaaataattctgatcctcagtgtctaaggctctgctttttattttccgagtaactgtccaaagaagaatacatgatctttacaaaaacaaatactttgctactgcaaatcatcctgctgaaccaatcctctctctctgtctctctctcctctctctcttctctctctctctctctctctctctgtgtgtgtgtgtgtgtgtgtgtgtgtgtgtgtgagwgagagggagagagagagagatattttggacaaagaaaaaaacaagtcttcagaaatagagctgttatagctctgattaaaatggaccaattaattgtcccaattttcttcaagaacgaaacaggagttagagaacttgttttatttatgtgtaacaaaatagcctaataagatgctccctcttccccaacaaagcaatcaattcaaattccaccatttctctgaaattcctttccaaacctctgttttctaattttatctgacctcagactataagaacagtgacatttttcttttttaaaaaattatttttattttaagttctggggcacatgtacagcatgtgcaggtttgttacataggtaaacgtgtgccgtggtggtttgctgcacctatcaacccatcacctaggtattaagcccaacatgcattagctgtttttcctaatgcactccttacccccactccaccccacaacaggccccagtgtgtgttgttcccttccctgtctccatgtgtgctcattgttcagctctcacttataagtgagaacatgtggtgtttggttttctgttcccgtgttagtttgctgaggttaatggcttccagctccatccacgcgcctgaaaaggacatgatcttattcctttctatggctgcatagtattccatggtgtttatgtacgacattttctttatctagtttatcattgttgggcatttgggttaattccatgtctttgctattgtgaatagtgctacagtgaacatatgtgtgtatgtatctttataatagaatgatttatatgcctttgaatctaaaagaaacataaacaaatttacaaaacaaacaaacaaaaacccaaacaacccctttaaaaagtgggcaaagtacatgaatagacacttctcaaaagaagacattcttgcaggcaacaaacatgaaaaaaaactcgacatcactgatcgttagagaaatgcaaatcaaaaccacagggagataccatctcatgccagtcagaatggcgattattaaaaagtcaagaaacaaaagatgctggtgcggttttgaagaaataggaacgcttttacactgttggtgggaatgtaaattagttcaagcattgtgggagacaatgtggcgattctttaaagatacagaaccagaaataccatctgactcagcaatcccattactgggcatatacccaaaggacatttttcaaaattgatatctaaagtgtggttaatgaatatttttccaagtaattcatttattcacataaacatattttatactgcatttgttcatttcaccaccattctagttgctaggagtaaaatcatacaatccctatttttggtcttttaaaaagatgcatgtcattgtctggattatttatttgtccaagtgaaaatatttctgtagacaaggtgacttgggagaacagaagaaggatgtattagtcaagcaggtatagcatccattcccagtgctatttctccagggtaataagaattaaattcagttccccatattaatctgtattcattttccaactattgatgaccttgaaaccatgaaaccacaattcaactgggggctgaacccagctgaaactcccttctaagaatatgctaaagccatagagaaaaataaattcaacccacttgcagccacatctttacaattcccacaactgtccctcttgcataaaaatgctgattctgatggggggatcaatgcattatctgttatttcttataacgtgcatcatcactcctctctatttatgggcaaaatggtggattgaaaacagcacaattaatattaaagatagtaacataatgactttcagaaattgatgctaagaatacaatttgttaacttcacacagccattgacttaactgtctataattgtaatacaggaaaggagggtgtgggtgtgtttctcggtttgggctccacagctcagaaaatacaccagtgaatcctggcccgtgaggacttactagagtgttcaaaaataatgaactcaaaaggacagtgaagaggacaaaatcaacagtatttattctgatttacttaaatcagaggtgtggtaaattaatgtttttttaattgaaaatatttatgaaattttatatgtatttaaaataaaaattgtattaaatgttcattctatagttcctcaaaaacaatgttagctaaatatatatatatatacacacacatatatacacacacaaacactctctttaaagtagctcaaagaatgttcacgtatattttcccatttatcttcataagagtccctatgagatacagagggattattattatcacctcctttgaaacagggaatgtgaaagaacaataggttaaattaatagtggcaaccataaattgatttatagctttgaaacctcgcaaaataaaatcatgcttagtttacaatttatttttagaaataatggcttcccgggtgttttaaaggcattatttatcagcttagactttatctgataattgtaaaatgtagaggtttttcaattaccctagaggctcatattttatttcttgagatataatccacataagaaaataatgcctgaatgatgtatgcaaatattaatagaattttggtcaataattaaccagtgaagaaaattcaacaatttctacataagcatgagtacttgaggaattaatttatggataaacgtcaaaaatgcaattcacgtttcctggtacagctttactattctaaacatacctcacaaaatcattcactttaaactgtgtcatattgaaagatttcatgaggatgtaaaatggctaatatacaattcagattacttttataatttggttcaaatggaaatatggggtggggggacgtccaata

SEQ ID NO: 705311 - DNA, 841 bp, Homo sapiens
ctcccagcctccagcatcctctgttccactttttacttccatgagatcaactttttttgtagcttctacctatgagtgagaatattcagtgtttaactttcagttcctggttcatttcacttaacataacgtcctccagttctatctatgttgctgtgagtgacatggtttcattcttttttatggctgaatggtattccagtgtggggagagagagagagagagaattaatttggagttcatgactccaaatttcttttgaacttgatccacaccagacctggtagagtttttttttaattattacttttaatttttgtgggtagatagtaggtgtatatatatatgtgtgtatatatttatgcggtacataagacgttttgatatgggcatgcaatgtgaaataagcacatcatggagaatggggtatttatcccctcaaacatttatcctttgagttacaaacaattaaattacactctttaagttattttgaaatatacaattgtgttattattgactgtagtcagtatatataacatatcacacattttctttatatcacacagtatatataaaatatcacacatttctttatcmattcatccgttgttagacacctaggttgattccatatcttggctactgtgaatagtgcttcaataaacacagggttgtaggtatcactttgacatgttaatgtcctttctttttttttttttttttttttttgtgagacggagtgtcactccagcccaggctggagtgcagtagcgccatcttggctcactgcaacctccacctcccaggttcaagccattctcctgcctcagcctcccaa

SEQ ID NO: 705312 - DNA, 635 bp, Homo sapiens
gttcaagtggagcgcatgtcaagccaccctcacccaccctgtgccccccaccatgctcctcagcgcccaaagtccggagggggctgaggaggcagggggctgatgtgtcagcactgccctgagcaagcatacacccagccaggttgcgacagtgcctgcctgggctcagcctcaactttgctccaaaatcagagcaggcactgggagagaggagaggccagtccacggggacagacacttctgagactgtgggggaagaggggcttcctggcccgagagtacarggatgcctgggtctggaactgcaacagggcagctgcatctgtgcctggtgagcagacagaccctgacccgccaacttagaaggggatggatcccccactcctgctccccatccccctccccatggggcacgcagccccagacacgccttcccagctgcagcccaagtcttcacagtggccgttctagacgggctgccactgccatcatatatatgtgtgtacgcactaaaaatagaattcttacaaagtaactaaaaacaaagaagacaagtgacccagtagaaaaagaagcggagtatatacacatatatgatgaagcaattcacacaagaacaaatatggatggtgata

SEQ ID NO: 705313 - DNA, 635 bp, Homo sapiens
gttcaagtggagcgcatgtcaagccaccctcacccaccctgtgccccccaccatgctcctcagcgcccaaagtccggagggggctgaggaggcagggggctgatgtgtcagcactgccctgagcaagcatacacccagccaggttgcgacagtgcctgcctgggctcagcctcaactttgctccaaaatcagagcaggcactgggagagaggagaggccagtccacggggacagacacttctgagactgtgggggaagaggggcttcctggcccgagagtacaaggatgcctgggtctggaactgcaacagggcagctgcatctgtgcctggtgagcagacagaccctgacccgccaacttagaaggggatggatcccccactcctgctccccatccccctccccatggggcacgcagccccagacacgccttcccagctgcagcccaagtcttcacagtggccgttctagacgggctgccactgccatcatatatatgtgtgtacgcactaaaaatagaattcttasaaagtaactaaaaacaaagaagacaagtgacccagtagaaaaagaagcggagtatatacacatatatgatgaagcaattcacacaagaacaaatatggatggtgata

SEQ ID NO: 705314 - DNA, 635 bp, Homo sapiens
gttcaagtggagcgcatgtcaagccaccctcacccaccctgtgccccccaccatgctcctcagcgcccaaagtccggagggggctgaggaggcagggggctgatgtgtcagcactgccctgagcaagcatacacccagccaggttgcgacagtgcctgcctgggctcagcctcaactttgctccaaaatcagagcaggcactgggagagaggagaggccagtccacggggacagacacttctgagactgtgggggaagaggggcttcctggcccgagagtacaaggatgcctgggtctggaactgcaacagggcagctgcatctgtgcctggtgagcagacagaccctgacccgccaacttagaaggggatggatcccccactcctgctccccatccccctccccatggggcacgcagccccagacacgccttcccagctgcagcccaagtcttcacagtggccgttctagacgggctgccactgccatcatatatatgtgtgtacgcactaaaaatagaattcttacaaagtaactaaaaacaaagaagacaagtgacccagyagaaaaagaagcggagtatatacacatatatgatgaagcaattcacacaagaacaaatatggatggtgata

SEQ ID NO: 705315 - DNA, 3072 bp, Homo sapiens
atgggatataatctcctggtgtgccatttgctaagacggttggaaaagcgcagtattagggtgggagtgtcccaattttcctggtaccatctgtcatggcttcccttggctacgaaagggaattccctgacccctgaccccttgcgcttccctggtgaggcaattcccggccctgcttcggctcacactccatgggctgcacccactgtctgacaagccccagtgagatgaacctggtacctcagttggaaatgcagaaatcacccatcttctgcattgctcatgctgggagctgtagactggagctgtccctattcgaccatcttccctttatattttttctaccctggccaccccagtctatgatagtgacctccccattttttcactctacagtgtactgttattctcaataaagtgggtcaatctgctatagggagtcaaattttcaatattttatccttccttctgatttttctcttactatcaacaatctaattattatcatggatctgtgggtccacaaacaacttggagaaaataattaataattatcacataagaggttaggttaaagagcagctttagcattgaaaatgtgcaactaaacaatgaaccaaacaaagttaaaatgaatgttcgggtgccttaatttttgcaaacaagttgggacagaagattcagatatgggaaatgattatcagatttcttttgattaggtggtgttttctttctaagtactttaaccacatacaaagatatcatgtgatcttagaaaaccagataaaacattgatttcattacagttgctgaatgtttatacacaaatccagttaaatgactgcttctatggtccatttccaaaacgtgaaataactggacaatattataatgacaagggcatggtaaaacatgaagagttttccaaatagcaagtacttttcctctccttttttaaacaactaaaatagaagaattgaagtacggtagattattaaatgcatgtgtttcatctgagctcttccaaatattaaatatactttccatagaaagtgctctattaggtctcagccatagaacacactcatgcaatggacatcttcctctgacggttgtcatatctagagcaaaatagaatcactgctcaaaaaccctcacagatgccaaaattcccatgaatctgggagttaacaatgactctcccctcaaataagcaaaaaaaagtgatttccttgtccacatggatgaaatggatggttttagattaaaaacaaggtacaaaacatacatccatacacatacttttatattatctcaagtgataatagaacacccaaagtatcaattcaaaatacatcagacttggtcacttttccaagaagatttaaaagcttttataatatataaaaattatatattatatatatttatacatacatatttagtgggaaaatatatatttaccgcaatatttataccagatacactatcacattaatagctaatattgagtacatgtttaataaaaggcagcatatttttaaaatctcatttaatccttatcacataattgttatttattttactttaagttctgggatacaagtgcagaatgtgcaggtttattacataggtatacatgtgtcatggtggcttaccatacctatcaacctgtcatctaagttttaagccccacatgcattaggtatttgtcctcatgctctccctccccttgtccccacccctcaacagaccccagtgcgtgatgttcccttccctaagtccctgtgttctcattgttcaactcccacttatgagtgagaacatgaggtgtttagttttctgttcctgttatcacattattattaagttagtactagtactcttgttattctcactttccagttaaagaatctaagaatcagagtttcagtaatttttcttggttttatcatctattaaatggagataataataacaattcctgtgagatagggttgggagtaataacttaaaaattaatgtttgttaaaaggtagaacagtatctcacacatagtagtgtatgtgtttgctattatagttaacagtaccagtaactgtaataagttgaccaacatcccacaactgttaccgcataatagttgaagctgaagttggaaccccagtatcacaaagtccagctcataaccactactctacactgcctctcattacaaacaagtggagcattgttgtacaaagagctcatcgaatgaggtactgcagaacatccccatatactgcatgagaatgatgggtcatgattaatggtggtgatggtataaaaagaaagagctaattatcggggtgaacaaggcccagattatctagggcttgatagaccataaccagcttcctgaattgcacttggaagcaaattggcagccagagcccatggagtgaagcacctcagtataatgtgttccctgtggctcactcccttagcactttatcccagagtttgttttatttgcttagtttagaagtaaataaaactgcacacagagctgttaagcgcacataaaacacaaaaatacaacatgttgagaaaaaaataaataaaagaaaaacaacactgccattctttctgaaccctcgggttctagccacagttcaggaaggtcctattgacaaaaatatgcccatsacatcttactggatggtaagtttcctgctgataaacaacctcctttaagattatcttagttacatgttgtaactcctagacgtggtcactaaatacaactgaataaagagatacttggcaaccatgagtagaaaacttagaaaacttgaacttcaacttcagccctttttcaggagttcttgctcttatacattacataaaaatcaaaatggatacaagacctaactttaagacctgaaaccatgaaactccttgaaggaaaacaggggagaagcctcttgacattggtctaggcaatgctttttggatagcacaccaaaagctcaggctacaaaagcaaaaataaataaatgggactccatcaaactaaaaagcttctgtgca

SEQ ID NO: 705316 - DNA, 611 bp, Homo sapiens
gctggttttgtggcttgtggggcatcacagaacctaccgacatgtgatgtctcccccggatgcccagctttaaaatttctctcttttgtactctgtccctttatttctcaaaccagccaactcttagggaaaatagaaaagaacctacatgactatcaggggcaggttccccgataaaggatgtaaaatatcttagcttttaaggaagagtttcttcatgttttttataaatgaaaaatgatggagtttcacattgctatggcwtttagactctactgggcacttttaaagcagtgatattaaggttttattttaaaatgtcagtatatacaatgaactgaaaatctttttatttaaaattatgatgcaaatttaaatattaacctaaaagatgagagaggacacaatttttaaaaattcttttatgaggcaaaagggtaaaatgcctctactgtgaactctatagaactctgacaataggtcactggcagtgtgttacattgctttaaatgtcagcattatagttctggtaagtgatttttctgagtctagttgaaaatctgtacttaaagtaccttggagacaatgatcagaagaaggaacaaatgaga

SEQ ID NO: 705317 - DNA, 2803 bp, Homo sapiens
tcacctgattgttttccagctgttccatattaaaataaattgcacacatttaaaagagccagtaaacagggtagtaatgattcgtatgctctcacatcttaatagtaaactttgtacagaattattttgggtataaataaggcagaaagcacatagagaaattccactaataggttcagaaagtgagaaaaagcctgtatgaaaaacatatgtatatattatttacatataatttttgtatattaatttatatgtataaattatacatatgtatatatatatacacacatatatatatatatatatatatattttttttttttttttttttttttttttttgagacagagtttcgctgttgtcacccaggctggagtgcaatggtgcgatctcagctcactgcaacctctgcctcctgggttcatgcaattctgcttcagcctccccagtagctgggattacaggtgcccgccaccacacccagctaatttttgtatttttagtagagacagggtttcaccatgttggtcaggctggcctcgatctcctgacctcaggtgatctgccctcctcagcctcccaaagtcttaggattatggacatgagccactgtgcctggcggagaacgatatttttaactatctcttttatgcaaggaaatataacagttatataaaacagatacattctttttttaaatttcaacctttactttagatacaggggatacacatgcaggtttgttacatatatacactgtgtgatgttgaggtttggagtatggatcctgtcacccaggtagtgagcatactatccaataggtagtttttctacccactcccctatcccttgatccctcccacctctaatagccttgatgccagctgaggcttcacctgattgttctgcagtgtctgttgttcccatgtttgtgtccatgtatgcccaatgtttggctttcacttataagtgagaacatgttgtatttggtcttctgttcytgtgttaattcacttaagattatggcctccagctgcatccatattgctgcaaaggacatgattttgttgtttttttatggctgcctagtatttcatgttgtatatgtaccacatttgtcttatccgatcaaccattgatgagtacctaggttaattacatgtcttagctaaaatagctgcattctgtcttctaacaatatgtgaaggtaagacaggaagatattccaaaaagaggaaagtcatggtatacctggaaatctgagatgttcttacaaacatcatctctgttagtatatgaaataggaatggattctccctatttctaggaaatgtttagagaaaagattgagaaataaaaatctaatttttttctttttttcaagacaagtcttgctctgtcactcaagctggagtgcagtggcataatctcggctcactgcaacctccacctctcgggttcaagcgattttcctgcctccgcctcctgagtagctgagattacgggtgcatgccaccacacccagctaatttttgtatttttagtaaagacagggtttcaccacgttagccaggctggtctcgaactcctgacctcaagcaatccacccaccttggcctcctaaagtgctggaattacaggcatgagccaccttgcctggcctgatgttttcaatacttgatcagtgaactgtagtttctactaaaagatttaattcagcaagcacagcaatggtgtgaatagaagcctaaatgtttagcaaagcagatatatatttaaacacacacaacaacaacaacaacaacagcataatggcaaaatatcagggagtaaatattaagtccttaaaagaaaaatgttttaaactagataacaattttaacctacacggctacagagatagcttgcttcttgtgcaaacaactgctggaataagacacaataaaactatcaaaatctaatatcaattttacttctaaattatctttctctcatttgtttggatgaagtcaggtaattaaataatatcacaatttatacaaaatgttatttagcatgaggactactaaaaagatacataagagaaatgaagtgctgcttaataactatctatggtatagatgatttttctcactttggctgctgcactttgtttcacactcaaggatttggggtccccagttgacctaagtcttccaaactggtgtgtcaactccaccatgatcctggcatatccctttaactttctgcctttcggttatagttttttccttggctatatattttttgcattaatttactttcttttcattgaaataagatgatgaaggctttttattctaatatccataaactctgactcatgctataattttacaataaatgtgttttgtgtgtcttaaaattgtttttccagattattatattcttttcctgaaattagtcaatttcaattagtcaatatttattaagttagacagtgtggaaagaaggattgatgggggttaaaaatggaagacttcgagggcttgttaacctaagaatacaaactggcaaatgataattgctgaataaggaaggcaataataagtgctataggtttccagataggttgcaatgaactggacaggtgtttttgttttttgttttttgttttattattatactttaagttttagggtacttgtgcacaacgtgcaggtttgttacatatgtatacatgagccatgttggtgggctgcacccattaactcatcatttacattaggtatatctcctaatgctatccctcccccctccccct

SEQ ID NO: 705318 - DNA, 649 bp, Homo sapiens
agaacacttggacacagggtggggaacatcacacactggggcctgtcgtggggtggggggaaaagggagggatagcattaggagatatagctaatgtaaatgacgagttaatgggtgcagcataccaacatggcacatgtatacatatgtaacaaacctgcaccttgtgcacatgtaccctagaacttaaagtataataataaaaataaaattaaattaaaaaaataaataaaaaactgttgaattatttgatccactcaatacctaacaggcgagttgatgtatctactgattttaatcctcacaattatactgaactgaatgattgttttggtgtcatgcacacaacacgcttaagttttccattggccatgcctatgattttgtgtcctttaaggtatgactatagtgatcccatatagtcaaatatctgggaagttcttgcaaaacatggagagtatctattactgtcaacatgatgtgatctcattatttacaagtaaaagttcagcaccaaattatagaacagatttcagaatasaatcaaactatagaacagattttaaactcattttcaaataagttttatgctatgaggaagttatttcaaaatattccatcacagaaagtgtgactcattgagaatcca

SEQ ID NO: 705319 - DNA, 589 bp, Homo sapiens
ttaaatagagatttgttaggcaatgccaaatgaaaatgtgctgtcataatccactggataaagtttagtttttacatcattttgataaatttacctcatttaccaatatagctacaaatcatatcttacggttgtcatataaaggcagtaaaatattacatacttcagatgaccttcacccagaaatgcttttcactgttcacattttatctgtcaaatagtactttctttagaagcaaatataactgccattacagagagaagctaccggcctgggacaagtcctagcatttagtgctctgacagatcttaatttggatattagccaaagtcaataaaacttgttcatgcagaaccttacctggttttcaccacatctagggggtgcatcaggcaaatttctacaagacctgaaagatgataaagaaaagtccaataaacacttatgtaaacactggttcttatttccttgatcctgtcgatttctcgagtgtgagggttcagataaagaacttgggacttcggatatgacagctaatagtaataggytagtggcaaaagacagaagcataatatgattttatttcaa

SEQ ID NO: 705320 - DNA, 605 bp, Homo sapiens
tcacttgtccaaatgatttgagtataaatctataaaaccaagtaaaaaggatataaacattaaccttttctacctagttataaatcgtttgctagccatagactatatcagtggcaatacataaaattttgctgctccaattgtacctttatctcaggaaatctttttagattgcaccttcaraatacagctccttgctattcaaggtgcagctcatggactagcaccaagcctggaggcttgttagacatgcagaattgcagactccctgcctcaaacttacttacataggtgattcatatgcatatcactctttgtaagtttattatatattaaacctcttctcttactcccttgaatttaacattttgtcattcctagttgtagtttttacttcaactcagtgtaatatataccattctccctgaaatagtaaaataaaaagggaagttataaaagtgataagttaatcaacctgtattctctatttactatttattttattcagatcccccaattattgaaggaaatatggaggcagcaagagcagtggacttaatcccatggatggagtatgaattccgcgtggtagcaaccaatacact

SEQ ID NO: 705321 - DNA, 631 bp, Homo sapiens
tgttggccaggattgtctccatctcttgatcttgtgatctgcccgccctggcctcccaaagtgctgggattacgggcgtgagccgccgtgcccggcctagttttttatttttaagacagggtttcattctcacccaggctggagtgcagtggtgcgatcatagctcactgcagcctcaaactcctggcctcaagcaatcctcttgccccaatatcccaagtagctgttatacgacgggtgcacgcaaccatgcctggctaaatttaaaaaatttgtttttttagagatggggtctcactacactccccaggctggtctcaaactcctggcctcawgcaatcctgcctcagcctcccaatgggggctccttgtttttagaagacacttaactgcattttttaaaaaacgcacgtgtaggttgttgttttttgagatggagtctcactctgtcagccaggctggagtgcagcaacatgatcacagctcacctcatcatttctagtagctgggactgcaggcacatgccacatccagctaatttgtctattttttgtagagctggggtttcaccatgttgtccaggctggtctgaaactcttaggctcaaacgatccgcccccaacagcctccc

SEQ ID NO: 705322 - DNA, 863 bp, Homo sapiens
ggtctcgaaatcctgacctcaagtgatccacccaactcggcctcccaaagtgctgggattacaggcgtgagcctccatgcctggttggtacttcttgtttctgaatcttgctgtcattacctaaaaatgagattaatctcatcaaccttacagggccactgtgaagactaaataagctagttcattaagtgtcataacattggcatattttaaatgctcagtaactagaagtctctccctacccaatacatccctattttatttggcttttctctgaaccttttgaaatctactgcctccaatggtcaacttaattcttttttcttttttttttttttttttgacggagtctcgctctgctgcccaggctggagtgcagtggcacgatctcggctcactgcaagctccgcctcccgggttcacgccattctcctgcctcagcatcccgagtagctggaactacaggsgcccgccactacgtctggctaattttttgtatttttagtagagatggggtttcatcatgttagccaggatggtctcgatctcctgacctcgtgatccgcctgccttggcctcccaaagtgctgggattacaggcgtaagccaccgcacccggcctggtcaacttaattcttaagttaatggtcttaattctcagatttcattccattttaatgatccaaaccagaaaaaatacagaatctcatgcttcatctcagtcctactgaattggaatctgacttaaaagttaaaacaaattctccaggtgattggtaaacattaaaatctgagaagcactggactagtacatatcataaacatagcagggccaaaacagagcccacacaccctctacaaac

SEQ ID NO: 705323 - DNA, 863 bp, Homo sapiens
ggtctcgaaatcctgacctcaagtgatccacccaactcggcctcccaaagtgctgggattacaggcgtgagcctccatgcctggttggtacttcttgtttctgaatcttgctgtcattacctaaaaatgagattaatctcatcaaccttacagggccactgtgaagactaaataagctagttcattaagtgtcataacattggcatattttaaatgctcagtaactagaagtctctccctacccaatacatccctattttatttggcttttctctgaaccttttgaaatctactgcctccaatggtcaacttaattcttttttcttttttttttttttttttgacggagtctcgctctgctgcccaggctggagtgcagtggcacgatctcggctcactgcaagctccgcctcccgggttcacgccattctcctgcctcagcatcccgagtagctggaactacaggggcccgccactacgtctggctaattttttgtatttttagtagagatggggtttcatcatgttagccaggatggtctcgatctcctgacctcgtgatccgcctgccttggcctcccaaagtgctgggattacaggcgtaagccaccgcrcccggcctggtcaacttaattcttaagttaatggtcttaattctcagatttcattccattttaatgatccaaaccagaaaaaatacagaatctcatgcttcatctcagtcctactgaattggaatctgacttaaaagttaaaacaaattctccaggtgattggtaaacattaaaatctgagaagcactggactagtacatatcataaacatagcagggccaaaacagagcccacacaccctctacaaac

SEQ ID NO: 705324 - DNA, 626 bp, Homo sapiens
tctgagccctggagacaggccagggactgggaggggagaagcagagctcagctggaagtggaactaggggaatgaaagtctactaaagccagaccagcattccatggttaaaggttctctgggcagcaggagcaagattaaaatgggattaatataaagaagaaaaagtaaaaaggctattttgactyaggcagagtaagattggaagactgtttgcatttttgccttaaatcaacatttctattttttttttctgttaatagaaaaaaaagttagacaaaattacttgatagttcaggacaaaccattccttctatctttacaccactattttgtttcacccatatttacatttgctggaatgattctggctgtacaaatctgatgtttgcttacaaaattcagcatctggattttggctatctggctatctgttgcttctaacatctttgactttagtcacaaaataacctttctccattctggatttcaggtccatgtttgcacaacagcaaaacatctagataacagaggagaaattcaggcatccatcacatgatcttcttctcacatagtaacttctcatgtagttaatagttaattttacttcctttatgcagatttaa

SEQ ID NO: 705325 - DNA, 600 bp, Homo sapiens
gaaaaaaggcatgagagaatggcaaaggaacatctacccttcctttttaaattttttaaccaaccccccttaaaaacactttgttgagacatgattacattcaaaaagctgtacctatttaatgtgtatatctcagtgagtttgagaataaggrtacattgtgaaagcatcactaccatcaagattataaacatattcatcacctcccaaagttctccctcccattctaattattatttttattggtaagaataattaacataaaattcaccctcctattatattttaagtatgcaatacagtattcatagctataagcactaagctgtaaattagacctcctgaacttatttatgtggtatatctaaaactttgtactgtaatcacacctacacacttacctgcaccacagctcctggccagtctaccctctgcttctgagtttgtttttttgagatttcaaatacaagtggaatcatacagtatttgtcattctgtgtttggtttatttcacatgacttcatgcccttcagatgcatcaatgttgtcacaaatgacagggtttcattattatataatactgaataatattccattgtg

SEQ ID NO: 705326 - DNA, 600 bp, Homo sapiens
gaaaaaaggcatgagagaatggcaaaggaacatctacccttcctttttaaattttttaaccaaccccccttaaaaacactttgttgagacatgattacattcaaaaagctgtacctatttaatgtgtatatctcagtgagtttgagaataaggatacattgtgaaagcatcactrccatcaagattataaacatattcatcacctcccaaagttctccctcccattctaattattatttttattggtaagaataattaacataaaattcaccctcctattatattttaagtatgcaatacagtattcatagctataagcactaagctgtaaattagacctcctgaacttatttatgtggtatatctaaaactttgtactgtaatcacacctacacacttacctgcaccacagctcctggccagtctaccctctgcttctgagtttgtttttttgagatttcaaatacaagtggaatcatacagtatttgtcattctgtgtttggtttatttcacatgacttcatgcccttcagatgcatcaatgttgtcacaaatgacagggtttcattattatataatactgaataatattccattgtg

SEQ ID NO: 705327 - DNA, 600 bp, Homo sapiens
gaaaaaaggcatgagagaatggcaaaggaacatctacccttcctttttaaattttttaaccaaccccccttaaaaacactttgttgagacatgattacattcaaaaagctgtacctatttaatgtgtatatctcagtgagtttgagaataaggatacattgtgaaagcatcactaccatcaagattataaacatattcatcacctcccaaagttctccctcccattctaattattatttttattggtaagaataattaacataaaattcaccctcctattatattttaagtatgcaatacagtattcatagctataagcactawgctgtaaattagacctcctgaacttatttatgtggtatatctaaaactttgtactgtaatcacacctacacacttacctgcaccacagctcctggccagtctaccctctgcttctgagtttgtttttttgagatttcaaatacaagtggaatcatacagtatttgtcattctgtgtttggtttatttcacatgacttcatgcccttcagatgcatcaatgttgtcacaaatgacagggtttcattattatataatactgaataatattccattgtg

SEQ ID NO: 705328 - DNA, 600 bp, Homo sapiens
gaaaaaaggcatgagagaatggcaaaggaacatctacccttcctttttaaattttttaaccaaccccccttaaaaacactttgttgagacatgattacattcaaaaagctgtacctatttaatgtgtatatctcagtgagtttgagaataaggatacattgtgaaagcatcactaccatcaagattataaacatattcatcacctcccaaagttctccctcccattctaattattatttttattggtaagaataattaacataaaattcaccctcctattatattttaagtatgcaatacagtattcatagctataagcactaagctgtaaattagacctcctgaacttatttatgtggtatatctaaaactttgtactrtaatcacacctacacacttacctgcaccacagctcctggccagtctaccctctgcttctgagtttgtttttttgagatttcaaatacaagtggaatcatacagtatttgtcattctgtgtttggtttatttcacatgacttcatgcccttcagatgcatcaatgttgtcacaaatgacagggtttcattattatataatactgaataatattccattgtg

SEQ ID NO: 705329 - DNA, 600 bp, Homo sapiens
gaaaaaaggcatgagagaatggcaaaggaacatctacccttcctttttaaattttttaaccaaccccccttaaaaacactttgttgagacatgattacattcaaaaagctgtacctatttaatgtgtatatctcagtgagtttgagaataaggatacattgtgaaagcatcactaccatcaagattataaacatattcatcacctcccaaagttctccctcccattctaattattatttttattggtaagaataattaacataaaattcaccctcctattatattttaagtatgcaatacagtattcatagctataagcactaagctgtaaattagacctcctgaacttatttatgtggtatatctaaaactttgtactgtaatcacacctacacacttacctgcaccacagctcctggccagtctaccctctgcttctgagtttgtttttttgagatttcaaatacaagtgraatcatacagtatttgtcattctgtgtttggtttatttcacatgacttcatgcccttcagatgcatcaatgttgtcacaaatgacagggtttcattattatataatactgaataatattccattgtg

SEQ ID NO: 705330 - DNA, 3429 bp, Homo sapiens
  misc_feature 2225, 2226, 2227, 2228, 2229, 2230, 2231, 2232, 2233, 2234,2235, 2236, 2237, 2238, 2239, 2240, 2241, 2242, 2243, 2244,2245, 2246, 2247, 2248, 2249, 2250, 2251, 2252, 2253, 2254,2255, 2256, 2257, 2258, 2259, 2260, 2261, 2262, 2263: n = A,T,C or G
  misc_feature 2264, 2265, 2266, 2267, 2268, 2269, 2270, 2271, 2272, 2273,2274, 2275, 2276, 2277, 2278, 2279, 2280, 2281, 2282, 2283,2284, 2285, 2286, 2287, 2288, 2289, 2290, 2291, 2292, 2293,2294, 2295, 2296, 2297, 2298, 2299, 2300, 2301, 2302: n = A,T,C or G
  misc_feature 2303, 2304, 2305, 2306, 2307, 2308, 2309, 2310, 2311, 2312,2313, 2314, 2315, 2316, 2317, 2318, 2319, 2320, 2321, 2322,2323, 2324: n = A,T,C or G
tttttagcttatattaggtttgtctgttctagaattttgtatacatttatttatattataggacactttttagcttagctttccccactcggggttagaaagattatattgatccatgatcatgatgtcgattcatagagttgattattcccatttattgataaatattactccataatatgcatataatttatcaatttcctctcaatagacatttgagctgttcccaggcttcagctattgttaatagaactcaaggacacatttttaaaagaaaaaatttcaacccaaaatgtcctttccttttggctctccaatattgtgtcagggttatatatttgttgtcttgaaaatccaattacattgaacaggaggtgtctctagaatcaaggttcagtatatggtggtctggctgtgtcctggaatgtagcccttattagttttattgagcattttcctatataaattgaaatcaagttgaagactcatttttccacagtaggacaaatagaacagtttaggactttggagagatagcaacttgctgcttgcctgtgcaacccacctcaaaagatacaactcctccaacttttgatttctggtgacttctccaaacaattagatgtgaattgaccttattcccttacattactacatgtcgatattctgcacctggccaaatacagtataaaactgatgagcatacatttcttttagtttcatattttctatttaaagctactctctttggctgggcactatggctcatgactgtaatcccagcagtttggaaggccaagataggtggatcacttgaggccaggggtttgagacctgcctgactaacatgatgaaagctgtcttcctgaaaaatacaaaaattttctgggtgtggtggcacgtgcctgtaatcccagctactcaggaggctgaggcaggagaatcacttgaacccaggaggcagaagatgcagtgagccaagatcccacctctgcattccatcctgggtgacagaattaacctccatctcaaaaaaataaaaagctaatctatacttttcttttggtgyattattagaacatagaaggcaataaggcaaaactattgtgggtatattagtgcgtatctgtagcacctagcacagtgcctagcccataacttgtgttgaaaattaagagaaccttcttcatgacagatcatttggagaacatgttatgggtgtgggagaaaaagattcctaactctccaccccagaaataattttgctgatacaaaaatcagccagacatggtggcacaggcctataatctcagctacttaggaggatgagtttgaggataaggatacattgtgaaaaaggtgggaaaatcacttgaacacaggaggcagagattgcagtgagccaagagtgccccactgcactccagcctaggcaacagagaaagactctgtctgaaagaaaaaaaaaagttgttgctatatagcacataatttcattgtcatctcatttaaaattgaatagcacatttgggttgaattcttgtgcctgcagatacatttgcttctggcttaaaatcactggctgtaggaggaaactccagcagagggcatcgtaaggatttcatagtgtctatggtcatcttggtaattcctcagataattcctggcaattctattaggtcttgaacttcacttacttcttacatgtttaataaaaagaagttcaaaacattgccatggctgttgaattcccacaggcttgtcttccctttaaaattcatcacatggtttgtactcttttgcagatataatacgtaagtttgcaggtggatgctttcagccaataagttcaaaagtactgctacaagggccaggcatggtggctcacaccagtaatcccaaccctttgggaggccaaagcaggtggatcacggtatcaggaaactgagaccatcctagccaacatggtgaaaccccatctgtactaaaaatacaaaaattagctgagtgtggtagtgtgtgcctgtcgtcccagctactcaggaggccgaggcaggaggattgcttgaacccgggaggcagaggttgcagtgagctgagattgcgccattgcagcacagcctggttacagagtgagattccgtcccccaccgccaaaaaaaaaaaaaaaagtacgctacatggacatccattggttcccagcatctctcccataaatagcggannnnnnnnnnnnnnnnnnnnnnnnnnnnnnnnnnnnnnnnnnnnnnnnnnnnnnnnnnnnnnnnnnnnnnnnnnnnnnnnnnnnnnnnnnnnnnnnnnnnatttctcgtgaggccagaaattgtcgccatccttcacatcggtgaatcgggaccctaacactcattacctcaggtttattgttattgccattaacagtgttggtggcattatcactaagatcatcattgttgttattattgtcatttatgattattagcaggtgtgttcatcattttgtctcactatgcattttttttttgtggggggtggggggattggttttgtatgacgttgaattgagcgtctttaatcttgaccagtgttgtcagatttctgaagagcattccggagacatctcctgcctttcagcacagccacagaatttcgtgggcacaggagagcacctagaatattcccctttcattgcacagcagctttgggaaatagttactgctggctctgagatgaggtagaaaagactggatactggggcaagtgttagcacctccactggtgtttttatgaagctaagagcactgtctcccacgtagacttagaataaaatctgatggctctaaagggccatggctgcccttcctgggacttcctgggaacctttaaaccttctgtggttcctggagtaggtaggttgccaagtctgtgcctcatatggtagcaccagtcttttctgggccaacaagggcacttagaatgtttccagaagctcaggcgtgctgtctctgttcctcccttctgttcaatggcaattccctgggtccctggctgatatagaacatcctgccgaaggttgggcttgggtgacttcctggccagccttcccaggcagtcatctttgaaaaccttgaagagactcacagaggctattcactggtatttcatgactgcaagtggggtttctggatccttgagtttacttagaatatttgaatggctctgaatggccaagaaaccctccctgatcttagaagctgccaaaagctattactgggccctgaagagactttaaaatttttccaagtacatttgggcataggaaacttttccgggtctagctgagccagctcaggttgagtcctgaaaaactggtgggtactgggggatctcaacttacgaaagagcaattggtggcaaacctgggtctcc

SEQ ID NO: 705331 - DNA, 1533 bp, Homo sapiens
tgataccagaattgggaaagtccaaggccccaggcattccctggtctggagacaactttgagtccttggtgggaagattctccaagggaacataaatgcttctactatctagtttgtctctttgagaattaaaactttttttttttcattccagtagcttttggggtacagtttggctctttgagaattgcayactaattaattttaggggccatctgtacacatctctatattcctgaaacatggtagaaacagccagcagtcaggcgacaatctacgatgaccactaaaatatccccaaagtgaaacactagatgtgatccactaggtttagtggaggtggctggctcgagagttgattatatttattattgtcactgtggtgattatggccacaacattgtcatgcgtgttggtcttcttttggtgagtttcagtttggaaggaataaatccattttttttttttttttgagtcttgctctgtcacccaggctggagtgcagtggtgccatctcagcgtgctgtaaactccgccttccaggttcaagtgcttctcctgcctctatggccaggctggtcttgaactcctgacctcaggtgatccacctgcctcagcctcccaaagtgctgggattacaggcgtgagccaccatgcccggccccattattcatttaaccaatatctgttgagcacattgggtgtgctggaggatgaactgcaggggagagaggaagcctcctcctgccactatgttttcaagttgtcctaatactccaccatgacacgcaggcttgtgggtcccagagatccagaagcatctcccgaccacaacatcctgacccagattctactgaaaaatacgcgagtctgggagagccatctctgacacttcccttcttttgaacggctgatctgtcagtcctggggagcccttatgaaagtgcagtgtgttttgtgaaacttgaggttgatcaaagaataccactttgttaagaaatctacatattgatgacatatgcagtggggtggaggtggggaaattcccaaatacattttaggaattatctcagaaggaggtaatagtcagaactcttggttgtcagtgacagaaactcatcttactagtgtggagtggaaaagggatcatgtttttctctgcactccccaaccccaaccccaagcagatcctgaaagagggacaggattgcaagtggattatttaggagatgattccaggggacaccaataggggagtgaggaattgattcatggaaaggtaggaggccacacagggggcttcaatgagcagcttaccactctaggcaactaggatttgaccccactggggacctctgagaggtgatgtggaatacatttcaaagttgttccatccagggggcaaagatattgaagcatttatagcctggctcccatccgtcactggctgaggactggtcccagggcatcaactctctggctttgctttcttcttcttctttttttttttttttgagacatagtcttgctctg

SEQ ID NO: 705332 - DNA, 1434 bp, Homo sapiens
gtcttgaactcctgacctcaggtgatccacccgccttggctcccaatatgctggaattattgatatgagccattgggcccggtcatgtcattggtgccttaaccaagcctcttttaatttttcaaacggaagagcccctgtccctcagttacggctgctgagccctttcaaggtgagtcagtgaggagggagaaaagcggaagtggctgtgggaagaggcggggtctgggccagctgctggtcctgctctcctccctcctttggcctctaggctcccaggagtggtttcgaacctgcgccrtgtgctctggaggctgtggcaaggcaggcgcggcttggaacccgcaccatgtgctctgggggctgtggcaaggcaggggcagcttggaacctgcgccatgtgctctgggggctgtgccagggcagggggagtcctcgtgtcccctgcgcacaacacagacagaaggctgggtccacccagtgggcggtcgggtgccaggccagtgcttaccccgccatgtttgcagcccgaggccagctggctgcaggtgcaggactaggcgtcaggggtcagggtgcacacatccctgcaggtctcggggctcctgggttgcttctggaagggcacagatgggacctgactggagctgcagaggggtggagcttctggggaaaggatccctcctagggggagtgtcttgggcctggggccacgtggcagggacagagacgggtccatggcagtgtctgctcttctctgtgaaggcaaaaagcctctgagggagtattacagccgcctcatccaccagaagcatttccagcagatccaggtctgcaccccctgactgcagggccaaggactacccccgcttctaggtgagaggccagcaggaggctcagggaggaggcggggccttaagcagggggagcaggggtgggcatgatgtactttttctgaaaaggtggctctggaggccacttggggacaggacctgggctctggctgaactcccgggaggaggctacttcctggtgtgccagcccctccctgccaggtcgccccagaggccctttaccaaggggtttgaggaggccacgtcctttcagtctgccacgccctccattgcatcctcttccttcctccaggaggctgggcctgggtttggggccactgttgcccaggtgggggagggcagtggctttgggaggaacagggacgatgtgtcaaacagcatcgcctctcccagtgagatggttctcctttgcctccgtctctttccccattgatttctccaagtggggagtcatggcttggtcctgatacgtctctagagctgcatcttccagcttcgagtgagcagagcagttggagtctgagggccttttcctggcaggattctccagctagtctttgttttagacagtcttgctccg

SEQ ID NO: 705333 - DNA, 1153 bp, Homo sapiens
tgaatttctatgtactaattttcaggtggaacagtatgcttgcagagggtccatttggacatagatacactttcatacattcatgtctttaacaagaatttgtgtccctactgtgtttgttcactaactcctttgaacctaccacataagctatatctgtattttccttgtaatttgggaggtccagtgcttcattacgctcatatgcctgaaactaatgaagaaaatagctckttaaccagctagtataaaagtagccaccaaatcaagtcaatcacctgccttaaattagcccagtactcccatcttgagcggagaagcccattctgaatcacagccaagacattgatggaaaaacaactccctctggggatcaaaaccacgctcactccaaatcctcctccccagagttctactcattgctcacccactgaacccagaactaaccagaagtgcttgaaatgaggacgggtagctccgtgtaccaatcggaatttaaaactctatcaattcctgctatagaaatgaggcttctccccaggaccagcattccacgaaggcagcccttttctagatggagaaaacagaacctgaagacacccgtttccctaaactgctctcgctcatgtgtaagtacaaatgaaaaatgctgaggctgcttctgttggcattgctttttaattatggccatcaataaatcattttgtccttgaacaagacttgagaatgacccgaaggcagaggcacaattccttaggaattaggccaacaaagaatgggctatctctcttcccaccccttctcttactctgctgtcagaaacagaaacgttctctgtgagtagctgggagtagacggccacacttgagttccatctcggggttctgttaacacagttttaccccatcctgcctcgatggccactgccacacaagctgcatctgttctttcttctgcgccttttgttacttcgttgtttttcctctttctagtgtagtgagctgaatggtggctttgcacaatatatatccagatccttgtgcctagaatctgtggaggtggcattatttggaaaaagggtctttgcagatgtaattaagttaaggatctcgagattatcctggagtaatttaggtaggctgtacatctaaag

SEQ ID NO: 705334 - DNA, 668 bp, Homo sapiens
aaaaatatttattttaaaacagaggtcagcaaactttttttttgtaaagrgccagacaggaaatattttaggctttgtgggtcgtatggtctctgttgcaactgctcaagtttgccactgtagaactaaagcagccgtggatgatacctaaacaaacgggtgtgactgtgttccaaaaaattttatttacagaaacaggtagtaggctagatttggcccatgaactgtagtttgcttaccctgatctaaaatattgaaacaaagcccactagtccagacaagtgcagtccagctattagtgccaatagcatcatgcatgagccatagtaagcattaaattacatatcagagtacattgatcttaagcagactattaactatctcagggcttcagtctctttatttacaaattcataaagaagcctaattagatattttgagtgtttttctaactataaactttggttatgtcttatatatacaaccagacttcacaagaatagaagctgcttgctacaatttgctgagcaatgtatgtagagagcaggtatctcttgtcactgataagacatgaagggtggaaattggtcactcgagtaaaaattataaattatgttaaacaaataataaaaggtaaatcacacttcataaaaattttatgtacattt

SEQ ID NO: 705335 - DNA, 668 bp, Homo sapiens
aaaaatatttattttaaaacagaggtcagcaaactttttttttgtaaagggccagacaggaaatattttaggctttgtgggtcgtatggtctctgttgcaactgctcaagtttgccactgtagaactaaagcagccgtggatgatacctaaacaaaygggtgtgactgtgttccaaaaaattttatttacagaaacaggtagtaggctagatttggcccatgaactgtagtttgcttaccctgatctaaaatattgaaacaaagcccactagtccagacaagtgcagtccagctattagtgccaatagcatcatgcatgagccatagtaagcattaaattacatatcagagtacattgatcttaagcagactattaactatctcagggcttcagtctctttatttacaaattcataaagaagcctaattagatattttgagtgtttttctaactataaactttggttatgtcttatatatacaaccagacttcacaagaatagaagctgcttgctacaatttgctgagcaatgtatgtagagagcaggtatctcttgtcactgataagacatgaagggtggaaattggtcactcgagtaaaaattataaattatgttaaacaaataataaaaggtaaatcacacttcataaaaattttatgtacattt

SEQ ID NO: 705336 - DNA, 787 bp, Homo sapiens
caatatatattttatttttatatttataaatccatttgttacttagccctaaatataatttttatgactagtcaacttaatattatccttgaaagctatcatatataatatatttttagtttcagagaccaaataatttgtcactgtggactaatgcacgtaacctcagtagaagactcccatttcaaatggcacatttcaaatattatctgttttgtgttgtagatttctgaataaaatctgttttgagaaataattatttgctaaaaatgtttgaacagctcatagatgataggttgatgatagatagatagatagatctatcatatagatttatggatttattatatttttaatttaatcattgcactttgataataaacatatgtgcatattttggggaagaaaatttaataagcttgatttcaaaataaattgaatttcagtgtaacttgaaagaatcttaggcaaatagctcatatcattgaattgtctcacaaggatctacacacacatacacacatactcatgtatacagtcatgcattacttaatgagggggatatattctaagaaatgtgtcattaggcaattttatcattgtgtgaacatcatasagtgcacttacacaaacctagatggtatcacctactacacacctaggttacattttacagtctattccttctcagccacaaatttatacagcatgtccctatattaaatactgtagcctgttataactccttggtaagtatttgtgtatctaagcatagaaaagattcaat

SEQ ID NO: 705337 - DNA, 654 bp, Homo sapiens
tgggaagaatcggtttccaagctcattcaagttgttggtagaatccagttccctgtggcagtaggactgaggtcttgttttctcactggctgtcggctggaggtcactctcagcttctagaggttgcttttagtttcctttcacatgacctcttctaccttcaaagccagcagtggcagtacattgagtccttcttatgtttgaatctctgacttcttctcccatcagctggagaaaattctgattaagttagccccatctggaccatctccttttcttaaacttaactgtgccatataacaaaacttaattgtgagagtaatatttcatcatatcacaaattccaccctttccaaagggcagggcttatagaagggcgaatgttattgcagsgtcatcttagaagtctgccagccccagctgggataatgattaaaaatgatgatcagtttcttgtgcattgaaataaatctcttgagtatagagatcagctgttcagaatatggtaataggaataaaatgtttaatttttataaagtagaaaggcaccattacattctctccatagaataagagagagaactagagaaaggcaagatcaaagaaaaaaaaattgctgaaggagtgataaacttctgatgtgtgatttttcta

SEQ ID NO: 705338 - DNA, 1104 bp, Homo sapiens
ccataagtttacttacctttaggtctggctttcttatggctctatttatgatatactcctcatctgtcatgagagggtggtcaggagtgagaccaaatgcgctgtttaatgctgacaggtagatccatattacctttttccaagagtaaatttggaattcatcctgaggagatagacatcaaaacccccaagaagttaagagaggtcagcaggctacaattcaacctgagaaacatcattttaatataattctgtaagtgtttggcgttagtgaatattctagacagaacggtttgtctctgaaagatgatggatctagaaccttgagggaaaaagacctgtcatcactgactgaggaatctggatatgaagatgaggcactgacacataacaaagcttgagaatcaggaggctcattcgcaggtaagaactagttcactgcatcacctttcaaccacctttcagcccatgacctgatgaccatccccatctttcaaggcttaactcaaattccacctcctacagaacagcctcattaacacccttccaccggggcggggcaggggggggaactatcactttgttaactccaaaaaaatgttaagtgtccctctcttgtgctcttaatcactttttctagtccttctagactacctggaatgyagggatcacgttttattgttccttatctcccattcatgtggagcactgagacctgctcagtcagagtctgaagaatggaagaaaaaaactgaatccatggactgaacctgcccaaggtaattgccaagatgttagcacaggtggggttgaagaaggcaccttattgcatgaccctaattaaaattgcttccatttgcagttcactgattacttcacacagagtaaaattagagggagaagcacaggattgagaaacagataccacaatggtcccttagagacctatttgacagtggttattgtctgaatagggaaatactaaacataaaacccactcagatgactgacaaacctcaggattcaagaagtataacagaaaaagtcaaacgtgggaaaaatttgatgcttgggaaatgtaggtcagagctggaaattgtctcc

SEQ ID NO: 705339 - DNA, 937 bp, Homo sapiens
gagttatgttttgggttgagtttgagaagataaattagcagcctacgctaggctgccatctttctggaactggaattttggtttacacagtgagagtctttttttttttttaatgtcagcacatcgatcatttaagagtttctttatgtataataaagaaacttttttttctttaagagacaggatctcactctgttacccaggctgtaatgcagtagtgcgaccttggcttactgcaatctcaaacgtctcaggcccaagccgtcctcccacctcaatctctctagtagctgagaccacaggcttgtgcccctatacccggctaatctttaaaatttttttgtagagagagggtctcactatgttagtcaggctggtctcaaactcctgggctcaagggaacctcctgcctcagcctcccaaagtgctgggattataggcaagagcaaccaggccagaacattttagattaataaatatttcaaagattttcaaatttgctgttggaggttcattgctcttttaaattcatctatatgcttctttccagacatcctttatccttgtttattttttgcccatcagttactggagagggcagtttgcatgtgccagtctttacagcttttgtagtcattattgtgataagtattttggctcaatgctacttagtaaagattcatggaaattataatttattatgaaatatacctttactggtctaacatttcttgtgtgtttttttgttttttttttttgcctgaagtctatatttcatgatatamtttattaaaataatatcatttaataatatatccatttagaaaattattgttatttatgttgtctcatattaatgtaatggtaacaacttttcttttgtttttgtttttttccttattaaatgagacggagtctcgctctgtcacccaggctg

SEQ ID NO: 705340 - DNA, 645 bp, Homo sapiens
ccagcttgtggtactttgtcatggcagccccaggaaacctcagaggcaggtaagagaagagctctttggaaatctgtaagtgtgtattggtttcctatcagcagcaatatctggttttcacttttttttttttttatggtagcagctactggtgctcaatgcctagatttatccattaattaggcttgcatactagtaatgttctaattctactactttgcttttatttatgcaatggaataattttataagatgattcttcctctcgtctatttggttaccagtgctgtggttcacacgggaaaagcaggacaagtgcttgatgttcccccttataaagttttcatgataataagttgggtctttaaggtttcttactttttatttttattgtatccattttcaaagtcatggttttaaacatatttgataggtttcaatccattgaaattcttattyttatagaagttcaaatgttcccatctttggccagtgagagcttcagactggcttgccaagtccttttgacattgtgtctatgccatttagtcctcaaagcaattatttgatgtaggtatttttatctctattttacaggtgggtttactgcagttaagtgctttgcccacagctacacagtaaatg

SEQ ID NO: 705341 - DNA, 659 bp, Homo sapiens
tgccaccacgcccggctaatttttgtatttttagtagaaatggggtttcactatattggccaggctggtctcgaattcctgacctcaggtgatccgcctccctctgccactcaaagtgctgggataacaggcataagccaccacgctcagccccctccttactcttaacttctccccttaatttgctactgtgaaggtgagatagggaagaggcagggagcaaacaagtcttttctcatcagggactgtcacgagcggcacagcatttcctgggctgtcgggttttaagactcactctatgtcaccctcactccattctcctctcacacgtagagaataaatctccaggctagctgcttgcttattcccttgggggctagaaatctgacaattacttcttttctttgtggagctatttttgcccctgtagtttacccttctgggtaggacctaaaataaccccctcatatgaggcccacatctatgccttagaaaacatgaactcatctttgctccctaaattctgtmaccactggtgacccaaccccaccaccacttctttagctcttccatcttagccagccatctcttctctctcacttgagatttctcagcagagatcagaaaacagtcagctgacagcccaaactgggagatcc

SEQ ID NO: 705342 - DNA, 1609 bp, Homo sapiens
  misc_feature 1220: n = A,T,C or G
aaggatggaacatattgacaggtggagggaaggtgggtatccttagaagagaatattctggtatcttgggtgttaatacttaacaaacaatcactatattgtcttgtgtggttactttaagcctctgcttttacccctaggtccccaggcatcacgtaaaagtttctcctggattttccaactgttcacaactttaattttgaaacacttgccttgacttgttctacacattgcattctttcccctttttggtttttcagtttctagactagctttcaatcttaaacttgatgttcagatcctggtttcttctggaccacagaagttttccctccatctgcatttagattgctttagtttaactcctgccccagttcagccaggcccaggattggtggtggtccagcccacagccattctctgaggccaccccaaatccacgagtaggatttgaacaaacccgattgatgtcaaattttgtttctcaaaatctctccaaaacatatgtttccattttagacttatgaatatggatatacaatatactgaattgcatctttaataatcaaggctctcatattgtctttgggcttcatcagtttaaacacttgttcttatatattacagtaaatctatataaaatgtttattatatgtagaagccagcctatactccatcaaaatatttattaatactttaatttaattaatcaaaatgaatttattaaatgccacttgtcaacgaactaagggggtggctgtaaatgacatcagagctccaagtaggttaaaaagagtaagaaagttgatttcacaagaaaatcagcaaccaaaagcaacacacgatagataccaaatgaatgacacgaacagcaagcgctctcagaattcagagctgtgagaaagatccccaccagatggggtggaatttgagctgggcctcgaggaagagctgggatttcaataggaagagaggagggcgaagccactgggcagactggatggtatgaacaaagatggaggggtcaggaggtacctgtggctggaaaacatcaaagagctccagttctattgatcggcaacagcctgtattgctttcaggtggtcattgtgttacagtaaaatttgagttcccagataagaatgactggcactttctgaagacctatgttaaaaagcagaaagaaatataatggtgctgggaggtagttcgtttaactnacgcaaagctttaatcactttttcaccgtgaaggagaggtatggccatcgttagggattggactttttatgtttagcttctctaccaagaaaaaaaaatctctttggtcgccttactcaggtcattagagagaggccttctctggagaattactttgtggataatttcactcaccgcctagtcagattaagacttaaactgaagataatgacattttccctgrcttgttgcttctgtgaactccattgtgacagcttgtatttaaaaggtgaattttataaactgtgtgtctgatgggatttttaagtttggtgtgaaatgtgttctgtacagctgtgactcagagggttttgattctctacaatttagcagccaaatgatttccagtt

SEQ ID NO: 705343 - DNA, 1609 bp, Homo sapiens
  misc_feature 1220: n = A,T,C or G
aaggatggaacatattgacaggtggagggaaggtgggtatccttagaagagaatattctggtatcttgggtgttaatacttaacaaacaatcactatattgtcttgtgtggttactttaagcctctgcttttacccctaggtccccaggcatcacgtaaaagtttctcctggattttccaactgttcacaactttaattttgaaacacttgccttgacttgttctacacattgcattctttcccctttttggtttttcagtttctagactagctttcaatcttaaacttgatgttcagatcctggtttcttctggaccacagaagttttccctccatctgcatttagattgctttagtttaactcctgccccagttcagccaggcccaggattggtggtggtccagcccacagccattctctgaggccaccccaaatccacgagtaggatttgaacaaacccgattgatgtcaaattttgtttctcaaaatctctccaaaacatatgtttccattttagacttatgaatatggatatacaatatactgaattgcatctttaataatcaaggctctcatattgtctttgggcttcatcagtttaaacacttgttcttatatattacagtaaatctatataaaatgtttattatatgtagaagccagcctatactccatcaaaatatttattaatactttaatttaattaatcaaaatgaatttattaaatgccacttgtcaacgaactaagggggtggctgtaaatgacatcagagctccaagtaggttaaaaagagtaagaaagttgatttcacaagaaaatcagcaaccaaaagcaacacacgatagataccaaatgaatgacacgaacagcaagcgctctcagaattcagagctgtgagaaagatccccaccagatggggtggaatttgagctgggcctcgaggaagagctgggatttcaataggaagagaggagggcgaagccactgggcagactggatggtatgaacaaagatggaggggtcaggaggtacctgtggctggaaaacatcaaagagctccagttctattgatcggcaacagcctgtattgctttcaggtggtcattgtgttacagtaaaatttgagttcccagataagaatgactggcactttctgaagacctatgttaaaaagcagaaagaaatataatggtgctgggaggtagttcgtttaactnacgcaaagctttaatcactttttcaccgtgaaggagaggtatggccatcgttagggattggactttttatgtttagcttctctaccaagaaaaaaaaatctctttggtcgccttactcaggtcattagagagaggccttctctggagaattactttgtggataatttcactcaccgcctagtcagattaagacttaaactgaagataatgacattttccctgacttgttgcttctgtgaactccattgtgacagcttgtatttaaaaggtgaattttataaactrtgtgtctgatgggatttttaagtttggtgtgaaatgtgttctgtacagctgtgactcagagggttttgattctctacaatttagcagccaaatgatttccagtt

SEQ ID NO: 705344 - DNA, 1113 bp, Homo sapiens
ctgcctttgagagttttgctgtttgccttctttatcctgatgctttgaaggcttggagtattgaataaatggagaaaagatctaagaaccaagtaatggagacacacagttcagtttcagagagctcacggcaaccacagaacacacgatgattaagagattaaattatgtgaccaaaggtagaccctaaatcctccaaattatatatgtttcccagatccatgggtctacagagctggcaaaggagcaggtgctgcttacccaaaacattggctcctttagcatcatctgtgctctttcccagccaagggcacctataattacctcccataagctgaactctcaaccctgcctcgctccacacatacccactgctgaaaattgtattggcaattaatttgtcaggaaaatgctaggggrtgtgaacactggtaattttataccatagatattcaaattaaacctcgagcctgagtattttcagtgtcaaattgtagcatagttgcagaaaaagagagaaacacaaacttcctcctgctatctcctgactagaggtgaaaaagaatgttccatgtggatgtgataaccttggctccatctctagggttgacttgggaacatgaacaacaaaacacactaattatgggtgataccttttgtgctcctctttgagtgaaaggagatggggttggtggttgttctgtatcattcctcaagtgacaagaatcattttaatgaccagtagcgtcagataccaataacttgtagaagcccactccaattctgcacctgattttcgtgagattactgtgagagtactgtgtttatagacccttggtcaattgacagccatgaaaatagcataggacaaaagagcaccagcataacaccaaacagaaagtcccccaaactatctcatgtacacaaggaaagcctctggaacactggagctgaatcaaaacaaagagcttaaagcttcagattctcctgggactattgttttaaagattcattttgttaattattttgaaagaagaaagaaaactaacattgacagcctacttcaagtcaaaaattgtgcatacattacatcatttaatctttatatcacac

SEQ ID NO: 705345 - DNA, 1113 bp, Homo sapiens
ctgcctttgagagttttgctgtttgccttctttatcctgatgctttgaaggcttggagtattgaataaatggagaaaagatctaagaaccaagtaatggagacacacagttcagtttcagagagctcacggcaaccacagaacacacgatgattaagagattaaattatgtgaccaaaggtagaccctaaatcctccaaattatatatgtttcccagatccatgggtctacagagctggcaaaggagcaggtgctgcttacccaaaacattggctcctttagcatcatctgtgctctttcccagccaagggcacctataattacctcccataagctgaactctcaaccctgcctcgctccacacatacccactgctgaaaattgtattggcaattaatttgtcaggaaaatgctagggggtgtgaacactggtaattttataccatagatattcaaattaaacctcgagcctgagtattttcagtgtcaaattgtagcayagttgcagaaaaagagagaaacacaaacttcctcctgctatctcctgactagaggtgaaaaagaatgttccatgtggatgtgataaccttggctccatctctagggttgacttgggaacatgaacaacaaaacacactaattatgggtgataccttttgtgctcctctttgagtgaaaggagatggggttggtggttgttctgtatcattcctcaagtgacaagaatcattttaatgaccagtagcgtcagataccaataacttgtagaagcccactccaattctgcacctgattttcgtgagattactgtgagagtactgtgtttatagacccttggtcaattgacagccatgaaaatagcataggacaaaagagcaccagcataacaccaaacagaaagtcccccaaactatctcatgtacacaaggaaagcctctggaacactggagctgaatcaaaacaaagagcttaaagcttcagattctcctgggactattgttttaaagattcattttgttaattattttgaaagaagaaagaaaactaacattgacagcctacttcaagtcaaaaattgtgcatacattacatcatttaatctttatatcacac

SEQ ID NO: 705346 - DNA, 612 bp, Homo sapiens
tgcaattaaaatttcactgggatttcattttatttattaaattggctaggatcataaacaayagtaaaactctgtgctaagcagcacaggaaaaaatggttgctttttttttttttttttttcttaaagacataaaaaatcagattcccatttagaattcttaatttttttttttttttgaaacagggtcttcctctgtcaccaaggctggagtgcagtggtacaatcatagtttactgtagctttgacctccctggctcaactgattctcccacatcagcctcctgcgtagctgggactacaggtgtgtgccactatgcccagctaatttttattttggagagatgcggtctccccatgttgccagggctgttctcaaactacttggcttaggggatcctcccacactggcctcctaaagtgctggtagtacaggaatgagccaccttgtccagcctcttaaactttttgaagttagccagattgtggcagtattcaaagagttgaatgttcattgtcctggggacttgacctctattcttctcaacttgccttcagcccttctcttccgtcccttgctctgttctgcaccatgagggcctggcttactaa

SEQ ID NO: 705347 - DNA, 1612 bp, Homo sapiens
aatataatgtgtgtgttaatattgaagttaaagtataaaactacaaataaattttgcatgagttggatttcttatgactggccctgctcccagaatctgcataggcatggatgcactctcaatcactgtgggtatctttggtggaagcgtgtaagaagcatgatgtatattaatcagtttacatttctgtgaactaagtaggtatactcctatcatttacttacttttttagataaagaaacgaaggctcagagaggttaagtaacttatctaagctcacacagctatggtacaaacactataggaacttttcaaagtcttcaaatactatgttcttttcattttctgatgaattaataggcagggttaggtctgggtaaatttttgagaaaggtgaaaatttgtcttttctttctttaatttttgtactatctttattctctcctcgtgtaacccctcttcccagaaataaaaaaacacccagtgctctttctctgttcagatatgaacatccatctgctaagcattgcaggtctgcttatttattaactggaagaaatggctgatatttcagaccttgtacagtggttctacatggtgatggtgatggaggtgacagtagcagtaagtgcaagagtttcccttaagtcacgtatgtagtcaaatctgttcttgttgaggctaacctagagagtggaggtcagtagtgggcagagattgaaaccagacaaacctctctgtgtgacttcaaagacttccttgtctttaactccaggagtctagtggtagtagggtcctaccacttatctggtagggaagatcaaattgtcttgaattctagaaactcccagatggaacaaaacaaaagaaagtaattgggaggcacaaactgtaccctcctggcgccttcgtgggagtcttaccatatttttttccctttccccttctcagcactgtgctgtcgcccaagcaccaggggaacccagctgcctggttttctttggcggggtcttgtggctgctttttagtctgtcttgttatctctctcctcagctgaccctagaaatgcttaatttggctgtgtgaaagtaatgctaatttcagtcatttaagtaatcatttgccatttatactaaattgccgtgtaatattacagtgattatgcatatcattaaatatgtgtcacattagtcttgtggtgggttttatttgattatagcactaaatcatgctcaggattcttagacttcttagtttgttgcttatattatattgtgatcattacataacttaaaaacttagggagaatgttgccattgagggaaagtttgagagaacacatctatttcccttcctgcctcattataaccatgaaattgacagcattggtatcattcacatctttcaggtctctaaatttacctttttgatctcacaacgtggattgtctacacaaattcatccttttgaaacatttaatgaataatctgttttaaattgtgttttaaaaagcttatctgcatttcctattgaatcaggttattttctatgttcaccatgagtcttcacccatatgcataatrttaatgtataaaaaagaataattgctgtc

SEQ ID NO: 705348 - DNA, 1128 bp, Homo sapiens
aaatttttctgttaataaaaaagtgggtaaaatagtttgaggccagtgactttgtatgtgtgtgactgtctttgtaggtgtttccatgtaaatgaaataaaaagctccgttatctttataaaaatccaatttcaaacacactaatcttattatataaagattgccatataaaatatcattctgtgttttaagatagacttagtaggtagatatccttcttccagcagtgtatgtgtgtgtgtgtgtgtgtatgtgagcacacatgtgcctgtatatttaggtagaactggtgcacgtggttggggagagtctgtggggagacgtgctgatgtgctgatggaatacagcttaggagggagggatagctggagacaggaaatatttttcctgttgctttgtgatttagcaattcatagctagagttgctgccaagcattctgaaattttctgaagtgactgaatttaacatttggggtaactttttatctctactcacctgccctttgatttagatgttgttcagagtagaataagtcatacttggatttccatccagctttatgctttctgttgaatggtttcaggaaagttatgtaacttccctgtgcctcagtcttctcattggtaaaatatcaataataatagcacttatttcatagagctttaggaagattgaatgaggtaaattatgttaggtgctaagtagaatggctggcactcattaatgtaaacaattattgtaattattaaatcttaaayattgaaactggaagggacctttaaaatgcattggactaaacccttaattttatagagtataaaatttaattactgagatataaagtactacttttaaagtcatacaaccaactagagtagagctcaaacttgaggttttcatgactcttaggattgaatattctgtttactgaaaaaaatcagataaataaataaatgaacaagagagtattgtaaataaagattgcagataatattcaagatacattctagatataattgtgattctaaaatgtagagaatgaatcaagttttctggagattctaaaaatattttggattgttatcactatgaatggtttagatagggctttggaacacatatgacaa

SEQ ID NO: 705349 - DNA, 592 bp, Homo sapiens
ctctattgttctacaaaacttagagccaaaatgcagcataacatattacaatttgatggagaaaaaaaaacagagctgaaagaaggaaaggcagagtttctatataagacaacataaaggtgagccagacacagtagctcacatctgtaatcccagcactttgggagggcaaggcagrcagatcacaagttcaggagttcaagaccagcctggccaacatagtgaaaccccgtgtctactaaaaatacaaaaaattagcctggcatggtggcgagtgcctgcaatcccagctacttggaaggctgaggcaggagaattgcttaaacccaggaggtggaggttgcagtgagccgagatcacaccactgcactgcagcctgggtaacagagatctgagaaagagatatagtaagagagaaagaaagaaagagagacggaaagaaagaagaaagaaagaaagaaagaaagaaagaaagaaagaaagaaagaaagaaagaaaagaaagaaacaaagaaacaaagagagaaaaaggaagaagaaaaagaaagaaagaaagatagaaagaagattttgaaagaaagagaagggaaggg

SEQ ID NO: 705350 - DNA, 745 bp, Homo sapiens
tggtggtcaattgaaaggatgaatagagatgaataaggagagtgggccccgcatccccttagcctgaatggaagatgagataggtcacactccaaggtaggacagagtgaaaagtttacagtgagggcctaggaacctcttttgaactcttgtgaggaggaatggtggagggggctaccaaggaaggtaatgaaagacttaaggatacctagaattaaaggaaggggcctatttagaaaggcacattgtagaagaagcctggagcaggcctgggaaggaaagagactctgggcaatatggaggaagggcaaggggtcagggctcagctatccagaccaaatcccaggagaactccaggactagtatcatcttccatgttcttgacacagtggcactaaatcatgtgccagtggagcacatggtgaagctccagggtgaaggcatcatgtctgaggccaggataggggctggggagaatagaacatttttaagactgtgggagactggcaatcttgggctgtctcagccttgcagaatccctcaayccatcgcccatctgaaggcagaactggggcagctctttgcatttgaaggcagccagggtaagtagagtagacatttacctgtgtggaatggtcaaaagggtgacaggagccctttggaattgatacttgaaatcctaccagttgcctttagaattaaacaatctgtctcctagtggcaactactttgttgttttccatcc

SEQ ID NO: 705351 - DNA, 1282 bp, Homo sapiens
cttgtaaggagaatggggaaagaaggcagccttgggatctccaggttggaagtggtccaatttccgaaccagggctggactctctgctcaagtgcccttgccttgggaaagacccttctacttgtttctccaagtcagcttaactcctctcacaagacagctcctgcactgtggggcaactgggccggggtgaaagttcttctttagagtgactcctgtaacttccaagcaagaagaggctgactctcttccctacaaactatrgtgtggtttatcttcattgaaagtgaccattggccaggtacagtagttcacgcctgtaatcctagcactttgggaggccaaggctggtagatcacttgagctcagaagttcatgataagcccatctctaaaaaacatggaaaaccccatctctaaaaaagaacaaaaattggctaggtgtggtggcgtgtgcctgtagtctcagctacttggaatgctgaggtgggaggatcgcctgcacccagggaggttgaggctgcagtgagctgagattgtgccaccgcactccagcctgagcaacagaacagcaccctgtctcaaaaaaaaaaaaaaagaggaaaggaaggaagaaagaaagaaagaaagaaagaaagaaagaaagaaagaaagaaagaaagaaagaaagaaagaaagaaagaaaaaggagggaaggggagtagttggaaggggaggggaggggagggaagtgaagggaagggaaggttgtggaaggaaggaaggaaagaaagaaggaaggaaggaaggaaagaaagaaagaaatcatcacaccccaccctcagccgtcttccttgatcttttttccagtcctttctctgctctagtttttgcctctgtgctcacattagcttttcaatgggtcactttaacttccaagatgctcaggactgagctcaacacccagagaaaagagctttctcccacgatcaaagattctctgtatcaggaaggatttagctgcttccttatgtctttgcaacttgtgaacagaatcaagagaagtctttttgtttctatttttcccagtaagctttctgaaatatccaaaggatgtaatcttcatcctcaccctccctgggagccgctgcgttgtggtgaccatcacaggtaccatcattgcatgtagagaagcctttgtaccagcagaggacactccatactgcctagagagaatacgcagggcctattgacagattggaaatcgggcgtgggcccctgggaggggtggggataaacccgca

SEQ ID NO: 705352 - DNA, 1231 bp, Homo sapiens
catgccttccaggcatcatactgaatccttccattttatttaattttgaggataatttattcaactctcactattcagataataaacaattatcctatgacagacacagatgtgagaagtaagactcaagttaaataacttgcccacacccaactcctaaatgacacggttgagatttgaagcagttttctgactgaccacaaagctcacattctcctaaccactctgcagtattgccattattcactgtcctaccttctaacaattagaattcagtttgataaaaacatatactattgtgacctctatgtatgccaaagttctgcaaacttctccaacttcagtgtaacttaatgaagtagaacaaatcagtttatccatgttatgttctattcagaatttgtggcattcactgttgttatcttagctttgtttactctctgttgttcttactgaaactgcttctcatcttcagacagttytcagcagcagtaaaatcaatctttgtgaggccatgctattaaaaaaaattgggaggtaagatacagaaagatgtatttaaagtacatgatattttccatcctttctcttctaccttcaaagatagaatccagcgtatagggattttccccatctgaaaaaaaatctattctgacagtgtatgcagaaataaaattctactaaagtacccattttcttctcctaattttttaagtgtaaactactataaaattcaaatggaattaagtttttttttgtctgaagaacatattcaatatgcaattttagttcttcagtttcccattatcgggctgggtattctgcatatttctccccttaatttgacatggcatgtctagtctaataacacgaatcttccctctttttgtttttggatggagacacaagatttggtggtgggtgacaatggctccagtgacagtgtgcaattaagaactttgtgcataactcatggaaatcccatttttactttgcacacatgccacagaattccaactgagtgttccctagcctctgggggagagagaagaaatgcttcaagaagtgtttttaattcttagagcatttcatttcagatttcttaaatcattaattgatataggtcctataaagttcctccatttaatcaattgctttggtttacgttgacactgatttgactttagaactagattccattcctctttcttggtgtccataataaagctct

SEQ ID NO: 705353 - DNA, 1231 bp, Homo sapiens
catgccttccaggcatcatactgaatccttccattttatttaattttgaggataatttattcaactctcactattcagataataaacaattatcctatgacagacacagatgtgagaagtaagactcaagttaaataacttgcccacacccaactcctaaatgacacggttgagatttgaagcagttttctgactgaccacaaagctcacattctcctaaccactctgcagtattgccattattcactgtcctaccttctaacaattagaattcagtttgataaaaacatatactattgtgacctctatgtatgccaaagttctgcaaacttctccaacttcagtgtaacttaatgaagtagaacaaatcagtttatccatgttatgttctattcagaatttgtggcattcactgttgttatcttagctttgtttactctctgttgttcttactgaaactgcttctcatcttcagacagttctcagcagcagtaaaatcaatctttgtgaggccatrctattaaaaaaaattgggaggtaagatacagaaagatgtatttaaagtacatgatattttccatcctttctcttctaccttcaaagatagaatccagcgtatagggattttccccatctgaaaaaaaatctattctgacagtgtatgcagaaataaaattctactaaagtacccattttcttctcctaattttttaagtgtaaactactataaaattcaaatggaattaagtttttttttgtctgaagaacatattcaatatgcaattttagttcttcagtttcccattatcgggctgggtattctgcatatttctccccttaatttgacatggcatgtctagtctaataacacgaatcttccctctttttgtttttggatggagacacaagatttggtggtgggtgacaatggctccagtgacagtgtgcaattaagaactttgtgcataactcatggaaatcccatttttactttgcacacatgccacagaattccaactgagtgttccctagcctctgggggagagagaagaaatgcttcaagaagtgtttttaattcttagagcatttcatttcagatttcttaaatcattaattgatataggtcctataaagttcctccatttaatcaattgctttggtttacgttgacactgatttgactttagaactagattccattcctctttcttggtgtccataataaagctct

SEQ ID NO: 705354 - DNA, 611 bp, Homo sapiens
taaatgtaagcgaatacaaaaaaactcttttagattatgtgaaagatatacatttcaatgaaacatgatctgtatccttaagcttaaacactaattgtgaagacagacagacagacatgcatgcatgttgacatcaaggtaggtagagctcctgaaattgttactatccttctgctgaactttgagaaatgccaccamatggaagtcctactccagtgtcccattgctttatgttagactgctcgaaaatgaacactactcctgatttgctttgagttaggtttgacgtacttggcctgtgaaatttgaagtctggacattttttaaggaggggcaaggagaaagaggtgcaaattttctgaattatacaattaggctacactgaatgtggtacttggggagtacagtagacttgattaaatcaataaacaggatttgctcaaattcaatgaatatgacgaatcttgataatacggtttagggttccacattaatgctacattataaaatctgaatttttataatgtaggctgattcggaggcatttccaaagaagtatcaccaaactgtctatattcccaaaatgatgacttaaaatatcactttcaact

SEQ ID NO: 705355 - DNA, 406 bp, Homo sapiens
tgcaaacttttctctcattctgtaggttgcctgttcactctgcagagcaaaataatctattcctattttttacagataaattttataaacattttacaargtcaatattaacatgactattttaattgagatggcattaatttagaggagaaagtctatctttactgttgaatattcatagaatacccttcatttaatcaagtcttccttcatgttaatcagtaaggttttattgtttaattttacttgatttttttcttaagttacgttcttttttgtttgtttgttttgagacggagtcttgttctgtcgcccaggctggagtgcagtggtgcgatcttgtctcactgtaatctccgcctcacaggttcaagcaatcctcctgcctcagactcctgagtctgtg

SEQ ID NO: 705356 - DNA, 406 bp, Homo sapiens
tgcaaacttttctctcattctgtaggttgcctgttcactctgcagagcaaaataatctattcctattttttacagataaattttataaacattttacaaggtcaatattaacatgactattttaattgagatggcattaatttagaggagaaagtctatctttactgttgaatattcatagaatacccttcatttaatcaagtcttccttcatgttaatcagtaaggttttattgtttaattttacttgatttttttcttaagttacgttcttttttgtttgtttgttttgagacggagtcttgttctgtcgcccaggctggagtgcagtggtgcgatcttgtctcactgtaatctccgcctcacaggttcaagcratcctcctgcctcagactcctgagtctgtg

SEQ ID NO: 705357 - DNA, 605 bp, Homo sapiens
tcagctcatttgactgaaacaacctcccaagtcttgagacaatatagtatgtgactgagcacaggagtaagacccataagatataggtccaagacacaattatatctatctgtgtgtcattagcatctcagtcacattgtgtacaagmtaatgtgaggataaatgagacaatgaatgagcaagtgctttgtaaaaggctctacacatagaaagtgatgctgttatcgttgaagtggacaataccctagtaagccaggctggatactatgttttatccagcctcaggcttaagtgaagatacgcagaaatataagaaggaaacccagttttttaaaaaatacggacctctgtggacaccagggtgaagtttttgaactattcttatttggggtttaaacgaaaagacgacccttaaagcctggagaaatctaggacatctcagttacgtaagctactctttgaaatgcagcaattatttttggtcggataatactgaaggaaagtttttgtaattctgttgtatgtggaacaaacagtacctgttcaggtactgggaattgaatgatgcttctttatttgtagaaacagaagctatgaggtggcag

SEQ ID NO: 705358 - DNA, 605 bp, Homo sapiens
tcagctcatttgactgaaacaacctcccaagtcttgagacaatatagtatgtgactgagcacaggagtaagacccataagatataggtccaagacacaattatatctatctgtgtgtcattagcatctcagtcacattgtgtacaagataatgtgaggataaatgagacaatgaatgagcaagtgctttgtaaaaggctctacacatagaaagtgatgctgttatcgttgaagtggacaataccctagtaagccaggctggatactatgttttatccagcctcaggcttaagtgaagatacscagaaatataagaaggaaacccagttttttaaaaaatacggacctctgtggacaccagggtgaagtttttgaactattcttatttggggtttaaacgaaaagacgacccttaaagcctggagaaatctaggacatctcagttacgtaagctactctttgaaatgcagcaattatttttggtcggataatactgaaggaaagtttttgtaattctgttgtatgtggaacaaacagtacctgttcaggtactgggaattgaatgatgcttctttatttgtagaaacagaagctatgaggtggcag

SEQ ID NO: 705359 - DNA, 640 bp, Homo sapiens
tcattcacctctcactaataagtgagaaaacgcggtatttggttttctgttcctgtgttagtttgctgaaaatgatggcttccacctccatccatgtcaatgcaaaggacattaactcatttctttctatgcatagtttctttatcctgtctatcaytgatgggcatttaggttgattccatgtctttgctatatgaatagtgctgcaataaacatatgcgtacatgtctctttataatagaatgatttatattcctttgggtatatacccagtaatgggattgctgggtcaaatagtatttctgcctctgggtccttgaggaattgccctggagaccatcaggaaaaatcaatcattatcctaaagctactgatttatttttcttcttccatctctttccaaaattttatattatttttagcggaatgtcttctaatcctaagctttctttatgtctctctcatttccattattctatctttttccatttttttcctttacaaaacccaaaagaaccagcttgatagactttctctgagagtcaacacccttcgcaagtatctagtggctgtatcaagtattgtgagaaatataaattttattctccttgcaccatgaattttttgtttcaatattaga

SEQ ID NO: 705360 - DNA, 390 bp, Homo sapiens
  misc_feature 2, 3, 4, 5, 6, 7, 8, 9, 10, 11, 12, 13, 14, 15, 16, 17, 18,19, 20, 21, 22, 23, 24, 25, 26, 27, 28, 29, 30, 31, 32,33, 34, 35, 36, 37, 38, 39, 40, 41, 42, 43, 44, 45, 46,47, 48, 49, 50, 51, 52, 53, 54, 55, 56, 57, 58, 59, 60,61: n = A,T,C or G
  misc_feature 62, 63, 64, 65, 66, 67, 68, 69, 70, 71, 72, 73, 74, 75, 76,77, 78, 79, 80, 81, 82, 83, 84, 85, 86, 87, 88, 89, 90,91, 92, 93, 94, 95, 96, 97, 98, 99, 100, 101: n = A,T,C or G
gnnnnnnnnnnnnnnnnnnnnnnnnnnnnnnnnnnnnnnnnnnnnnnnnnnnnnnnnnnnnnnnnnnnnnnnnnnnnnnnnnnnnnnnnnnnnnnnnnnnntgggttcttttttttttttaagcaaatttattaaagaaaaggggccaggtgcggtggttcacgcctgtaattccagcactttgggaggctgaggcgggcggatcacaaggtcaggagtttgagaccaacctggccaatatggtgaaaccccatttctactaaaaatagaaaagttagrgccgggtgcggtggttcacgcctgtgattccatcgctttgggaggctgaggcgggtggatcacaaggtcaggagattgagactatcctggctaacacggtgaaaccccgtc

SEQ ID NO: 705361 - DNA, 454 bp, Homo sapiens
  misc_feature 353, 354, 355, 356, 357, 358, 359, 360, 361, 362, 363, 364,365, 366, 367, 368, 369, 370, 371, 372, 373, 374, 375, 376,377, 378, 379, 380, 381, 382, 383, 384, 385, 386, 387, 388,389, 390, 391, 392, 393, 394, 395, 396, 397, 398, 399: n = A,T,C or G
  misc_feature 400, 401, 402, 403, 404, 405, 406, 407, 408, 409, 410, 411,412, 413, 414, 415, 416, 417, 418, 419, 420, 421, 422, 423,424, 425, 426, 427, 428, 429, 430, 431, 432, 433, 434, 435,436, 437, 438, 439, 440, 441, 442, 443, 444, 445, 446: n = A,T,C or G
  misc_feature 447, 448, 449, 450, 451, 452: n = A,T,C or G
ttggcttttatgaataatgctgctatggacatgcatgtactactttttgcgtggacatgtttttaattctagggtgcatccctagcagaattgctagatcgtatggcaactcttatgtttaactttttgaggacctgtcaggctgatttccacagtggctgctccattttacacttccatctgcaatgtttgagggtttcaatttctcckggtctttgtcaacactgtcgttgtctgtctcttctcatagccatcccagtgagtgtaaagtagtatctcgctgcagtttttgatggacatttccctaatgatttaagacattcaacatttttatgtgtatatgagccatttannnnnnnnnnnnnnnnnnnnnnnnnnnnnnnnnnnnnnnnnnnnnnnnnnnnnnnnnnnnnnnnnnnnnnnnnnnnnnnnnnnnnnnnnnnnnnnnnnnnta

SEQ ID NO: 705362 - DNA, 2829 bp, Homo sapiens
gcaggaagattagaaataaggacatagagacaaactattctctcggtgttaaactcattttaaacaaagtggaaagtaagggatttagtagggaaatcctttcaccttggcaaaacgatagtatacaactggcacagcataatccttggtggcttggcacaagcattccctgtcccccatcaagcacataatgtccctcagtaattccactgcatttttgtgcagcggctgtgtgctggagctgtggggaacccctcggtaatctcttgtctgctttttaggagcccctatctcctggtcttctcttacttcccaagctaccctgcttctttgaaaagtcttcaggcttgcctacctcttctcagcttgctctgcatgccttggggaagctgcataaagcatggatcatgaaggagggggcgcagaggagagggaaatgcatgtttgcacaaatggaccctgagcccaccaggcaggctccagatggggggraaaaaaaaaaaaaaaacccttacattatcacgtgacttgcgcaagaaaaaaggtacctgcaaagggccaagggaccagagaggagaacttgagaggtattctggaggaggcgacttttgatatgagctttctaggtgagtaaagggtattgcagctgaagggactggctggtaagtggccagcacataggaatacaggctgagctcagggaagggtgcacccagaggtggggaggaaggtgggaagtgaaaaaggaggctgggcacggtgggtcatgcctgtaatcccagcactttgggtggccgaagctggtggatcacttgaggtcaggagttcgagacctgcctggccaacatggtgaaagcccatctctactaaaaatacaaaaattagccaggtgtggtggtgtgtgtctgtagtcccagctactaaggaggctgaggtatgagaattgcttgaacccgggaggcggagattgcagtgagccaagataatgccactgcactacagcctgggcgacagagtgagatcctgtctcaaaaaaaattttttttaaataataataaaaataaataaaaataaaaggaagtgaaaaaggaaagggtaaggggagagggccagaatggaaggggagctgaagactgagcaaggcaaagttggaggccagtgcagaaagggctcaaaccatttgcaaggatggttcacatcccactggtctgtcagcttggatttaaagcactacccagcgttattcaaagccacacaggagaactgtaggcatcagaatgccctggggacaggtccaaaatgcagattcctaagccccacactaaccctaaagagtcactctaggatgaggtccaagaatttgggcttcaccccacctctcctgtcccctgccctcaccactgaggacctaaaggataatgaaagggggaaatctgtgccctaaataatcccttttggcagttactttctgttttcaaagttcaagtctgtcctccgggactaacctaggagatgagggataagggaattaacatttatggaaaatggaagaacatacataggcacctgtgttcacctaatattccttaccagccacctgaaagggggtggctgccattatctctattgtatggatgagaaaataggcttaaaagaggttaagtggccaggtgcggtggctcatgcctgtaatcccagcactttgggaggccgaggtgggtggatcatgagatcaagagatccagaccatcctggccaacatggtgaaaccctgtctctactaaaatacaaagaattagctgggcgtggtagcaccactctgtagtcccagctacttgggaggctgaagcaggagaatcgcttgaacccaggaggcagaggttgcagtgaaccgagatcacgccactgcactccagcctggtgacagagcgagacttcatctcttaaaaaaaaaaaaaaaagaggttaagtaacttgcgggggggccacagccacagaagtagtaagtgctagaagtaggattcttacctagttctttctgattctagtttcagctttgttcagtggattttagagccagggctgtttaggtttgaatctcatctctatcccatattgtttgctgggacttccttaaaacagtgtggggcccagggcaacccaatgagtatggggctaagatagctgacagctgccaccgagtcagcatttttcacaggcccgttgagatcgcactgaagacagaaatttctaaattgaattttattgatgttcaggaaagagaagtaagtcacaacgccccttcgccctcagccccaagcagagagcccagagtgtgtgacctcaggcaagtgccaaaacctctctgagcctcagttcctcattgtaaataggggctaatgtcagttgatgtgaggagtaaatatcatgatatcctggctgggcacagtgtcacgcctgtaatcccataactttgggaggctgaggtgggtggattacttgaggccaggagttcgaaaccagcctggccaacatggtgaaaccccatctctaccaaagatacaaaaattagccaggcatggtggttcatgcctgtagtcccaggtacttgtgaggctgaggcacaagaatcgcttgaacctgggaggctgaggttgcagtgagctgagattgcgccactgcactgcagcctacatgacagagtgagactctgttccaaaacaacaacaacaaaaaaaaaaaaaaaaaaaggaaaagaaaaaaagaaaagaaaaagatgatatccttaatgcaagttctggcctgtagtaagtgctcaaagatgaacag

SEQ ID NO: 705363 - DNA, 1830 bp, Homo sapiens
tgccagattgtatgcctatgttgttaaatacacagtgaatctctggtatgatagcagtttctggataaacattacttgaggtcctaaaatgcagaagggaaaaagcaacttttgtcagatgcctactttgctttcatttcatctctaatattttggatggggaatcagccaaggcttctgactgcaggaaggtcaagtgtgccagtgtgcagctgggtttcttttccagaattaaaagcattttgggtggtggtgagggtcagaggaagaagtaaagattgtgagaaagtggaagaagcatgggcttggggagaacccagaattggggccagaagacctggcactaggctacagcacttagcacctctgatcttgtttttcttcatctgtaaaaggaggttaacaaagcttttctgcccacttcttggggagaagggaataatataattggtaaaaaaaaaaaaaagttttgaaaaataagcaacactgactttatgtaaccaagcattattaattctccaccccatatcactggtagatacctgtattcaagctatctggacatgaaagcagtcacattttagaagtcatgaagttgatgctaataaacctaatctacagaaacactcttgaaagcccttgagcgtttgttctgtgaacagaaaggtttgagattcagagcaagttcagagttggatggtctaagaatggaaaagmcctccattctattagaagagtcaggtagcaatttctggttatggaaccagaagctctcaggcttcaaataaaacagcatcacttgtactctcataaaactgtaaaaacagaaaaaccgaaaccgtatctacatctgtcctataaggcagagagtacttgagacctcatgaatttaaaaccaccttacaaactacattgcactatatgaagaaattatcactgtgggcaaagcatcaagcagagagcacagtacacagtgtgtggatgttaatgttattctctagccttcccattcctttgtcttggtcctttgtgcatatggaacagttctattattaaattttgtaatagtaactgagaacctgactctcagcaagggagtagttcagaaattgagggagtttaactctgaatgagtaaataaaaataaagcaattatgtcattagcttaaaattttatcatcattaaaaataaaaagtttaaaaacaaatacttaatgtaacaatttatcaccgcgcaatttggactcacgacaatgtatggtgtttgtcagacatgcactgttgcaatgcagcttgactgtcttgcagacagcctcaatgctgtttttaagttggcagaggcagcaggccatatggctaggtaagatcctatagatgaaaacagagagcaataaattagcggtaaagcggttacttgagtaggtaaaggaggcagccaacgctaccacaggtgtgggaaaaaggtgtcattgaagcctatggactggacagttgggtaggaaccagaaggccaataggaaggagggcaaaggtgcccaactgaagggtaagcatggcagtgagtatggtatgcctagaataaagatggttgggattagaattgggtgacagtgattagtagtttaattcagaagtatctcttcccaactcaaaagtctcactttgggctgaaagtacagaggaagaaggtagacttttaagaagtctgaataagcccccaacttctggagtccctttctcaattcctgttgggagtgggaaatattataaattactctgggcattaaaaatagcttagtttaacctcgattgtggagttaaaaaataaca

SEQ ID NO: 705364 - DNA, 1830 bp, Homo sapiens
tgccagattgtatgcctatgttgttaaatacacagtgaatctctggtatgatagcagtttctggataaacattacttgaggtcctaaaatgcagaagggaaaaagcaacttttgtcagatgcctactttgctttcatttcatctctaatattttggatggggaatcagccaaggcttctgactgcaggaaggtcaagtgtgccagtgtgcagctgggtttcttttccagaattaaaagcattttgggtggtggtgagggtcagaggaagaagtaaagattgtgagaaagtggaagaagcatgggcttggggagaacccagaattggggccagaagacctggcactaggctacagcacttagcacctctgatcttgtttttcttcatctgtaaaaggaggttaacaaagcttttctgcccacttcttggggagaagggaataatataattggtaaaaaaaaaaaaaagttttgaaaaataagcaacactgactttatgtaaccaagcattattaattctccaccccatatcactggtagatacctgtattcaagctatctggacatgaaagcagtcacattttagaagtcatgaagttgatgctaataaacctaatctacagaaacactcttgaaagcccttgagcgtttgttctgtgaacagaaaggtttgagattcagagcaagttcagagttggatggtctaagaatggaaaagacctccattctattagaagagycaggtagcaatttctggttatggaaccagaagctctcaggcttcaaataaaacagcatcacttgtactctcataaaactgtaaaaacagaaaaaccgaaaccgtatctacatctgtcctataaggcagagagtacttgagacctcatgaatttaaaaccaccttacaaactacattgcactatatgaagaaattatcactgtgggcaaagcatcaagcagagagcacagtacacagtgtgtggatgttaatgttattctctagccttcccattcctttgtcttggtcctttgtgcatatggaacagttctattattaaattttgtaatagtaactgagaacctgactctcagcaagggagtagttcagaaattgagggagtttaactctgaatgagtaaataaaaataaagcaattatgtcattagcttaaaattttatcatcattaaaaataaaaagtttaaaaacaaatacttaatgtaacaatttatcaccgcgcaatttggactcacgacaatgtatggtgtttgtcagacatgcactgttgcaatgcagcttgactgtcttgcagacagcctcaatgctgtttttaagttggcagaggcagcaggccatatggctaggtaagatcctatagatgaaaacagagagcaataaattagcggtaaagcggttacttgagtaggtaaaggaggcagccaacgctaccacaggtgtgggaaaaaggtgtcattgaagcctatggactggacagttgggtaggaaccagaaggccaataggaaggagggcaaaggtgcccaactgaagggtaagcatggcagtgagtatggtatgcctagaataaagatggttgggattagaattgggtgacagtgattagtagtttaattcagaagtatctcttcccaactcaaaagtctcactttgggctgaaagtacagaggaagaaggtagacttttaagaagtctgaataagcccccaacttctggagtccctttctcaattcctgttgggagtgggaaatattataaattactctgggcattaaaaatagcttagtttaacctcgattgtggagttaaaaaataaca

SEQ ID NO: 705365 - DNA, 1830 bp, Homo sapiens
tgccagattgtatgcctatgttgttaaatacacagtgaatctctggtatgatagcagtttctggataaacattacttgaggtcctaaaatgcagaagggaaaaagcaacttttgtcagatgcctactttgctttcatttcatctctaatattttggatggggaatcagccaaggcttctgactgcaggaaggtcaagtgtgccagtgtgcagctgggtttcttttccagaattaaaagcattttgggtggtggtgagggtcagaggaagaagtaaagattgtgagaaagtggaagaagcatgggcttggggagaacccagaattggggccagaagacctggcactaggctacagcacttagcacctctgatcttgtttttcttcatctgtaaaaggaggttaacaaagcttttctgcccacttcttggggagaagggaataatataattggtaaaaaaaaaaaaaagttttgaaaaataagcaacactgactttatgtaaccaagcattattaattctccaccccatatcactggtagatacctgtattcaagctatctggacatgaaagcagtcacattttagaagtcatgaagttgatgctaataaacctaatctacagaaacactcttgaaagcccttgagcgtttgttctgtgaacagaaaggtttgagattcagagcaagttcagagttggatggtctaagaatggaaaagacctccattctattagaagagtcaggtagcaatttctggttatggaaccagaagctctcaggcttcaaataaaacagcatcacttgtactctyataaaactgtaaaaacagaaaaaccgaaaccgtatctacatctgtcctataaggcagagagtacttgagacctcatgaatttaaaaccaccttacaaactacattgcactatatgaagaaattatcactgtgggcaaagcatcaagcagagagcacagtacacagtgtgtggatgttaatgttattctctagccttcccattcctttgtcttggtcctttgtgcatatggaacagttctattattaaattttgtaatagtaactgagaacctgactctcagcaagggagtagttcagaaattgagggagtttaactctgaatgagtaaataaaaataaagcaattatgtcattagcttaaaattttatcatcattaaaaataaaaagtttaaaaacaaatacttaatgtaacaatttatcaccgcgcaatttggactcacgacaatgtatggtgtttgtcagacatgcactgttgcaatgcagcttgactgtcttgcagacagcctcaatgctgtttttaagttggcagaggcagcaggccatatggctaggtaagatcctatagatgaaaacagagagcaataaattagcggtaaagcggttacttgagtaggtaaaggaggcagccaacgctaccacaggtgtgggaaaaaggtgtcattgaagcctatggactggacagttgggtaggaaccagaaggccaataggaaggagggcaaaggtgcccaactgaagggtaagcatggcagtgagtatggtatgcctagaataaagatggttgggattagaattgggtgacagtgattagtagtttaattcagaagtatctcttcccaactcaaaagtctcactttgggctgaaagtacagaggaagaaggtagacttttaagaagtctgaataagcccccaacttctggagtccctttctcaattcctgttgggagtgggaaatattataaattactctgggcattaaaaatagcttagtttaacctcgattgtggagttaaaaaataaca

SEQ ID NO: 705366 - DNA, 1830 bp, Homo sapiens
tgccagattgtatgcctatgttgttaaatacacagtgaatctctggtatgatagcagtttctggataaacattacttgaggtcctaaaatgcagaagggaaaaagcaacttttgtcagatgcctactttgctttcatttcatctctaatattttggatggggaatcagccaaggcttctgactgcaggaaggtcaagtgtgccagtgtgcagctgggtttcttttccagaattaaaagcattttgggtggtggtgagggtcagaggaagaagtaaagattgtgagaaagtggaagaagcatgggcttggggagaacccagaattggggccagaagacctggcactaggctacagcacttagcacctctgatcttgtttttcttcatctgtaaaaggaggttaacaaagcttttctgcccacttcttggggagaagggaataatataattggtaaaaaaaaaaaaaagttttgaaaaataagcaacactgactttatgtaaccaagcattattaattctccaccccatatcactggtagatacctgtattcaagctatctggacatgaaagcagtcacattttagaagtcatgaagttgatgctaataaacctaatctacagaaacactcttgaaagcccttgagcgtttgttctgtgaacagaaaggtttgagattcagagcaagttcagagttggatggtctaagaatggaaaagacctccattctattagaagagtcaggtagcaatttctggttatggaaccagaagctctcaggcttcaaataaaacagcatcacttgtactctcataaaactgtaaaaacagaaaaaccgaaaccgtatctacatctgtcctataaggcagagagtacttgagacctcatgaatttaaaaccaccttacaaactacwttgcactatatgaagaaattatcactgtgggcaaagcatcaagcagagagcacagtacacagtgtgtggatgttaatgttattctctagccttcccattcctttgtcttggtcctttgtgcatatggaacagttctattattaaattttgtaatagtaactgagaacctgactctcagcaagggagtagttcagaaattgagggagtttaactctgaatgagtaaataaaaataaagcaattatgtcattagcttaaaattttatcatcattaaaaataaaaagtttaaaaacaaatacttaatgtaacaatttatcaccgcgcaatttggactcacgacaatgtatggtgtttgtcagacatgcactgttgcaatgcagcttgactgtcttgcagacagcctcaatgctgtttttaagttggcagaggcagcaggccatatggctaggtaagatcctatagatgaaaacagagagcaataaattagcggtaaagcggttacttgagtaggtaaaggaggcagccaacgctaccacaggtgtgggaaaaaggtgtcattgaagcctatggactggacagttgggtaggaaccagaaggccaataggaaggagggcaaaggtgcccaactgaagggtaagcatggcagtgagtatggtatgcctagaataaagatggttgggattagaattgggtgacagtgattagtagtttaattcagaagtatctcttcccaactcaaaagtctcactttgggctgaaagtacagaggaagaaggtagacttttaagaagtctgaataagcccccaacttctggagtccctttctcaattcctgttgggagtgggaaatattataaattactctgggcattaaaaatagcttagtttaacctcgattgtggagttaaaaaataaca

SEQ ID NO: 705367 - DNA, 607 bp, Homo sapiens
attccatgatgtgcctcagtggttcatatgacttcaagcagtgtgagctgctggcagaaggaggttgcatggaaaatgccacaactcagcttaagattatttggaacacacagagaaaaatcaagaggcagagaaatcagcatgaagttaggctagaactgtggatagatgatgccttggtatagtcaaggtgggtgggttggtccagtaaartgactgcaccatcacacaagccaagttttctcttttattgaggtgtttctgaagcatttgctatgatgggcactacactgttagtgttttctacttaaaagctacctacataaaacaaaaacaaaatgacatcagtaactcggacagtttaaacaaaacccttataaccagctgaatgatctgtagaaatccagttgtggaaaccggtaggtatgtgcacgagaggagaggccgttattccaaggggtcacctacagtgtggaagaacaaaaccctgatccaacagtatttctcaatgaccttaagatccccggggtcctgggagagatgggtcgcgttccagcaggaggctcctgagcgccttcacttaggctggaattgccgaggagccatc

SEQ ID NO: 705368 - DNA, 1985 bp, Homo sapiens
gttaccccattacctcactgctaccttcagacccctgtgctcagaccaggccgcagcaccacagagacagttccagacaacacaggcatcagcaagggccacctgaccctctgagtctttctctttttgattcctcccaggtgcgattgctgggtgtggtgtcccaaggccagccaacactggtcatcatggaactgatgacacggggcgatctcaaaagttatctccggtctctgaggccagaaatggaggtcagttttcatttccaccggtattgcatgttgcctggcctgctctcttttcctttataatctccctgcaaggaaatgctgtgtctttaaatcagtttactttccagcatccagtgtttcttactgcatgctcagttgtaggtcatttatgcaaaggatttccccaactagagtcagactctgatcttcgtgaggggaacttcctgttccttggatcccctctgctaagcccctctgtgcctttgttcctgcattccctccacccccagtcccctccccacatcagtgtccacctgccaagccaggccagcgccactccctccccgaagctttcctgccccactccagtagctatcttctctgctaacttctcgatgcgcttgactcacatcctcgtatgtgttctctctcgttatgttgtgttgtgctgttgttggagtgtgtcccccctccaccccgttgtgtttagcttttcatctcagtccaagtgtgtggctcagggccgcatttgtggcaggcactctgtcaataaatgtatgttacagttcaaggttaagctgcctggattcttgcccttgcatctgggaagttgctgggtgatttcccacccagctccgtgcgcaagatgtgcactcattcataaaccccctccccacacacagtccccttccccggcattgttggcggtccttgtctttgccactgggaatctggtttcctcagactctacgtccacgtttcaggattgatccagagtcagtgtcctgcttaygcttttgaatgaatgatcccacctcagctgcaggatttctgcttagtttcctaaaaatttcactttgggttatgagcttccaattctaaacctgctaaagtcctatgcaatttttcattaaaagtcaccgtggtgtctcccccctctgtagtattaacccacaggccagctttttaacatatgcgggcatgacttttgagtaattaattctacaaataaactgggagataaatgctgagacataaagccagcaagaactgagttttcatttggttgcctccgtgggtctgaagtctttgacccttactttgctgcttactgggtaagcagtgtgtctgcttttattccttagaagcagtgacttccccttctcggcccctttggaaattcttttgctgttcttcatttgggcttaatttttttttttttttaatgttctttgaatcggcaacttaatcatctcccaagtgacagtttcttaattttagttccaaacacctgttcacatatgacttcatgtatttgcagcacatggtgtttggggccaagtgtggactggggcttcaagcaggatggtttacaaaactcccaccctctgttctgccaagcattggtccccagcacccctgggtgttagtgcctcttcctggttcactcactcactttctctggccctctctgtgtctctgtcactctctttctttcgagatggagttttgctctgttgcccaggctggggtgcagtggcatgatctcagctcactgcaacctccaccacctgggttcaagcgattctcctgcctcagtctcccaagtagctgggattacaggtgtgtaccaccacgcccacctaatttttgtatttttagtagagacggggtttcaccatgttggccaggctggtcttgaactcctgacctcaggtgatccacccacctcagcctcccaaagtgctgggatta

SEQ ID NO: 705369 - DNA, 1985 bp, Homo sapiens
gttaccccattacctcactgctaccttcagacccctgtgctcagaccaggccgcagcaccacagagacagttccagacaacacaggcatcagcaagggccacctgaccctctgagtctttctctttttgattcctcccaggtgcgattgctgggtgtggtgtcccaaggccagccaacactggtcatcatggaactgatgacacggggcgatctcaaaagttatctccggtctctgaggccagaaatggaggtcagttttcatttccaccggtattgcatgttgcctggcctgctctcttttcctttataatctccctgcaaggaaatgctgtgtctttaaatcagtttactttccagcatccagtgtttcttactgcatgctcagttgtaggtcatttatgcaaaggatttccccaactagagtcagactctgatcttcgtgaggggaacttcctgttccttggatcccctctgctaagcccctctgtgcctttgttcctgcattccctccacccccagtcccctccccacatcagtgtccacctgccaagccaggccagcgccactccctccccgaagctttcctgccccactccagtagctatcttctctgctaacttctcgatgcgcttgactcacatcctcgtatgtgttctctctcgttatgttgtgttgtgctgttgttggagtgtgtcccccctccaccccgttgtgtttagcttttcatctcagtccaagtgtgtggctcagggccgcatttgtggcaggcactctgtcaataaatgtatgttacagttcaaggttaagctgcctggattcttgcccttgcatctgggaagttgctgggtgatttcccacccagctccgtgcgcaagatgtgcactcattcataaaccccctccccacacacagtccccttccccggcattgttggcggtccttgtctttgccactgggaatctggtttcctcagactctacgtccacgtttcaggattgatccagagtcagtgtcctgcttacgcttttgaatgaatgatcccacctcagctgcaggatttctgcttagtttcctaaaaatttcactttgggttatgagcttccaattctaaacctgctaaagtcctatgcaatttttcattaaaagtcaccgtggtgtctcccccctctgtagtattaacccacaggccagctttttaacatatgcgggcatgacttttgagtaattaattctacaaataaactgggagataaatgctgagacataaagccagcaagaactgagttttcatttggttgcctccgtgggtctgaagtctttgacccttactttgctgcttactgggtaagcagtgtgtctgcttttattccttagaagcagtgacttccccttctcggcccctttggaaattcttttgctgttcttcatttgggcttaatttttttttttttttaatgttctttgaatcggcaacttaatcatctcccaagtgacagtttcttaattttagttccaaacacctgttcacatatgacttcatktatttgcagcacatggtgtttggggccaagtgtggactggggcttcaagcaggatggtttacaaaactcccaccctctgttctgccaagcattggtccccagcacccctgggtgttagtgcctcttcctggttcactcactcactttctctggccctctctgtgtctctgtcactctctttctttcgagatggagttttgctctgttgcccaggctggggtgcagtggcatgatctcagctcactgcaacctccaccacctgggttcaagcgattctcctgcctcagtctcccaagtagctgggattacaggtgtgtaccaccacgcccacctaatttttgtatttttagtagagacggggtttcaccatgttggccaggctggtcttgaactcctgacctcaggtgatccacccacctcagcctcccaaagtgctgggatta

SEQ ID NO: 705370 - DNA, 1985 bp, Homo sapiens
gttaccccattacctcactgctaccttcagacccctgtgctcagaccaggccgcagcaccacagagacagttccagacaacacaggcatcagcaagggccacctgaccctctgagtctttctctttttgattcctcccaggtgcgattgctgggtgtggtgtcccaaggccagccaacactggtcatcatggaactgatgacacggggcgatctcaaaagttatctccggtctctgaggccagaaatggaggtcagttttcatttccaccggtattgcatgttgcctggcctgctctcttttcctttataatctccctgcaaggaaatgctgtgtctttaaatcagtttactttccagcatccagtgtttcttactgcatgctcagttgtaggtcatttatgcaaaggatttccccaactagagtcagactctgatcttcgtgaggggaacttcctgttccttggatcccctctgctaagcccctctgtgcctttgttcctgcattccctccacccccagtcccctccccacatcagtgtccacctgccaagccaggccagcgccactccctccccgaagctttcctgccccactccagtagctatcttctctgctaacttctcgatgcgcttgactcacatcctcgtatgtgttctctctcgttatgttgtgttgtgctgttgttggagtgtgtcccccctccaccccgttgtgtttagcttttcatctcagtccaagtgtgtggctcagggccgcatttgtggcaggcactctgtcaataaatgtatgttacagttcaaggttaagctgcctggattcttgcccttgcatctgggaagttgctgggtgatttcccacccagctccgtgcgcaagatgtgcactcattcataaaccccctccccacacacagtccccttccccggcattgttggcggtccttgtctttgccactgggaatctggtttcctcagactctacgtccacgtttcaggattgatccagagtcagtgtcctgcttacgcttttgaatgaatgatcccacctcagctgcaggatttctgcttagtttcctaaaaatttcactttgggttatgagcttccaattctaaacctgctaaagtcctatgcaatttttcattaaaagtcaccgtggtgtctcccccctctgtagtattaacccacaggccagctttttaacatatgcgggcatgacttttgagtaattaattctacaaataaactgggagataaatgctgagacataaagccagcaagaactgagttttcatttggttgcctccgtgggtctgaagtctttgacccttactttgctgcttactgggtaagcagtgtgtctgcttttattccttagaagcagtgacttccccttctcggcccctttggaaattcttttgctgttcttcatttgggcttaatttttttttttttttaatgttctttgaatcggcaacttaatcatctcccaagtgacagtttcttaattttagttccaaacacctgttcacatatgacttcatgtatttgcagcacatggtgtttggggccaagtgtggactggggcttcaagcaggatggtttacaaaactcccaccctctgttctgccaagcattggtccccagcacccctgggtgttagtgcctcttcctggttcactcactcactttctctggccctctctgtgtctctgtcactctctttctttcgagatggagttttgctctgttgcccaggctggggtgcagtggcatgatctcagctcactgcaacctccaccacctgggttcaagcgattctcctgcctcagtctcccaagtagctgggattacaggtgtgyaccaccacgcccacctaatttttgtatttttagtagagacggggtttcaccatgttggccaggctggtcttgaactcctgacctcaggtgatccacccacctcagcctcccaaagtgctgggatta

SEQ ID NO: 705371 - DNA, 606 bp, Homo sapiens
aaattagctctttaatgtatacgtttagaacctgttgctttgtcagtagtggtttttatgaaaatgaatgcttataggtcagacttctggaaaccctaatctgagggaattgggccaaataggaaagtgagccccttaaaggcagttgtctgaccagtacttggagcacaacaggttcttgctaaagcactgtgtttttaaaacagtggagttattaggttgaaattctgaatagcaagaaaaagaataatggaagtgctgccagccccgtgatgctggtgcagctggtcagtttgcagaaggaggccagttactagagcagagtggccgtagaggctgcaacacggtggccaaagcatgaagctgctgtatagtggcaaggtcacagtgatttccccrcagcctcggtttagagggagacggggtgtgctgagctgtgcctgcttctgtagaaggggccttctccaagtctgagtagccttaagccattaggactgctgagtctttctccacaaaaatatgtgggaggcctgcagggcaggtgctcaactaagctctggggctgcaaagatccagagccatgcccctccttggaggcaggtcctt

SEQ ID NO: 705372 - DNA, 1142 bp, Homo sapiens
tgattggaaacaacctagatgcccaatatcaggggatgtcaataaatgacagtatttgcaataaaatgctatacagccaaaaaacaaacaaaacaccccatacatttgagagatacctaatawgatggaaatatgcccacaaataaaagcaggatataagatatacttcaaattgtgtcttttacatatatattaaaataccaggaggaaacacaccaaaatttaacaataatttctttgagaggttaagggattgatgatttttactttttaatctttctgtattttccagattgtataacaaacataaattttatcatctgaaaaagctatatatatatttttgtttgtttgtttgtttgtttgagacagagtttccctcttctccccaggctggagtgcaatggcacaatctcagctcactgcaacatccacctccctggttcaagcgattctcctgcctcagcctcccaagtagctgggattacagatgtgtaccaccacagctggctattttttttttgtatttttagtaaagatggggtttcgccatgttggccaggctggtcttgaactcctgacctcaagtgatccacccacctcagcctcccagagtgctgggattacaggcgtgagccactgtgcctggcctgaaaaagctatttttaaataaagaaaacaaccttcatccctgtgcctttcttgtctccctctctagtccaattggcaccaggtcacagagcacatagagatccctgggttatagtgcactgcaggtaattacaagccaccattataaattgcccccttgtccagactatcctcaaaaatgtaagcaggattagatgtctgtgtgggtcaacaaacaagaagagcttgtgaaggatcagcactttattctccgatctggctcaagtatataaatattccttattatgcattgcccttggtttattagccattgcatcgtcttgaactggtttgtgacatgagctgatagcatttgttgccccgaggaagggttaaactatgagaaaagaggggtggattaaacaaggaagaaaaactatcaatatgtcataaaatatacatactatttctaatttattcctgtccatttgaggcaacatatctaatgtgtt

SEQ ID NO: 705373 - DNA, 868 bp, Homo sapiens
gaagaagtcatctgtgccataagtttgtgtcttctaagagccatcagccaggcaaaatgaagtgggaaacttgaaacttaacatgtataaatgatttgtgttgttttgttttaatgctaagtactcagcaaaaagctgagttattagaaaatggacactagcctgtgcttgtgggcataaattctccatctatgagaaggcatgaattgaggcactatattgattacattatgttgtttattctcatataactctctattgtagaaacgatttctagccccatcttcaagatgggaaatggaatcctagagagacttcatttttctcctatatttgtatttagcaattgctattgctgccrtaagaaaataacacagggtggcttgaacaacagaaatttattttctcacagttctggaggctggaagtccaagatcaaggtgccaagcaaggctggtttctcctgaggcctctatccttggcttgcagatggccgcctcctatctgtgtcctcacatgtggccttttctctgtgcatgcttatgcctgatgtctcttccccttcttaaaatgacaccagttatactggattagggccccacccttatgacctcatttaaccttaattatctccttcaaggcccgccctccaaatacagtcacattgaggattagggtttcagcctatgaattttgcaggcacatgagtcagtccctaagaactctacaaatcaccaagccagtcagtgcagagccagggtagacaccctggctccctgccattatctgtggtccccctgattactatccgtggtacttcaccatcccatcactgcctcagtctatgtccagagaaaatggccttgtg

SEQ ID NO: 705374 - DNA, 623 bp, Homo sapiens
tatactgaaattttaagacaaagattgttttacagcatcttatttgttatctacaagttagaagtccctgaaacagtcaatttttttwaaaaaaattaaaagctattttggtataacagaaatacccaaagccaccttctacctttatagagtttctgactgtttttcagaggatgtagtttattacatttataagaagattgtgaattgagagggctttggagatatgtcattcctatagtagaggtccctattttaagaagaatgttgattgctcaagagagagcaacgaaaatgatgaaggtgtactgcaatatatccagctaccctagagaaagtaaggcaggggaataatagactagctgtcatcaaatatttgaaaggaataataaatttattctattgtgctccaaatggcaggaataaaattaaaggttgaaattacagtgagaatattttgttcagtaagaggaacacatttgcaatagttagaaccctttattgggggagtcattgaagcaggggctgggtcgactatgataaggttttatggggttttgtgggaggtttctttcaggatctctagcaatcttttcctatttaaactcctgtgatattccact

SEQ ID NO: 705375 - DNA, 770 bp, Homo sapiens
ggtgactacttctttgaagagaggtcagtgagtggggaagagaggcgtgagcactgaatttgttactttctgtatagttcgatctttttttttttttttttttttgagacggagtctcgctgtcacccagtatggagtgcagtggcgcgatttccactcactgcaacctccgcctcccgggttcaagcgattctcctggctcagcctcccaagaatctgggattacaggcatccaccaccactcccagatgacttttttgtatttttagtagagatggggtttcaccatgttggccaggctggtctcgaactcctgacctcaggtgatccacctgcctcggcctcccaaagtgctgggattacaggcgtgagccactgcgccaggatcagtttgatatttttaactgattgtctaccttcctttaattcagagaaaataaatttttaagagaaacaaataattttagcttctaataaaacatttgctataaatcccttcttatttaacataattttsaaagtgctatgtagtaaaataagtcattcaaaacaacaaagataaccgtatttaggcaaatatttattattttctggatacatcattacttatcttgaaccaaacaaaacagacttgaaaaagtagaagttataatttattagcacagctaattaaaaaataaacttcctgaataattatctttgctatatatctagagtaattggttacgaattttggagaaaaattcttttttcccagtagccataaaaat

SEQ ID NO: 705376 - DNA, 1846 bp, Homo sapiens
tactmatttaatgttttataaaacacttaagctacataatatatgtgatgtttcttgaacgtaatgaaggtttaataaacacaactgctcaccttgcatctctatggccatgtctacttgtcactataggagctagtaggggagagaggacaatggctcagataattgaagcacaaggtagagagtggcaaatgccatatgaaaagtagataaattaggagtttagaaaatgaagatatgtttttttggaattgtttcaagatgatggactgagcatattacacagactctggctcccccaatagacctttagaaaatatggaaaatatattgtttgtggaaagttaagttaaaaatgagtttaaaataatttggattgttgtaaaggatagatttttttttctgtatcttttgtaagtttgagtttctgcctatcctgtgggaaggagtcttcatattgatggtcactctaattctgtcttggatgacttaataaagttttcctcctagctccaaaacaaggtataaggactgtaaatatttattgcaaaaatgagaaaaataaaaataacacagtaaatgccaaacaagtaaaacaaatatataattttgcgtctagataatttataaactccatataattagaaataaaaatattgacctctgaatagacaacccatggattgggagaaaatatttgcaaagcatacgtctgataagggctaatatcaaaaatatatcaggaattcaaacaactgaatagcaaggaaacaaaacccaatcaaaaaatgtgcaaagaaactaaatagatacatttcaaaagaggatatacaaatggtcatcagatacaagacactatgcttttcatcgctggtcatcaggaaaatgcaaatgaaaaccataatgaaatattatcacacacctgttagaatgggtattaccaaaaaacaagagatgttaagtgttggcgaggaggtggagaaaaggaaacctttgtacattattggtaggaaagtaaattaatatagttatgatgaaaaccgttatggaggttccttagaaaatagaactatcatatgttccagtaatcccctttctgggtatatgaccaagggaattgaaatcagtatgctgaggagatatttgcactcccatgtttattgcagcattattcacaatagccaagacatggaagcaacctctccatcatcagatgaatgagtaaagtttggtatacatacctaatgaagtattactcagccttgtaaaagggggaaatcatgtcatttacaacagcatggatgaacctggaggacattatgctaagtgaaaaaagctggcacacaaagacaaatacagtatgaccccatttatatgtagaattgaaaaaaaagttgaactcctggaagtagagggtagaggtcttacgagagacttggggaggggaaggtgatggagataggagagatgttgatcaaaaggtacagtttccagaagagaggaggaaaaatctttagggatctattacacagaatactgactataaaaattataatgcattgtattttttaaaaatttatctttgaagtataacccacaatcttctgtcattttcaattttataacaaatataagcatatgtgcagtatgagaaataaatttgaattacagcttaaatccatgtcctgagaatatacgacaaaatataaaagactctttgccgattttttgtgtccaattcctgtgcattgctgcaatatgagtagagagctgaaagagtgtcttttttgtccttgaaatagatgtggacagctttcatatttaagtctcttttctctatagctat

SEQ ID NO: 705377 - DNA, 1102 bp, Homo sapiens
taagaattgataataatgactaggatgtttacttcttcaggatgcatatacattcaatttgcaatcaaataaattctaaaaactgtcatcaagtaaatattcagacactgtcagcactttattggaagagttgtgagtatttgatcttgcagattactaatactctccagagagggacttttcatgttttcagttttcaatttacaactgtgggtcaaagtcaacaccttttgtgtcttcatctgaaaatgtctcagatctttattctgaaatgtcttcaaattgctgcttgagaatatatgtcccatttcacccaggagaatgtttccctctgttagaaacaatgcattttgttttgtctctctccagtggcctcatgtatagaatttcaaacataataggtcattgcacatgcattttattgcctgtaagtcttacagcttgtagtatgctcttccaacctcaggttccaagatcctacagtacatggccactgacggcctttggtatatgactgtgtaataatggaatctattttcttgaccaaacactgtgtaatagcttttattattttctttcaacccatgtaacttacataagaaatacaatcaaaattctctttttttcacaagttacaaagtttttatgtcagtcttgtgtccttttctccatttttctgttaaattttttttgttctgtacaagattgtccttttatgtttgccagtatttaagttgtttgggggaaatatttatatctccaggatgtttttcatttcaagaaaagtttagtgtacctcaactggatctgaggctggaatctaggaaaaacagagaataatccagggacttactttcaccagcttaaaaatactataaaatcatcctctctattctccaacatctgtacatagagtagaggaacagcaaggagcactgggaaaagcctgtgtagccacatgcagcctcctactcaaagctgcctttggtcttcttctctgtatctcccaagttaagcagcttatatttaggaggaaaaaaaaaaaaaaaagaaaaatgaaagatgatctgctcaccactgattamgttaccaatacttctca

SEQ ID NO: 705378 - DNA, 1332 bp, Homo sapiens
catgtaggtaaggactcacttccttcttgggggttctactcagtggttgtattttttcgaagcatttgtttcttactctgacgataattgcacatagaagaatagttaatgattaacaacactttaaagtgggataatcggcagtgtcttgttttctatcttgttttaaggggttggtaatatcataattaataacttacagaatggtaataatgtcttaaaatagctttcccatagtactataatcccagagctttgggaggaagagataggaggatcccttgaggccagcaattcaagaccagcctgggtaacagggcaagactccatctctacaaaaagattaaaaaaaaaaaaaaagctaggcatggtggcaacacacctgtaccatagtcctagctactcaggaggctgaggtgggaagatttcttgagcccagaagttcaaggctgtagtgagctatgatagtgccactactgcagcctgagagacagagtgagaccctgtcgctaatttaaaaaaaaaaaaaaaaaaaaaagccttccccgtgtttaaatagggatcttggagaattagcgtatattctgcatacttgaaaatgagttgtgtatgcttttttaaaaaagaaaattctatttagttttatttaggagcttgtaggccatttctcattttgtgactaaatgatcactaactcatttgcggtaatcgttttccattttttttcaagatttaaaatcattcagacagcatttgactaaggaatctgacacacatttaatgtaagaagctattccaactgcaaaaacataattattagaattttatttctgcacatctgctggctttgtaatgtactccccatgttgaaacctaagaatgctttcatgtttgactttcacatggatcatttcagtgtaggcccaggggagacactagtctgccactaagaaaatacggttggtamgcaatgaatggagacatgttttcagtgtacgttaacatttgcttcatcttccaagatatatggtgtttagatgtttgctctcctgagcaaagaaaatgttctattagtcctctaaatgtttttttttcccttgttattatagtgtccttgacctaaatgcatttgagcgacaaaacaaagctgaaggtcttgggatggtgacagaggaaggatcaggtattaatgacttacattaaaaggatcacctgtctcccttccctccctgaaacgagtcaattatcaattacctttcaagtagagagataagaagttattttaaagttgatgaaatgcttacatgactcatttcaaagttcatagttgga

SEQ ID NO: 705379 - DNA, 1340 bp, Homo sapiens
gaacagagccctcagaaataataccacacatctacaaccatctgatctttgaatcaccataggaacagaatgcaccataggaacagtaagttcaacagcctccaaatgaaatttttttttccaaaaatattcccattcttgtrattactgtatcagggaacaatactaccctccacccagttagccaaacacaaaacctggaacctggaagccactcttaactcctctttctcccttctacctacacaatttattttcaagttgtttcagtgtttcctcttaaatctccccttaatggaaaaagccccctccaaactatgtgaagattgatagattgttgatcagcatgacatacccccatttgaaacacttcagtcctcccaggttaagtcaggttcctttaataaggcctataataaactgtaaccctgtcttactggtttatgttagtcctttcttccctttacacagtaggatatagccatcttcattttcatttctataaatgttctatatgaaccttggtcagcctctaagacttcaaataatgggctggatgacaccctcactaagctgcttaatttccactgaatctcaatttagacatcgcttactcagaaaagccatctgggacttccaccctcacccctaggctaggggctcctcttgtattcctatcacaattatcacatgctattatatgactgcattttcttcaagaaaataaacttcatgaacacacagactatttcatcactgcaaacagctccacacagtgccaggtactccatttaattaactgctaatataaattaaactgaattgtctttttcttcatctctctattcttgtcctcataatctggaaacatttctcaaccttgtcttctactgattcaaatgtctgctttatcatttctggtgttgatcaaatttaatgcatctaactttagtaccttttttcaactcatgccattctcatttttcatctttgcctattataatgaccatcacaatttttttaggactttataaaacacacattctaaaaacctctccttatggcaatatatctattttaagcagaatagcagagttctcagtgtttttttttttttttttttttttggctgaaatggtaatttacaaaccccacctttttttctttttgcttgttatcaataaaggcctggtttgaatctgaccaaatgggtaggataccataaaaattgttcaggggttatgtcacaaactggcacaaaactacacctgcttcctttacaaaaggaacaagggggggggggaacacccagggagagggggaaaggaaccacaacagga

SEQ ID NO: 705380 - DNA, 1340 bp, Homo sapiens
gaacagagccctcagaaataataccacacatctacaaccatctgatctttgaatcaccataggaacagaatgcaccataggaacagtaagttcaacagcctccaaatgaaatttttttttccaaaaatattcccattcttgtgattactgtatcagggaacaatactaccctccacccagttagccaaacacaaaacctggaacctggaagccactcttaactcctctttctcccttctacctacacaatttattttcaagttgtttcagtgtttcctcttaaatctccccttaatggaaaaagccccctccaaactatgtraagattgatagattgttgatcagcatgacatacccccatttgaaacacttcagtcctcccaggttaagtcaggttcctttaataaggcctataataaactgtaaccctgtcttactggtttatgttagtcctttcttccctttacacagtaggatatagccatcttcattttcatttctataaatgttctatatgaaccttggtcagcctctaagacttcaaataatgggctggatgacaccctcactaagctgcttaatttccactgaatctcaatttagacatcgcttactcagaaaagccatctgggacttccaccctcacccctaggctaggggctcctcttgtattcctatcacaattatcacatgctattatatgactgcattttcttcaagaaaataaacttcatgaacacacagactatttcatcactgcaaacagctccacacagtgccaggtactccatttaattaactgctaatataaattaaactgaattgtctttttcttcatctctctattcttgtcctcataatctggaaacatttctcaaccttgtcttctactgattcaaatgtctgctttatcatttctggtgttgatcaaatttaatgcatctaactttagtaccttttttcaactcatgccattctcatttttcatctttgcctattataatgaccatcacaatttttttaggactttataaaacacacattctaaaaacctctccttatggcaatatatctattttaagcagaatagcagagttctcagtgtttttttttttttttttttttttggctgaaatggtaatttacaaaccccacctttttttctttttgcttgttatcaataaaggcctggtttgaatctgaccaaatgggtaggataccataaaaattgttcaggggttatgtcacaaactggcacaaaactacacctgcttcctttacaaaaggaacaagggggggggggaacacccagggagagggggaaaggaaccacaacagga

SEQ ID NO: 705381 - DNA, 633 bp, Homo sapiens
atttatttatttatttatttatttatttatttatttatttttrttgtggttgaaacaagctgtcctttaataagaccacctatgttctgtttctcaactctcaggaagttgacttcctgagctggggaatgaaatgccagaagaacaaatagatgaagctgcagcatcttgctgatctgtaaattcagtgttcctcacagcaactctatgccttctgcctggatcaggtatctgctcgtttgtgtgttccaattgggcagcatctcatttcttccctttctctccaaaattttccttcattttattttttgtagaaaggcctttaagtaatggctatctttattccttttggagctcatggtataataaaacatttacctctgtatttgatctacatttaagtttagtgatttcctatcttcttggtcaatgcttgtacctcttagggttctgagtctgttctatgaaaaagttgctcagaacctctcccaaaattgccttggtttaagtgaccttctgcttacaatgttcaaacctttttttttttttttttttttttttttggctgatccttacttttttcccctcgatttccctgttctttattattctccctggccacacttctgcatt

SEQ ID NO: 705382 - DNA, 574 bp, Homo sapiens
caaaaaaattaacttgatacttaagatagctgaatataaaataacattttgagaaatttaagtatctatggtggaaatggctagcacctggcccatcttataaaaaatgcagaacaaaattgaaattgatcctaacagatatcttactgttagaatttgggatgaaatttctgccagctataagattgattatgttggattaaaaaaattagagatatacccatgaatcattaaataaaaccaacgggctctgcctggctgataaattataattcgctgtcacattcttagagattcatctccataaataagtgctgaatgtaggagctgtggctgggagaacatgtattccattsactcatagtgccagtggtctaggtgtggacatcttccttgtagtaggcattgtgtgtgtgtacgttgggggaatgatatttaatatccaacctcttcctctttagggatagctcacacgatgtgtatagatttggtgggatgcagactgcttactaccatatgaaaaatgaaatctgggaggttcttatgacagcccctagtagcttagagcatgagc

SEQ ID NO: 705383 - DNA, 1456 bp, Homo sapiens
cacagtggcaggaggagaagggggtacgactgtactaggacaatatctgatttatttacatttatttgcttgtgaatccatctttcctactggaatgcaaactccatgaaggtcgagactttgatttccccagcatgtagaactccgtctggcacatagtatggcacagtaaatatttgttgattgaatgcatgtagaatggccggtaggccttgygaggggagttgaactttaacccagaggtgctgggagggaacttaatttgcagataagtggttgaagattatggtaagatttgagtttcagaaagatatctctgatgctagaagaaatgatgaaggatagaaaatggaatcctggcaatggaagttggaagcagcagctacacaaaagtagctaagagtttcagaacagaagaggctataggcctgtgctttctggaacagaagtgaccctgggagctgaagggagtgcatgctagaacttcaggttgtttgctgaggcatttgaggtattaatgatctgctcaatattttacagagaaatgtatcaaggctaagaactgttgattgaggtttttcttttgttgaatatcattcagtgtttattattcatctggcatgatctagaaactgttgaaatacacatttttattgatctgcataaacttttttcattttattacataaaccatataactatcatttgagaaacaaaatctttctctacaaaaataataaaaaagtggatgtagcattattttccttcctacttaaaatttgtccggaattcaaaagcatcatcagcatccctgagaacatgtcagaaatgcaacattgcggaatcaccttagatgaactgaatgacaatctacattttaggaagctaacaagtgatccatgcaaagcttaagaagctatactttaaggaatatttacttcagatattttccccccaaatgaggccatttaaggaaatttctatttaaagccacatgaaaatatatacctatctttacttcctaattaaggaaaagttaaaattgaaggcatttgaaaaattataaaggataaaaagcataattatttatcaatgtcattatcaaatatttgactgtacatgttggtttgaggttttgctcagtcccataacttaacatggttattctgtgtactgagttgtcactgccctgcaggcttgagcccaaatgtaacacagttcatacactggaggtaggttcagcaccctgcagtagaaatgcccagctgagtcctgcctggatcagccaaaattattaacatgaaaatccatgaacatgaaaatccatgcttagtgttataagccactgagttttgaataattagttatcaacaaattaattaataccaattgtgcagatgttgaccaatataatatttctacatctactcagacaaaaatattttattaaaatgta

SEQ ID NO: 705384 - DNA, 1456 bp, Homo sapiens
cacagtggcaggaggagaagggggtacgactgtactaggacaatatctgatttatttacatttatttgcttgtgaatccatctttcctactggaatgcaaactccatgaaggtcgagactttgatttccccagcatgtagaactccgtctggcacatagtatggcacagtaaatatttgttgattgaatgcatgtagaatggccggtaggccttgcgaggggagttgaactttaacccagaggtgctgggagggaacttaatttgcagataagtggttgaagattatggtaagatttgagtttcagaaagatatctctgatgctagaagaaatgatgaaggatagaraatggaatcctggcaatggaagttggaagcagcagctacacaaaagtagctaagagtttcagaacagaagaggctataggcctgtgctttctggaacagaagtgaccctgggagctgaagggagtgcatgctagaacttcaggttgtttgctgaggcatttgaggtattaatgatctgctcaatattttacagagaaatgtatcaaggctaagaactgttgattgaggtttttcttttgttgaatatcattcagtgtttattattcatctggcatgatctagaaactgttgaaatacacatttttattgatctgcataaacttttttcattttattacataaaccatataactatcatttgagaaacaaaatctttctctacaaaaataataaaaaagtggatgtagcattattttccttcctacttaaaatttgtccggaattcaaaagcatcatcagcatccctgagaacatgtcagaaatgcaacattgcggaatcaccttagatgaactgaatgacaatctacattttaggaagctaacaagtgatccatgcaaagcttaagaagctatactttaaggaatatttacttcagatattttccccccaaatgaggccatttaaggaaatttctatttaaagccacatgaaaatatatacctatctttacttcctaattaaggaaaagttaaaattgaaggcatttgaaaaattataaaggataaaaagcataattatttatcaatgtcattatcaaatatttgactgtacatgttggtttgaggttttgctcagtcccataacttaacatggttattctgtgtactgagttgtcactgccctgcaggcttgagcccaaatgtaacacagttcatacactggaggtaggttcagcaccctgcagtagaaatgcccagctgagtcctgcctggatcagccaaaattattaacatgaaaatccatgaacatgaaaatccatgcttagtgttataagccactgagttttgaataattagttatcaacaaattaattaataccaattgtgcagatgttgaccaatataatatttctacatctactcagacaaaaatattttattaaaatgta

SEQ ID NO: 705385 - DNA, 1456 bp, Homo sapiens
cacagtggcaggaggagaagggggtacgactgtactaggacaatatctgatttatttacatttatttgcttgtgaatccatctttcctactggaatgcaaactccatgaaggtcgagactttgatttccccagcatgtagaactccgtctggcacatagtatggcacagtaaatatttgttgattgaatgcatgtagaatggccggtaggccttgcgaggggagttgaactttaacccagaggtgctgggagggaacttaatttgcagataagtggttgaagattatggtaagatttgagtttcagaaagatatctctgatgctagaagaaatgatgaaggatagaaaatggaatcctggcaatggaagttggaagcagcagctacacaaaagtagctaagagtttcagaacagaagaggctataggcctgtgctttctggaacagaagtgaccctgggagctgaagggagtgcatgctagaacttcaggttgtttgctgaggcatttgaggtattaatgatctgctcaatattttacagagaaatgtatcaaggctaagaactgttgattgaggtttttcttttgttgaatatcattcagtgtttattattcatctggcatgatctagaaactgttgaaatacacatttttattgatctgcataaacttttttcattttattacataaaccatataactatcatttgagaaacaaaatctttctctacaaaaataataaaaaagtggatgtagcattattttccttcctacttaaaatttgtccggaattcaaaagcatcatcagcatccctgagaacatgtcagaaatgcaacattgcggaatcaccttagatgaactgaatgacaatctacattttaggaagctaacaagtgatccatgcaaagcttaagaagctatactttaaggaatatttacttcagatattttccccccaaatgaggccatttaaggaaatttctatttaaagccacatgaaaatatatacctatctttacttcctaattaaggaaaagttaaaattgaaggcatttgaaaaattataaaggataaaaagcataattatttatcaatgtcattatcaaatatttgactgtacatgttggtttgaggttttgctcagtcccataacttaacatggttattctgtgtactgagttgtcactgccctgcaggcttgagcccaaatgtaacacagttcatacactggaggtaggttcagcrccctgcagtagaaatgcccagctgagtcctgcctggatcagccaaaattattaacatgaaaatccatgaacatgaaaatccatgcttagtgttataagccactgagttttgaataattagttatcaacaaattaattaataccaattgtgcagatgttgaccaatataatatttctacatctactcagacaaaaatattttattaaaatgta

SEQ ID NO: 705386 - DNA, 1456 bp, Homo sapiens
cacagtggcaggaggagaagggggtacgactgtactaggacaatatctgatttatttacatttatttgcttgtgaatccatctttcctactggaatgcaaactccatgaaggtcgagactttgatttccccagcatgtagaactccgtctggcacatagtatggcacagtaaatatttgttgattgaatgcatgtagaatggccggtaggccttgcgaggggagttgaactttaacccagaggtgctgggagggaacttaatttgcagataagtggttgaagattatggtaagatttgagtttcagaaagatatctctgatgctagaagaaatgatgaaggatagaaaatggaatcctggcaatggaagttggaagcagcagctacacaaaagtagctaagagtttcagaacagaagaggctataggcctgtgctttctggaacagaagtgaccctgggagctgaagggagtgcatgctagaacttcaggttgtttgctgaggcatttgaggtattaatgatctgctcaatattttacagagaaatgtatcaaggctaagaactgttgattgaggtttttcttttgttgaatatcattcagtgtttattattcatctggcatgatctagaaactgttgaaatacacatttttattgatctgcataaacttttttcattttattacataaaccatataactatcatttgagaaacaaaatctttctctacaaaaataataaaaaagtggatgtagcattattttccttcctacttaaaatttgtccggaattcaaaagcatcatcagcatccctgagaacatgtcagaaatgcaacattgcggaatcaccttagatgaactgaatgacaatctacattttaggaagctaacaagtgatccatgcaaagcttaagaagctatactttaaggaatatttacttcagatattttccccccaaatgaggccatttaaggaaatttctatttaaagccacatgaaaatatatacctatctttacttcctaattaaggaaaagttaaaattgaaggcatttgaaaaattataaaggataaaaagcataattatttatcaatgtcattatcaaatatttgactgtacatgttggtttgaggttttgctcagtcccataacttaacatggttattctgtgtactgagttgtcactgccctgcaggcttgagcccaaatgtaacacagttcatacactggaggtaggttcagcaccctgcagtagaaatgcccagctgagtcctgcctggatcagccaaaattattaacatgaaaatccatgaacatgaaaatccatgcttagtgttataagccactgagttttgaataattagttatcaacmaattaattaataccaattgtgcagatgttgaccaatataatatttctacatctactcagacaaaaatattttattaaaatgta

SEQ ID NO: 705387 - DNA, 1380 bp, Homo sapiens
atctggctttytcttccagaagccagataacaaagaagcccaggtgaaggagtacctaaagatcagcctcctagggcatggagaagggtagaaaaggtataaagagtattttttctttttttttttaagcattagctggatgtggtggcacaagcctgtagttctagctactcagaaggctggggtgtgaggatcgcttgagtccaggagatagagaccagcctagacaactgagccagaccttgtctttaaaaacaaaaacaaaacaaaacaaaaaacaaaccccagcattaatctatccaagcctgcatgccaagtaccactaatggcacaattctagttcagccactcatgatatcagacactataagaatagtggccactgacatgtttaagcctcaacagggtacagtaaggttccatataccagtggcttccccagccctatggggctacggaactggtggatagtgttgttcagcactctggcctctattacgtctcggataagaatactgcattttctctccacctggtaggaagcattgtttcaatgatgcaatcttggcaggcttcaggattacaggccattcttggtcacatccttagccccatattagaagccaccaacaggggacactttaaatgtatcttatcagaagatccactcatcatgcacccagaaggttcctatcaattatacaggctgcaaaaaagcaagagacatgtcacagacaaaaacaaagaaaccagacattggttgggcaaattcagaaatatttaaagtatcccttaaggaaggagcagggaaccaagtcctagaacttagtgtgtatagctgctggaactgtgcctataaatctcttatatctggtccaggcttcccgttagccgtgagtttgtctgtggttttgctgcataagagcagctaaatccattccagatttttgtgtcaccccatcagcctggctgcttttctgagtgagtagcagtagcagcccctaatctccactcatccctgcaattttatccttctccctgttttcagccataaagcgtaattctcctgaatattcctgggctccacaggggcgggtctcctttttaccaatcactggcagtcttgcggcccagggttttccttgggtgtcacacttgtttgggggaattagtgcccagcagtcccaccatgatcctcccacccttttatcttctgggttcccaaatgcgagggctgcctcagcacaaccaggattgctgacactggggcttgggtgacagggccccctgggagagaatgcttttgtccctgggaaggcccagttggacaatgggcagttccaaaaacacttagcaccgaggcaaagtggagtttaacct

SEQ ID NO: 705388 - DNA, 617 bp, Homo sapiens
ctttggcaataattgttgggtcagtgattggctttctgtgccgtgagcagcaggacctaagccgaaccccttgtgtttcggtaacatgttaggcatgaaaaagccccctctggatccacaggctgggtgtaaggggaattcagaaggtgacaggcttgggggagcttctgagacagcaaagccaagcaggacacttgagataatgagatgttaagtacctggaaaaatgagtacccagtgctaggtttatcactattcaccagtcgccatgacattgggcaagctcatttctctgagcctcagtgagtgctgctcactattctgaacaccaaatgtgttcctggacaaagtctgtcaagggccacagagatttaaccgattccacactctccaaactcctgcccgttccacatggggtagagtttcccaaacctggttgkaagtcagcaaaaactggggagctcatttcttaaacataatataagagaatgtgttcaaagtatcattttatcatcataatacaatctatatgttacttataagaaaaatgaatttaaaaagcaggtatgtctcataggctgcagcttaaggacaagattcgggggagtggaagtaag

SEQ ID NO: 705389 - DNA, 1019 bp, Homo sapiens
ttctttttatttttattttactttaagttctaggataaaagtgcacaacatgcaggtttgttacataggtatacgtgtgccatggtgggtttgccacacctatcaacccatcatcaaggttttaagccctgcatacattagctatttgtcctaatgctctccctcccctctccccgaccctgcaacaggccctggtgtgtgatgttcccctccctgtgtccatgtattctcatcattcaactcccacctataagtgagaacatgcagtttttggttttctgttcctgtgtttgctgaggatgatggtttccagcttcatccatgtccctgcaaaggacatgatctcattcctttttatggctgcatagtattccatggtgtatatgacatgtacattttttaacaaatagacaaatgtcagcctgtaattgaaagagagtaatcaggaagctgttctgatagcctgaataaaaggaaataagatgaaggggggtggtaacggaaagagtcaaggtacatttattataaagaaagccttgattgcamggttaacccacacacaaactgtgggttaaccactgataacttccactgtttcacaaagcccacttcaaaaactgagtgatatgggagaggcagacatgtgtttcaggagacgggaaggttatttccactgtgtacaagtggatgctgctttggacactgatggacagagccattgcactggaaaataattttttattttcatgatagcctaccgttgaatttaccattctgatattaatgaaacatctctataaagggttgaagtgtcttcctgcaacaattgctaaggaacagaattgtcaatttattaataaaatatgacatgtgttgaacaagagaagctgggtcaagcatttgaggatgcttttgaggttctgaggcaacattcaactggagatcttcagtactcgccagattacaaaaattacctggctttaatcaaccatcgtcctcatgtcaaaggaaattccagc

SEQ ID NO: 705390 - DNA, 824 bp, Homo sapiens
tttaaaaatatcactttaattagctgggcgtggtagcgggtgcctgtaatcctagctgctagagaggctgaggcaggagaatcacttgaaaccgggaggcagaggttgcagtgagccgagatggtgccactgctctccagcctaggtgacagagtgagacactatcttaagaaaaaaaaatatatatatatatacatatatatttatttatttatttattttatttatttatttaatggctgtaccctatattcttcttgatttctagccttttattggctctcagattgccagagttgggactcaatagtaagtaaccattttgttgaggtggtagtgattctaccagggtgagttatcatgacagcagaatcactgcgtttttctctctactctgtggcatagactctatgccatagagtgacgtgtgaaaggcttgaggctccctacctacgagacaccctggtccattctagcagtatggcacgtgctgactgggttttgagtctcttgctgtaaaatcacattactgcacttccctgcattttctcatccaaaaatggggattacctgctttgtggatcggtttgcagatgaaataacacacgcagggtatctagcayggtcccccacatggcacattcagtgttagccacacttccatactaactgctgcggggatatttaatgagctcttaaatggcagaaatgttgtgtcttttcctgttcccttagtattcctatttttgttggtaatttttcttatgaaccatgcagttgtctagttcaggccattttagtatgcagttttatctttgcttcca

SEQ ID NO: 705391 - DNA, 2636 bp, Homo sapiens
agagggaagagggaaaagtagaattggagcaggagagatggatggccacaaataccatgagggatggcattgccggggaggcatctccactgtcactagaggtggctgtcactactcagtgacattgatggtgattgattacccatgtggccttgttagcttcctcttccacaggaaggcggaagcagtctacccagatacagtggcactgaccttcgaccccatccaccagtggctgtcctgcgtgtataaggaccacagcatctacatctgggatgtcaaggacatcaacagagtgggcaaggtgtggtcagagctcttccacagctcctacgtttggaacgtggaggtgagccccccccccacccccttgcccctgcttggcctctgcacagttccccacagtttgggaacccattcagtaattccttcagaagatactcattgactccctcctatgcatcaggccctgtcctaggtgctgaggacacagacacaaaatccctgcccttaacaagctcacatttggatgggaaaggaaacctggaaacatcatcagtgaataacacgccaagcagcagtaaccctctgaagaaaaatgaggcggggaaggggaaggggaatgcaggtggtattctagagaggagaggggtcagggaaggcctccctgaggacatatgagcagagacctgcaggaaatcggggagtgagacctgcaactgctggggagaaccacaagcacagaggccctgcggcagkaacatgcactccacagagagctttgctgtggaggtcgtttatgtatttcactgctttttttaaaaaggagttgaagacggggcatggtggctcacacctgtaatcccaacactttgggaatctgaggcgggaggatcacttgagtccaggagtttgagaccagcctgggcaacacaagaccctgtctctacaaataatttttaaaaattagccaggcatggtagcacacacgtgtggtcccagctactcaagaggtggaggcaggaagatcacttgagcctgggatgtcaaggctgcagtgagctgtgattgtgccaccacactcccacactccagcctgggtaacagtgagaccatgtctaggaaaaaaaaaaaagttttgaagtttttattttctgagaatgaatttgtgggtttttaaaaattctctaaagttaaccaggcacagtggctcatgcctgtagtcccagcactttgggaaatcgaagtgggcagattgcttgagtccaggggttcgagatcagcctgggcaacatgaggaaaccccggctttacaaaaaatacataaaaattagccaggcgcgcctatagttgcagctactcggcaggggctgcggcaggggggctgaaaatttcttactgggaatgtttgtcctagagaaattgggttttcagtggccagattcaggatcgtgagaaagaactttgtccttttgaataggcagcattcagcctatgactctggttgaatctgtctgccttcatggggctgacgtttttgttgacagcactttttttccactcaaagaatgttttttaataacttttaaaattcctgtatgaaatttttaaaaatttgggataataggtgaaatattacagataaggctacagtccacattgatgacttccctgcccccagttctgctctctctcgccctcaccattatcaattttattatgggtgtcttcagttgattttctttgcatctccttattgtttatgtatatagctgttcaacaacagtatctgtggatagatcttttcatcagttctagaaaattctcagccaatactgcttctaccctcttctctctctttttttttttcagacggagtttcactcttgttgcccaggctggagtgcaatggtgtgatctcggttcactgcatcctccgcctcccgggttcaagtgattctcctgcctcggcctctcaggtagctgggattccaggcatgcgccaccacgccttgctaattttgtatttttagtagagacggggtttctccttgttggtcaggctggtcttgaactcccgacctcaggtgatccgcctgccttggcctcccaaagtgctgggattacaggcatgagccaccatgcccggcctattcgctctcttctaaggttctatctaactctaaggttctatctgtattcttcatgtttctgaaaataaaaatcacacaaaagatatgtagagtttatcaattattgttagcagctttttttcccccccaagacggaatctggctgtgttgcccagtctggagtgcaatggcacaatctaagctcactgcaacctccagctcctgcgttcaaacaattctcctgcctcagcctcccgagtagctgggattacaggcagccgccaccacgcctggctaatttttgtgtttttagtagagatggggtttaaccatgttggccaggctagtttcaaacccctgacctcaagtgatctgcctgcctcggcctcccaaagtgctgggattacaggcgtgagccactgtgcctggcctgttagcagctattgatgctcagttcctggacccttttatttattgagggttgcaatatggtgatattctaaa

SEQ ID NO: 705392 - DNA, 2636 bp, Homo sapiens
agagggaagagggaaaagtagaattggagcaggagagatggatggccacaaataccatgagggatggcattgccggggaggcatctccactgtcactagaggtggctgtcactactcagtgacattgatggtgattgattacccatgtggccttgttagcttcctcttccacaggaaggcggaagcagtctacccagatacagtggcactgaccttcgaccccatccaccagtggctgtcctgcgtgtataaggaccacagcatctacatctgggatgtcaaggacatcaacagagtgggcaaggtgtggtcagagctcttccacagctcctacgtttggaacgtggaggtgagccccccccccacccccttgcccctgcttggcctctgcacagttccccacagtttgggaacccattcagtaattccttcagaagatactcattgactccctcctatgcatcaggccctgtcctaggtgctgaggacacagacacaaaatccctgcccttaacaagctcacatttggatgggaaaggaaacctggaaacatcatcagtgaataacacgccaagcagcagtaaccctctgaagaaaaatgaggcggggaaggggaaggggaatgcaggtggtattctagagaggagaggggtcagggaaggcctccctgaggacatatgagcagagacctgcaggaaatcggggagtgagacctgcaactgctggggagaaccacaagcacagaggccctgcggcaggaacatgcactccacagagagctttgctgtggaggtcgtttatgtatttcactgctttttttaaaaaggagttgaagacrgggcatggtggctcacacctgtaatcccaacactttgggaatctgaggcgggaggatcacttgagtccaggagtttgagaccagcctgggcaacacaagaccctgtctctacaaataatttttaaaaattagccaggcatggtagcacacacgtgtggtcccagctactcaagaggtggaggcaggaagatcacttgagcctgggatgtcaaggctgcagtgagctgtgattgtgccaccacactcccacactccagcctgggtaacagtgagaccatgtctaggaaaaaaaaaaaagttttgaagtttttattttctgagaatgaatttgtgggtttttaaaaattctctaaagttaaccaggcacagtggctcatgcctgtagtcccagcactttgggaaatcgaagtgggcagattgcttgagtccaggggttcgagatcagcctgggcaacatgaggaaaccccggctttacaaaaaatacataaaaattagccaggcgcgcctatagttgcagctactcggcaggggctgcggcaggggggctgaaaatttcttactgggaatgtttgtcctagagaaattgggttttcagtggccagattcaggatcgtgagaaagaactttgtccttttgaataggcagcattcagcctatgactctggttgaatctgtctgccttcatggggctgacgtttttgttgacagcactttttttccactcaaagaatgttttttaataacttttaaaattcctgtatgaaatttttaaaaatttgggataataggtgaaatattacagataaggctacagtccacattgatgacttccctgcccccagttctgctctctctcgccctcaccattatcaattttattatgggtgtcttcagttgattttctttgcatctccttattgtttatgtatatagctgttcaacaacagtatctgtggatagatcttttcatcagttctagaaaattctcagccaatactgcttctaccctcttctctctctttttttttttcagacggagtttcactcttgttgcccaggctggagtgcaatggtgtgatctcggttcactgcatcctccgcctcccgggttcaagtgattctcctgcctcggcctctcaggtagctgggattccaggcatgcgccaccacgccttgctaattttgtatttttagtagagacggggtttctccttgttggtcaggctggtcttgaactcccgacctcaggtgatccgcctgccttggcctcccaaagtgctgggattacaggcatgagccaccatgcccggcctattcgctctcttctaaggttctatctaactctaaggttctatctgtattcttcatgtttctgaaaataaaaatcacacaaaagatatgtagagtttatcaattattgttagcagctttttttcccccccaagacggaatctggctgtgttgcccagtctggagtgcaatggcacaatctaagctcactgcaacctccagctcctgcgttcaaacaattctcctgcctcagcctcccgagtagctgggattacaggcagccgccaccacgcctggctaatttttgtgtttttagtagagatggggtttaaccatgttggccaggctagtttcaaacccctgacctcaagtgatctgcctgcctcggcctcccaaagtgctgggattacaggcgtgagccactgtgcctggcctgttagcagctattgatgctcagttcctggacccttttatttattgagggttgcaatatggtgatattctaaa

SEQ ID NO: 705393 - DNA, 2636 bp, Homo sapiens
agagggaagagggaaaagtagaattggagcaggagagatggatggccacaaataccatgagggatggcattgccggggaggcatctccactgtcactagaggtggctgtcactactcagtgacattgatggtgattgattacccatgtggccttgttagcttcctcttccacaggaaggcggaagcagtctacccagatacagtggcactgaccttcgaccccatccaccagtggctgtcctgcgtgtataaggaccacagcatctacatctgggatgtcaaggacatcaacagagtgggcaaggtgtggtcagagctcttccacagctcctacgtttggaacgtggaggtgagccccccccccacccccttgcccctgcttggcctctgcacagttccccacagtttgggaacccattcagtaattccttcagaagatactcattgactccctcctatgcatcaggccctgtcctaggtgctgaggacacagacacaaaatccctgcccttaacaagctcacatttggatgggaaaggaaacctggaaacatcatcagtgaataacacgccaagcagcagtaaccctctgaagaaaaatgaggcggggaaggggaaggggaatgcaggtggtattctagagaggagaggggtcagggaaggcctccctgaggacatatgagcagagacctgcaggaaatcggggagtgagacctgcaactgctggggagaaccacaagcacagaggccctgcggcaggaacatgcactccacagagagctttgctgtggaggtcgtttatgtatttcactgctttttttaaaaaggagttgaagacggggcatggtggctcacacctgtaatcccaacactttgggaatctgaggcgggaggatcacttgagtccaggagtttgagaccagcctgggcaacacaagaccctgtctctacaaataatttttaaaaattagccaggcatggtagcacacacgtgtggtcccagctactcaagaggtggaggcaggaagatcacttgagcctgggatgtcaaggctgcagtgagctgtgattgtgccaccacactcccacactccagcctgggtaacagtgagaccatgtctagraaaaaaaaaaaagttttgaagtttttattttctgagaatgaatttgtgggtttttaaaaattctctaaagttaaccaggcacagtggctcatgcctgtagtcccagcactttgggaaatcgaagtgggcagattgcttgagtccaggggttcgagatcagcctgggcaacatgaggaaaccccggctttacaaaaaatacataaaaattagccaggcgcgcctatagttgcagctactcggcaggggctgcggcaggggggctgaaaatttcttactgggaatgtttgtcctagagaaattgggttttcagtggccagattcaggatcgtgagaaagaactttgtccttttgaataggcagcattcagcctatgactctggttgaatctgtctgccttcatggggctgacgtttttgttgacagcactttttttccactcaaagaatgttttttaataacttttaaaattcctgtatgaaatttttaaaaatttgggataataggtgaaatattacagataaggctacagtccacattgatgacttccctgcccccagttctgctctctctcgccctcaccattatcaattttattatgggtgtcttcagttgattttctttgcatctccttattgtttatgtatatagctgttcaacaacagtatctgtggatagatcttttcatcagttctagaaaattctcagccaatactgcttctaccctcttctctctctttttttttttcagacggagtttcactcttgttgcccaggctggagtgcaatggtgtgatctcggttcactgcatcctccgcctcccgggttcaagtgattctcctgcctcggcctctcaggtagctgggattccaggcatgcgccaccacgccttgctaattttgtatttttagtagagacggggtttctccttgttggtcaggctggtcttgaactcccgacctcaggtgatccgcctgccttggcctcccaaagtgctgggattacaggcatgagccaccatgcccggcctattcgctctcttctaaggttctatctaactctaaggttctatctgtattcttcatgtttctgaaaataaaaatcacacaaaagatatgtagagtttatcaattattgttagcagctttttttcccccccaagacggaatctggctgtgttgcccagtctggagtgcaatggcacaatctaagctcactgcaacctccagctcctgcgttcaaacaattctcctgcctcagcctcccgagtagctgggattacaggcagccgccaccacgcctggctaatttttgtgtttttagtagagatggggtttaaccatgttggccaggctagtttcaaacccctgacctcaagtgatctgcctgcctcggcctcccaaagtgctgggattacaggcgtgagccactgtgcctggcctgttagcagctattgatgctcagttcctggacccttttatttattgagggttgcaatatggtgatattctaaa

SEQ ID NO: 705394 - DNA, 1248 bp, Homo sapiens
tcctctgaaaattctttaaatacctaacctatctatcaccattttcaagtatatacatataacctatctatcactgtaggttactttatattttatacgtatttaatatttatgtgtatatacttgaaaatagtgataggttacattcgtaagtatatacatatttttctgcaacagaatcccagatttggggtcataaatcacctttcccttcttattcaatgtgatttgagtttaacagatacacctattctgaggttaatgggtgtgattcagccagggaaatgagaggaccagcytcctctggtctcagggatcatttagatatgggcacgtctcaatctttaccatatgttaaataaggtaaaacatggaaatggcactatatctgttggaatgaaacatgctctattttcttctgcacccttttttctgcattgcttaaaatttattaatctgtatttctgaaactttgcactgtagtccatgaggaacagaaagctggtgctgagattttgattaaagagaaacactaggttgtggagtaacattacaggaacacattttctcattcaatcacataatcactgtgaatatcatcaataaaagagacggtgactgaatttctctgtgcttttctggtcctcatagtgagactcaaagctcgattctttgcacacatttccagcaccattctactgttagtgcacagcagtcattgtgggacccccttagacctgtttcttctctttggtcttctgtttcctgttccccatatgctctttctttcagtggcacatacacttcagtggcatcccgatacatggtgtaaggtaactgcatttttggagaacttgacaatgtaaacatatctctattccgcccccacttgactcatgccagctggacatataattgtaggtaggaaatcatctttcttcagaattttgaaggcattgccttactgtcttctagctctcgtgctgctgttgagaagtctcacctttttctcctctgtggaaacttatcagatatctttgtcccaggtatcacacaatttcttaaaggcacaccttcctttgggtctatttagaactctattttggacaatttgtggaacctttcaaccttcctatttatgaccttaaattttggggcattattttaaattgtttattgtaacattttaaaattttgtttctttctggaacttgtattatttgaatgctgatggtcattgcttatcct

SEQ ID NO: 705395 - DNA, 1134 bp, Homo sapiens
cagatagtttccttgcaaatacctattaccagaattaaaccaagaagtagaaaccttgaatacaccaattaccacagatgaatctgaaaagatcatttataccattgaaaagggcccctgggatcagatggtttcataaccaagtcccagctctcagttaattccaatgtcatttgatttattccaaatgatggaaatgtgacagtatccttaatttattttacaaagctaatgtcactttaatgtaaagttttataacaataaaatgataaaaaggataaatcaatatatcttataaatataggtagaaatattttaaaatactaaagatatgatttaaactattggttaccctcatgatatacaatttgcctatataacaaactgcacgtgtacccctgaacctaaagtaaaagttaaaaataaataaatgataaactattagtaatggaaggcgctagcacaatcacacattaactaaggggataaaacatggatctcctaactacaccatatacaaaaataggctcctgatgaattaaaactgaaatatatatatatgttttaaatatcagtccaaaaagaaaatctaggaaattgtctttatatcmtgggtgtttaggagatccccttaggtaagaacaccttccttctacactgtcagcttgtgacagcacattgtgacagatcattgagctactggcacccttgcctggactctcgccaatctcctcactttatggctgggttccaggactggccaagtgtgtcttgtcccctcagccaggtattagataacatctcttacttgctacttttagacaggttggttgatgtggacttgatgatcagcccattggctggatttttatcaaccaaacagtaagtaaggggcctctgccggtgtgtcacggggctctgtcctttatcctctcctgtatcatgcagtcttgttttggggtctacctcaaaaacaaaagaacatatttatttctcaaacatgcaaaaagtaataactgttggatgactggctcaaaggcaggaacttttgtataaattaggattcccaagctaacaaaatggaattcaacaaatcctgcatttaagattcaacaagcaaacaaaatcctcata

SEQ ID NO: 705396 - DNA, 862 bp, Homo sapiens
tttgtgttctcatcttatttgtatcttggtatgaattatggcaaataacctgcttctgtattttcagctttaagttaatatgtttgtcacttaattgaattcctataggaactacaagttctgaagtttaaagccaaattctgacggaatgggaattgggacccatgaagcagcagttaatgaaagaaggtagctttgaatcaagtgttaaattgcaagctatgcattgagcatggtgagataattggggcagaagagatgaaggtgagatagygtgcttagaaaaagctttgaagaggaggcaggacctctgccaggccttgaaagacaacttggccagcccaagagaaaagacaacaattcctgctgatgcttgcccacaatgatttcctcatccttccccatctgatgagacataattcagacttttactcatttctctgtattatttagaacatttaaaacactgggtaaaagttatatattgcttttcatgttttctttcattatttcatgtttattaattcctcaacgacaggaaaaatacttgatacttttactgaacctgtcctatatagatcatggcatagccaacatgatatagtcatttgagtggcagttcagcataatctgtgtatgctcaaggttttaagtaagagaaatggaggtaagagaaactcaaaggatggaagcaggagggcccttggttatgtcatagagattacaactttctgcagcagaaccttctagagatgtggaaggaagatctaaacaaatcttccatgactagtgaaccattctcgggcatctccagtgtaaggaaacttaagtgtctataactaaaacccttatttctcttggc

SEQ ID NO: 705397 - DNA, 862 bp, Homo sapiens
tttgtgttctcatcttatttgtatcttggtatgaattatggcaaataacctgcttctgtattttcagctttaagttaatatgtttgtcacttaattgaattcctataggaactacaagttctgaagtttaaagccaaattctgacggaatgggaattgggacccatgaagcagcagttaatgaaagaaggtagctttgaatcaagtgttaaattgcaagctatgcattgagcatggtgagataattggggcagaagagatgaaggtgagatagtgtgcttagaaaaagctttgaagaggaggcaggacctctgccaggccttgaaagacaacttggccagcccaagagaaaagacaacaattcctgctgatgcttgcccacaatgatttcctcatccttccccatcwgatgagacataattcagacttttactcatttctctgtattatttagaacatttaaaacactgggtaaaagttatatattgcttttcatgttttctttcattatttcatgtttattaattcctcaacgacaggaaaaatacttgatacttttactgaacctgtcctatatagatcatggcatagccaacatgatatagtcatttgagtggcagttcagcataatctgtgtatgctcaaggttttaagtaagagaaatggaggtaagagaaactcaaaggatggaagcaggagggcccttggttatgtcatagagattacaactttctgcagcagaaccttctagagatgtggaaggaagatctaaacaaatcttccatgactagtgaaccattctcgggcatctccagtgtaaggaaacttaagtgtctataactaaaacccttatttctcttggc

SEQ ID NO: 705398 - DNA, 862 bp, Homo sapiens
tttgtgttctcatcttatttgtatcttggtatgaattatggcaaataacctgcttctgtattttcagctttaagttaatatgtttgtcacttaattgaattcctataggaactacaagttctgaagtttaaagccaaattctgacggaatgggaattgggacccatgaagcagcagttaatgaaagaaggtagctttgaatcaagtgttaaattgcaagctatgcattgagcatggtgagataattggggcagaagagatgaaggtgagatagtgtgcttagaaaaagctttgaagaggaggcaggacctctgccaggccttgaaagacaacttggccagcccaagagaaaagacaacaattcctgctgatgcttgcccacaatgatttcctcatccttccccatctgatgagacataattcagacttttactcatttctctgtattatttagaacatttaaaacactgggtaaaagttatatattgcttttcatgttttctttcattatttcatgtttattaattcctcaacracaggaaaaatacttgatacttttactgaacctgtcctatatagatcatggcatagccaacatgatatagtcatttgagtggcagttcagcataatctgtgtatgctcaaggttttaagtaagagaaatggaggtaagagaaactcaaaggatggaagcaggagggcccttggttatgtcatagagattacaactttctgcagcagaaccttctagagatgtggaaggaagatctaaacaaatcttccatgactagtgaaccattctcgggcatctccagtgtaaggaaacttaagtgtctataactaaaacccttatttctcttggc

SEQ ID NO: 705399 - DNA, 1118 bp, Homo sapiens
caagaggtttgcataggaataattgattgtctggaacaagatgccgcagatggatatttaatttggcacactttctgaagggctagatggacctasagtctagaaaatcgtcatatccctttaactctacccacttctgtaaatagagtctaagcagatcatctcagctagggaaaaagtctgattcaaggatgtgcctcaaagcattatttttaaatgtggggtgcgggggggacaaccaaaagtaggagtaaactcagagtgatagaatagaatactgtacagccatttaaaatattcttttttttctttttatttatttatttatttatttatttatttatttatttattatactttaagttttagggtacatgtgcacaatgtgcaggttagttacatatgtatacatgtgccatgctggtgtgctgcacccactaactcatcatctagcattaggtatatctcccaatgctaaccctttaatattctttaaaataactttgtaataacaggaatgagtgttcatgacatgatgttaaagtaaaaaaactagaggccgggcgcggtggctcatgcccgtgatcccagcactttgggaggctgaggcaggcggatcacaagatcaggagttcgggaccagcctggccaacatggcaaaaccccatctctactaaaaatacaaaaaaattagccaggtgtggtggcgggtgcctgtgatcccggctacttgggaggctgaggcaggagaatcgcttgaacccaggagggggggttgcagtgggccaagattgtgccactacactccagtctgggggacaagaatgagactttgtctcaaaaaaaaaagccaggaaccacaactgtgtgctatgtgtaatatgtaaccaaatacgtataatagtgtaaacagtacacacgtgtatggaatactaagcctaaatgtttttttctgtatctttggggttgagggtaatttctgttttcttctttattctttttagtgttttgcatgatttctgtacctgagctacttaggttttgccatgaggaaagcaaaaacaaagtttttttaaatgatcacagttaatacgtgggagtcctgaccatgtactaga

SEQ ID NO: 705400 - DNA, 1118 bp, Homo sapiens
caagaggtttgcataggaataattgattgtctggaacaagatgccgcagatggatatttaatttggcacactttctgaagggctagatggacctagagtctagaaaatcgtcatatccctttaactctacccacttctgtaaatagagtctaagcagatcatctcagctagggaaaaagtctgattcaaggatgtgcctcaaagcattatttttaaatgtggggtgcgggggggacaaccaaaagtaggagtaaactcagagtgatagaatagaatactgtacagccatttaaaatattcttttttttctttttatttatttatttatttatttatttatttatttatttattatactttaagttttagggtacatgtgcayaatgtgcaggttagttacatatgtatacatgtgccatgctggtgtgctgcacccactaactcatcatctagcattaggtatatctcccaatgctaaccctttaatattctttaaaataactttgtaataacaggaatgagtgttcatgacatgatgttaaagtaaaaaaactagaggccgggcgcggtggctcatgcccgtgatcccagcactttgggaggctgaggcaggcggatcacaagatcaggagttcgggaccagcctggccaacatggcaaaaccccatctctactaaaaatacaaaaaaattagccaggtgtggtggcgggtgcctgtgatcccggctacttgggaggctgaggcaggagaatcgcttgaacccaggagggggggttgcagtgggccaagattgtgccactacactccagtctgggggacaagaatgagactttgtctcaaaaaaaaaagccaggaaccacaactgtgtgctatgtgtaatatgtaaccaaatacgtataatagtgtaaacagtacacacgtgtatggaatactaagcctaaatgtttttttctgtatctttggggttgagggtaatttctgttttcttctttattctttttagtgttttgcatgatttctgtacctgagctacttaggttttgccatgaggaaagcaaaaacaaagtttttttaaatgatcacagttaatacgtgggagtcctgaccatgtactaga

SEQ ID NO: 705401 - DNA, 1118 bp, Homo sapiens
caagaggtttgcataggaataattgattgtctggaacaagatgccgcagatggatatttaatttggcacactttctgaagggctagatggacctagagtctagaaaatcgtcatatccctttaactctacccacttctgtaaatagagtctaagcagatcatctcagctagggaaaaagtctgattcaaggatgtgcctcaaagcattatttttaaatgtggggtgcgggggggacaaccaaaagtaggagtaaactcagagtgatagaatagaatactgtacagccatttaaaatattcttttttttctttttatttatttatttatttatttatttatttatttatttattatactttaagttttagggtacatgtgcacaatgtgcaggttagttacatatgtatacatgtgccatgctggtgtgctgcacccactaactcrtcatctagcattaggtatatctcccaatgctaaccctttaatattctttaaaataactttgtaataacaggaatgagtgttcatgacatgatgttaaagtaaaaaaactagaggccgggcgcggtggctcatgcccgtgatcccagcactttgggaggctgaggcaggcggatcacaagatcaggagttcgggaccagcctggccaacatggcaaaaccccatctctactaaaaatacaaaaaaattagccaggtgtggtggcgggtgcctgtgatcccggctacttgggaggctgaggcaggagaatcgcttgaacccaggagggggggttgcagtgggccaagattgtgccactacactccagtctgggggacaagaatgagactttgtctcaaaaaaaaaagccaggaaccacaactgtgtgctatgtgtaatatgtaaccaaatacgtataatagtgtaaacagtacacacgtgtatggaatactaagcctaaatgtttttttctgtatctttggggttgagggtaatttctgttttcttctttattctttttagtgttttgcatgatttctgtacctgagctacttaggttttgccatgaggaaagcaaaaacaaagtttttttaaatgatcacagttaatacgtgggagtcctgaccatgtactaga

SEQ ID NO: 705402 - DNA, 1702 bp, Homo sapiens
ccaattaatctgccttttgattttgagttgatttttcagcaaatttttgagagcggcatttgtctcctgatctgttggcctcaccattcctgaataatcagtgaaatgcctaatgccatatctcagcacattctactgtttcttcctatgatgcacgccagttcaaccacttctcctcaccatggcccctctgtcctgcccaccatcatcatgaaccccctgcttccacctgggtccctactcccactccagcctattctcagtacaacagcctgagtgatccttttacacgtgggaggaagatcttgtcattcttctgttgagatccttccaatgaaagggctaacagcaattacaatttcaaaagcattttcagaaactgtagtaaactaagtytaagaaagctggtggcttttgtttgtttgttttgtttttttgagacggagtcttgctctgtcgtccaggctggagtgccgtggtgccaccttggctcactgcaacctccgcctcccagtttcaagcgattctcctgcctcagccctcctgagtagatgggattacaggcatgcaccaccacgcccagctaatttttgtattatcagtagagacggggttttgccatgttggcaaggctggtctcaaactcctgacctcagatgatctgcccacctcagcctcccaaagtgctgggattacaggcataagccaccgtgactggctgcaccactgcacctcgcactctgagtttaaaacaaagtccttgaaatagttttcggggcccctgtagaatttgattctcttctctccccactggccggtcccctggcctcctgcgcttccctgagcattcccacctcaggtcgtggctctctgcggcccccctcagcctgaaatgtttcccctggaatctccataatttgttctctctctcaggaaatgaggtcttccctgactttcccccacaaaaaaatagcacccctcttggccctgcacacctcctcaccctctttattctcctctctttgtcccataccacttacccaggcacatacagtcatttacttgcttcttatccgtttccctcactaaaatgcaagctccacaaaggcaaggattttgtttttattcactgctgatttgctaatggcccagaagagggactgctatgtggtaaagcttaagaaattcgtgctgaacttggatgaagctggaggccattattctaagtgaagtaaccaaggaatgaaaaaccaaaacccgttatgttttcacttataagtgggagctaagctatgagtacacagaggcattcagagtgacataatggacttcagagactcagaagggggagggtgggagggagctagggataaaaatctacatattaggtacaatgtacattactcaggtgacaggtgcactaaaatttcagaattcaccactggataattactccatgtaacaaaaaaccacttgtaccccaaaagctattgaaatatattttttaaaaaggtactcaaaaaaaaaccccaaataaataaataaataaataaaagtactctagttcagtcactcccacatcacatgcctagaaagtgctttgtgcacatccaggaagatatgcctagtgatccccgcaaagcctgtcatctaagggagaggccagctagatgcttcactcattaaacaatcgagaacacac

SEQ ID NO: 705403 - DNA, 966 bp, Homo sapiens
aattcttgtatgtaaaatggggacactacaaataaacataataactggatactgatataaaggaatttgcactctaatattaatcataatagctacatattaaaaacctctattaccatatatactctcacttagtacttgtaaaaatcctgccaaccagttatttatttgaattttacatatgagggaaagaggaacatagagaataagtaattagctttaaatcacatgtctattaagtgatcttggcttagatatggaccccaggttcttaatcactacattatatttactctgagcctaatgaacaaaacaaaacataaagacagggtagaataaattcacagcagttaatgcacttcagagctcagataagggagtatgagtcaggaaatgcttgctatgacatttcagttatgaagtaggatttaaggaaactgaggcttagagaacttagattaattgtcctttgtaggagtgaragaacatatttaactttggtttaatatgaagaagactttctttggggaaacagtagaattttttctctagaaaaaaaaggctggtaaagatagcacttgactttaaatattgccctgagtagtttgaactgatttttgtccaagaggcagtgaagatgcatggaatgtttttaaacatagcacttatgtcacaaaaggtattgattaatttggcatgactgcctttgaggccatgatagttaaaaactgattaaaatatcttggaaaagcgtttctcaaagtgtatttcacaaaacactagtttctagaggttataagaggtttttttttaagttgctatgttgagataagactgggaattttggattaaacaagtcaaagaggtttctttattggaagatatctctgctaatgagtatgttaaatctctaaaatggggcaaggcgtgtggcatttctaaaatatatttaatcataggaagccc

SEQ ID NO: 705404 - DNA, 1731 bp, Homo sapiens
ccacaatacgaaaattttgcaaagcattaaaggagcgtagaatactccttaggtgtttcatccttgggtccaggctcccaaagcttttctgttttgcctagtattctccaccaaacaataattttttaatgcaagtttagaaaacctttaacaggataaagttaatggatgaattagttgcatcccagcagggaatctccatcttggatcctgaggaatctggtgtcttttgttatgtagtgagctaaaaattgcaagcagagttttaaggagtggtttgagtgtcctggagcgtaaagactccaagttcccaattcccacaacaggaccgaaatgcttatgaattcaagagatttatgagcaattcttctgttgtgttaaaacatgtgcaattctgggtaagttgtgagagaggtaatgaatgccatgctctgataataccggtccattctcattacagatgttctgaatgccrtaccctccttccacatgcccctcttgcagtgcctaataatagcagtagcatgggctgttcctgtgtctcttgagaaagtcatccacactggctgcacaaccaaaagaacacagctactccaatggcatacccttcatcctgctggggaattgtgttacctgcttattttacatgaagctttcttttgctcctgacccagtttcattccttttggatttcttgatttttctcactctgcatcattttatttgcacacttgtttcctaccagcatggccctcacccaccttcctttgtacccaaagagatgatgctctgtggttactcttacttagtccctggagtctgaactgtacaatattcagtgcccaacaccatttctgtattaaatttctatttatatgaagcctttactgatagtaataattgatatttattgaacacttcctgtgggccaggcactgtgcttgtgtgcttatcatgctatgtacagatgtgaatctgtgtacataatagcatttataattgttcttatagacagctggtaatacttttaacttctctaaactactaactttagagagaaaagattgaatcttatttatctttatgtccttccccataaactcagagcctggcaccaaataaattgctcagtaaatggtaatgataatattggtttggtagagacatcattaggaagtaaattttaatttacagaagtttattcaactttccatcactattatggcttgcaattttggcactcctaaggggaatatttatagactacttgggccatttacaattagtctctctttctgtacaatactagctaatcaattgcatattaaaataaagggtctgtatgaatagtctggattaaaatatttgtgttgcaaaaatcagtacaatataaacacacaagcaatgtttttagcaaacagcctgaagtaattctttccttcatgagacagtgctataaatgaaagttaagggtctggaccagtgctcaggtttcaggaaaccccttccctccaccttttcgacttgacttgtttaaatgtttcctagggatttaacatgtacatagataaattgtctgaaatgattcattcagggtttttgtttgtttgttttttgaagatgctactaataaagcaaggtaatgtgttaacttagtacagagaaaattctatttttaatcctaacccccagtatgacaatatattttgatcacaagacataacacgaaaa

SEQ ID NO: 705405 - DNA, 1731 bp, Homo sapiens
ccacaatacgaaaattttgcaaagcattaaaggagcgtagaatactccttaggtgtttcatccttgggtccaggctcccaaagcttttctgttttgcctagtattctccaccaaacaataattttttaatgcaagtttagaaaacctttaacaggataaagttaatggatgaattagttgcatcccagcagggaatctccatcttggatcctgaggaatctggtgtcttttgttatgtagtgagctaaaaattgcaagcagagttttaaggagtggtttgagtgtcctggagcgtaaagactccaagttcccaattcccacaacaggaccgaaatgcttatgaattcaagagatttatgagcaattcttctgttgtgttaaaacatgtgcaattctgggtaagttgtgagagaggtaatgaatgccatgctctgataataccggtccattctcattacagatgttctgaatgccataccctccttccacatgcccctcttgcagtgcctaataatagcagtagcatgggctgttcctgtgtctcttgagaaagtcatccacactggctgcacaaccaaaagaacayagctactccaatggcatacccttcatcctgctggggaattgtgttacctgcttattttacatgaagctttcttttgctcctgacccagtttcattccttttggatttcttgatttttctcactctgcatcattttatttgcacacttgtttcctaccagcatggccctcacccaccttcctttgtacccaaagagatgatgctctgtggttactcttacttagtccctggagtctgaactgtacaatattcagtgcccaacaccatttctgtattaaatttctatttatatgaagcctttactgatagtaataattgatatttattgaacacttcctgtgggccaggcactgtgcttgtgtgcttatcatgctatgtacagatgtgaatctgtgtacataatagcatttataattgttcttatagacagctggtaatacttttaacttctctaaactactaactttagagagaaaagattgaatcttatttatctttatgtccttccccataaactcagagcctggcaccaaataaattgctcagtaaatggtaatgataatattggtttggtagagacatcattaggaagtaaattttaatttacagaagtttattcaactttccatcactattatggcttgcaattttggcactcctaaggggaatatttatagactacttgggccatttacaattagtctctctttctgtacaatactagctaatcaattgcatattaaaataaagggtctgtatgaatagtctggattaaaatatttgtgttgcaaaaatcagtacaatataaacacacaagcaatgtttttagcaaacagcctgaagtaattctttccttcatgagacagtgctataaatgaaagttaagggtctggaccagtgctcaggtttcaggaaaccccttccctccaccttttcgacttgacttgtttaaatgtttcctagggatttaacatgtacatagataaattgtctgaaatgattcattcagggtttttgtttgtttgttttttgaagatgctactaataaagcaaggtaatgtgttaacttagtacagagaaaattctatttttaatcctaacccccagtatgacaatatattttgatcacaagacataacacgaaaa

SEQ ID NO: 705406 - DNA, 590 bp, Homo sapiens
agccaaactcatagaaatagagagcagactgactcatatgacaaattctacagagaattgattctaagactgatacttgatttaaagttgaaagaggctgggcatggtgtctcacacctataatcccagcaatttgggaggccaaggtaggtggatcgcttgagttgaggagtttgagaccagcctgggcaaccccatctctaccacaagaaatacaaaaaattatctgggcatggtggtgcacacctgtggccccagctacttgggaggctgagatgggaggatcacttgagcatgggaggcagaggctgaagtaagccaagatcagggcactgccctccagcctgggcaacagagtgagaccctgtctcaaaaaaaaaagggggcgggraggggctggtgcaggcatggtggcttacacctataatcccaacactttgggaggccaaggccggtggatcacctgaggtcaggagttcaagactggcctggccaacatggcaaaaccctgtctctactaaaaacacaaaattagccaggcacggtggcgcacctatagtcccagctacttgggagactgaggcaggaaa

SEQ ID NO: 705407 - DNA, 1966 bp, Homo sapiens
tagccaggcctggtggcgtgcacctaaagtctcacctacttgtgaggctgaggcacaagaatcgctggaatccaggaggcaaaggttgcagtgacccgagatcccgccactgcactccagcttgggcaacagagcgagactccatctccaaacaacaacaaagattcacagaattataaccagaaggagtgaattctactatatgtaaactgagattttaatgattaatgtttttaagtgttgagaaaattggctagctcactccagcaaaataagccccagatggataaaggtttaaatatataaaatttcattataaaagcacttttatattattagagtggggacttttttaaaaaaataagtatgacctataacctggaaactataaagaaacaggctaataaatctgattacataaaaaaaaacaacttttctttgaaaaaaaggtaaaaagctgacagacaacctggggaaaacacctgtaatacatttgcaaaagcacctgttccattgagcctagaccccgctttccaccattgtatcacattgatggagagttttccaaacacaggagagaggttcaaatgtcaaatgtccaattttcatttctgaaaagaaaactgaagaatcatgcccacagaatatcatttatggaaaaatgataaataatgctacacttgtataggctaatctatatatgtgtgcaaatacatttaaaaaactttaagaagcgtatttaccaaactatgaccatggagaggaaatcagggaaggggatggcggttacaaagaattttggtttgcctattagtttgaatttctcaacaagaatatattcatgtaacacttgttaaatttaaaattaatttgagagcatgcaaatcatccataaaaatcatctcctcaaaatttctaaatgtttaaaacctaagcaaaataactattttaaagcgagtgatttggtttagacaaatatagttaggaaacagcttacttatagtttctgtactacttaatagtacaaaggaaatccctgaataattgagatagtccatgtattaatgcccatttttgcaactcatagtctgtattgtcttcaattgctgtatctttgcttctaacaacatattgttgggcactctgaattctattaaagtatagatggtggcttattcacatttttatttcaagtttcatctggcatatagtaagcacacagtgaaaactaaatcgaattaagcaactctgttttgtgagatccttcaaaacacataaattttatttgttgggccgggtgcagtggctcatgcctgtaatcccagcactttgggaggccgaggtggtggatcacctgaggtcgggagttcgagaccagcccgatcaacatgaagaaaccccgtctctactacaaatacaaaattagccaggcatggcggcgcatgcctgtaatcccagctacttgggaggctgaggcaggagaatcgcttgaccccgggaggcggaggctgcagtgggccgagattgcrccattgcactccagcctgggccacaagagtgaaacaccgtctcaaaaaaaaaaaatgttcatgcgtttgtttccaaagcatacagtataatgcttagatcacttattgagcccttgccgaatgccaaggacttttctaagtcctgtactttacatgttttaatgcatctaatcctcacaacaattctgtgaggaattgttatacaatcctcattttatactaggaaaccaaggcacagaaaggtccagtaatttgcctaaagacattaagagctggaatttaatctgaggcaatatggccagagttcagttttaaccattacaatataatgcttcccaatcactgaatgaaagaatatgtgtacagcccttggtctacaatgcgtctctgaattataacatcattcccagggaaacaatcaaagaagccctattcta

SEQ ID NO: 705408 - DNA, 804 bp, Homo sapiens
tttaaaaataatgataacagtcttggtggggtgtagagaaactaatattttcatatattgctgatagtggtataaattgttaccacctttttagaaagatatctgaaaatatatgtgaacactaaaaatatctacttttggctgggcatggtggctcacgcctgtaactccagcactttgggaggccaaggcaagcagatcacttgaggtcaggagttcgagaccagcctggccaacatggtgaaaccccatctctactaaaaatacaaaaattagccgggtgtggtggctataatcccagcacctgtaaccccagctactcgggaggctgaggcatggcacgagaatcgcttcaacctgggaggtaaagattgcagtgagccgagattacgccactgcactccagcctgggcgacagagcaagactctgtccccctaaaaaggaaaaatatctacttttgaatcagaagtctcacatttaggaatttttccagaaataaatgatttctgaataaatgawtcgttgtcaggaattgaaatacaacattggtggaggagaacggtttgattctttgacagatcttgtggagcattacaagaagaatctaatggtggaaacattgggtacagtactacaactcaagcagccccttaacataacttgtataaatgctgctgaaatagaaagcagagttcgagaactaagcaaattagctgagaccacagataaagtcaaacaaggcttttggaaagaatttgagacactgcaacaacaggagtgcaaacttctctacagctgaaaag

SEQ ID NO: 705409 - DNA, 3407 bp, Homo sapiens
ggggcaggagaaatggagtgtcccaggccaacagatgcaaggcaattgattcagtcgcttactccagcccctgtctagaatgacctgctaccaaagagcccttctggaataagtggagagcagaatgcagtgccgtggatcaacagagggaccagagactgggtgatagacttgaagcctggtcattcccatagtctaagatctcaggatctctcccagtttatcccagtctcaccctccacccaccaccattagaatgatgtgggaggaagggaagatgagaggaggaggactgaagagatgagtcagtgaaaagtaggtcagactcctactctcctagcagaatcccaagtgtggaaggagctgcctgatgcaagctgaggaatcccctgtattcccttagcacattgttgctcagcctttgtttaaacccatccaagacagggaatgtgctacctttcaaggctgccagagccatttcctccttgagctacccactgcctcactctacacgtagggaagtgtcccatccccctaattttaaactactccaaaatccatacaataggtctgtgttccaaaacaccaaaatgtatgagaaatagtgtctccaaataaggtttgaaaacactgcaagactatatgcaatttatttcctacagtttgatgactttgctgaaactgaaccatcaaccattttaagatctctgataagattgcaaaggactgtgcacttaagaaacaacttagaaattcacaaaatgtttgggattcaaagggagaggcttagcaatcctctaattgggcatttatttacaaaattataaacctaggcaagcttttatayaaaatattaactgggattatatcaaaagaagcttccatgctcaaccaagtttgggacatgttaggtcaaatgtctagattgcaggacttctcagagcctttgagatgatgattccctctgtaatactctaagcaggactagtgcagaatgtctccctagctcccttaattatggaattattattttgtaggttattacctggactgattgtctatgttatactctttgagaaaagctgatctaagctgatctaccatcactgcaaccttaaaatcattaaaactttctgagacttggttgctttctgtgctatttctgtcctaccaatgaagaccaaggtggtgtaactgtggaaaccctgagcaggcacacaggaggcacagggcactcacgtcgcctttctttcccagtcagtgacagccacgtgcttaaaagaaacccatctgtttaccagcccaggttatgagccaaatgctggtcccagtgacaatctcatatctattttctcagccttcaacaaataagaaagaaaaatggccttttaacctcagctgacatagcaatgggacctggaaaagcaatggatgagaatctgtctgttcaatgcaatattttcctacagagataacaaccaattgcatttcctttcttaagagccagtgatgaatgtgactgatgggcaagaaataccactcctgggtaatacattttagggtaaagctatgataccaaactcaccccatcatttctgagaacggtctggcttaagtggatcatcacagaaagtatcagcattctgggaactcaggcatggttttcccaggtaagctctgctctccacagatatttattctgctcagataccagtccgcttacaaagagttaccactgtctactgtatgcctgtccctggtgtgtgtgtgtctgtgtgtgtgtgtgaggagggtgggaggtggagacagacagagacagagagtgagaactggtgctgaagttccacgggcaaaagggctcttacgcagagaaaacaaagagaaggaatagctgcaggtcaactccaaaatcactgggggcttagaaatccgcagactcagcagtacctggaacactgccttttcaacagactcaatccttccttcccttgggcgtgaaacacaaagggtatttctggtattgtataaaggcctatgaagtcagggcacttaatgacaagggatttctcagtttttcgtgggaaatagaatccacattcaagaagttaactgggaagaatgttcatttctgattctgtgctcagctcttgatgtttttgacccaggtgtgtaaggaccagatggcttctgtttactgtagctcacctcaggcaaaacccacaattctgttatgtctgcaccctcaaataaccattataaacaacatagccagagactctgggaccagaccttgcattcagtgattcccctacattaactcacctctatgcagagaagtaggtgctccctgttgaagatgataaaaccaagatacaaagagagtaaataacttggccaaggtccaaaagtaggaagggacaggactggaattcactgtggcattctgactccagaactgctgttctcagtcactatactacactaccaaggttatcatcccagtgcaaaagtgaataatgcaagttaaattagaatttgtgaggaaatgagcactatggactgaatgtttgtgttttccaaacaattcacatggtaaagccctaacccctgatgtgatggtttttggaggtggagttttggggaggccattagatcatgaaggtggaaactctcaagggagatgagtgaccttacaagaagagacatgaaagagatgatctttctctctgccacgtgaggacacagcaaaaagacggccatctgcaaactgaagcaggcccttactaaatggcaaatcagctcgtaccttgatcgtggagaccccagcctcagaactgtgagaaataagtgtttgctgtttaagccatcctgtctatggtatttgttatagcatcctgaactaaaatgagaaaatatttatctcacttactccacagcaaaacatactgatgatccaatgagacaactccttaccagttcctttccagaggcaaaccccttctctccctcttcccattcaacccttcaaatgtccagacaaagccctctcaccttccattcccatgcttttacgtgagagaaccagccctgcaggtagacagacccatcaccaaccttggagaacaacccggatatcattcatgatatccaagtcaagtctattgggagggttcattcaaacaggtcaccaaattgttgattctcaacaacatagagttcttcatacaaaaaggagtctgctgctatgaaatataaagtttcctcatattgttacacagggattatttgatttaatccttataacaatctataaaaaattcataaatgtttatctctgctctgcagataagaaaactgagctagagaaggttgacaaggcatcccaataccaatggagagtggggctg

SEQ ID NO: 705410 - DNA, 3407 bp, Homo sapiens
ggggcaggagaaatggagtgtcccaggccaacagatgcaaggcaattgattcagtcgcttactccagcccctgtctagaatgacctgctaccaaagagcccttctggaataagtggagagcagaatgcagtgccgtggatcaacagagggaccagagactgggtgatagacttgaagcctggtcattcccatagtctaagatctcaggatctctcccagtttatcccagtctcaccctccacccaccaccattagaatgatgtgggaggaagggaagatgagaggaggaggactgaagagatgagtcagtgaaaagtaggtcagactcctactctcctagcagaatcccaagtgtggaaggagctgcctgatgcaagctgaggaatcccctgtattcccttagcacattgttgctcagcctttgtttaaacccatccaagacagggaatgtgctacctttcaaggctgccagagccatttcctccttgagctacccactgcctcactctacacgtagggaagtgtcccatccccctaattttaaactactccaaaatccatacaataggtctgtgttccaaaacaccaaaatgtatgagaaatagtgtctccaaataaggtttgaaaacactgcaagactatatgcaatttatttcctacagtttgatgactttgctgaaactgaaccatcaaccattttaagatctctgataagattgcaaaggactgtgcacttaagaaacaacttagaaattcacaaaatgtttgggattcaaagggagaggcttagcaatcctctaattgggcatttatttacaaaattataaacctaggcaagcttttatataaaatattaactgggattatatcaaaagaagcttccatgctcaaccaagtttgggacatgttaggtcaaatgtctagattgcaggacttctcagagcctttgagatgatgattccctctgtaatactctaagcaggactagtgcagaatgtctccctagctcccttaattatggaattattattttgtaggttatyacctggactgattgtctatgttatactctttgagaaaagctgatctaagctgatctaccatcactgcaaccttaaaatcattaaaactttctgagacttggttgctttctgtgctatttctgtcctaccaatgaagaccaaggtggtgtaactgtggaaaccctgagcaggcacacaggaggcacagggcactcacgtcgcctttctttcccagtcagtgacagccacgtgcttaaaagaaacccatctgtttaccagcccaggttatgagccaaatgctggtcccagtgacaatctcatatctattttctcagccttcaacaaataagaaagaaaaatggccttttaacctcagctgacatagcaatgggacctggaaaagcaatggatgagaatctgtctgttcaatgcaatattttcctacagagataacaaccaattgcatttcctttcttaagagccagtgatgaatgtgactgatgggcaagaaataccactcctgggtaatacattttagggtaaagctatgataccaaactcaccccatcatttctgagaacggtctggcttaagtggatcatcacagaaagtatcagcattctgggaactcaggcatggttttcccaggtaagctctgctctccacagatatttattctgctcagataccagtccgcttacaaagagttaccactgtctactgtatgcctgtccctggtgtgtgtgtgtctgtgtgtgtgtgtgaggagggtgggaggtggagacagacagagacagagagtgagaactggtgctgaagttccacgggcaaaagggctcttacgcagagaaaacaaagagaaggaatagctgcaggtcaactccaaaatcactgggggcttagaaatccgcagactcagcagtacctggaacactgccttttcaacagactcaatccttccttcccttgggcgtgaaacacaaagggtatttctggtattgtataaaggcctatgaagtcagggcacttaatgacaagggatttctcagtttttcgtgggaaatagaatccacattcaagaagttaactgggaagaatgttcatttctgattctgtgctcagctcttgatgtttttgacccaggtgtgtaaggaccagatggcttctgtttactgtagctcacctcaggcaaaacccacaattctgttatgtctgcaccctcaaataaccattataaacaacatagccagagactctgggaccagaccttgcattcagtgattcccctacattaactcacctctatgcagagaagtaggtgctccctgttgaagatgataaaaccaagatacaaagagagtaaataacttggccaaggtccaaaagtaggaagggacaggactggaattcactgtggcattctgactccagaactgctgttctcagtcactatactacactaccaaggttatcatcccagtgcaaaagtgaataatgcaagttaaattagaatttgtgaggaaatgagcactatggactgaatgtttgtgttttccaaacaattcacatggtaaagccctaacccctgatgtgatggtttttggaggtggagttttggggaggccattagatcatgaaggtggaaactctcaagggagatgagtgaccttacaagaagagacatgaaagagatgatctttctctctgccacgtgaggacacagcaaaaagacggccatctgcaaactgaagcaggcccttactaaatggcaaatcagctcgtaccttgatcgtggagaccccagcctcagaactgtgagaaataagtgtttgctgtttaagccatcctgtctatggtatttgttatagcatcctgaactaaaatgagaaaatatttatctcacttactccacagcaaaacatactgatgatccaatgagacaactccttaccagttcctttccagaggcaaaccccttctctccctcttcccattcaacccttcaaatgtccagacaaagccctctcaccttccattcccatgcttttacgtgagagaaccagccctgcaggtagacagacccatcaccaaccttggagaacaacccggatatcattcatgatatccaagtcaagtctattgggagggttcattcaaacaggtcaccaaattgttgattctcaacaacatagagttcttcatacaaaaaggagtctgctgctatgaaatataaagtttcctcatattgttacacagggattatttgatttaatccttataacaatctataaaaaattcataaatgtttatctctgctctgcagataagaaaactgagctagagaaggttgacaaggcatcccaataccaatggagagtggggctg

SEQ ID NO: 705411 - DNA, 1368 bp, Homo sapiens
gcttagacagttgttctgagtctctacctggaatatttctctgcatcacaggtttaaggttcttatccaactaatgtcacaaaaatctctccgtgtaaggcaatactgactatataaatatttaatttcagtatctaggatttttttgtagctaaagtgtctgctttccagttttatgataccttggaagataattagtaattatgtggttgtttggtgatcatgaaatcagagtgaatgcagatagatattattgagggatactccacccatgccatcaatgactaggtgaaagatctactgatagagaacatcactccattcactgcagtgcttttcaaagtatctgtgtattgacagaattttagcttcaaggtcaagtactcaaagaaacatttgcttatactcaaggttacattttctgactgttcattctgtatctctaggacacaacacagagcctagcatatagtaggtactccataactatgaacaaacacccatgctcttcctcttgtcaccctatagttagagtttcagatttaatggagacttgtctctccatctcttcatctattgctctttccttcataatacatttgttttcctagtgggaaccatatcttgatgatcagctttaattttttttaataacaatcaaaatcctgttttgcttccaggtgatctgctactattaccttgcatagacgtagacgtagctgtcctccaagcttcccaagaacacgctaatgaatttycttttaagatttggttattgtcattcaccaagtggccattttttcaaagctgtgccttaaaaagcatcctatccatttggcagccagagtcatagtgttccttagagaactgaagaggaaatggaaaggacattcatgcgccaagaaaaaagtttgacagaatggccatggggagttgagaacacaggggaagaggtcagtgtgaggtctggctggaagcagtacagcagagctatgcattcagaagagaaatggtgttgaaccagatagacatttctggaagcctgggggccgagttctaggtcagagagactttagaagcattgttaatacaatgcttactccctagttgactttcacaaatatttgtcttataaattcatgttttgatatgaattggatagttagacatgaaagaaagtgcatcacaatcaggcagaaacattgagaggcatggggaagcagaggaaaatgacacagcatttgactcagagagaatgcccaaaataccaagagttgaaaagtatgttgtacattatatagaatgaaatatagttcactggtacttgtggttggtaatgtgtggttacttgacatcacaggcaacccg

SEQ ID NO: 705412 - DNA, 3531 bp, Homo sapiens
gttaccctttctcatagcattctattttctttcaaatcagtcattataattatttcagattattcatatacagtatattatttcagtattcagtttgtttaatttctctacctgaactagactgtaagctctgtacacaggaaccatgttggttttccacactactgtattttcaagtcctagtgcagtgatacttagcattcaataaagactttgagtaagtgagtgaatgaatgaatgaatggtgactgcttttagtatttttagaagtgcaggatgctatcaattaagcagcctttgtctagtgtgaggatgaggaaatgtttcttagaggacttgaaaatgagtaagaagggggtatggtattcagtatccaattttccttagagggcaagtaggatgaatatagaaaattttcctttgaatttagaaatgtgggagtcattcatgaccgtaacggggtcaattttaatagagtgaaggaatgcaattcagattccatttgcttgtgaaatgaattagcgagaaaacagagcaaggagcttttcccagaaaagtagatctcagacacttattgctggcttatttgtttgttcataggggagtatgataaaatgaactattaactatgctttaaatattttcactgtaacacaaaaaacaaaagtgcacaaaaacagtactgtagtagaggctaccagaaggacctggttagttgtcatctgtgagtttagctgccatatttatctttcacattgaaatattaaatgtgtaagaaagggtgaaaatgtactttagattggtttacagcttccacctaaatcatcagtcctcttattttgcaagaaattagagtactgaggaaatcatggtagattattcacagtgcaccagaaaccctggctgcctcttttccatgtcctttttgtaaagcatcttaatttctgtgaattttgtctcttatttatttttttttaactttcaggtgttggtaaatcatgcttattgctacagtttacagacaagaggtttcagccagtgcatgaccttactattggtaagttttataaaagggatgagaagcactaaaagttttggatagtttaaatggaaaatgctagaaggtccattctactagtgatgatgctaaaatcagtgaaactggatttgttgttacgctgtttaatctctgtcacttttttwaaaatatgtgtagtaaaaataaatattacctaactttgtagaagtggttaaagaagctactgctgaaagacagtagtttttaagatttcaattgtaattagcgatgaaacaatttaagagacagtatccaagcatggtaagagcagaaactttgactcagcttgctggaagttaaatcaagtctctgctactaacttgctgtgcaagccatttccccgtttcatgtctcagtttctctttctgttcaatgagagtagtagtaccaatcacatgaagttactgtgagcagtgagttagtaaatgtaaaccattcaagtgcctggcaatgtggaaagtgctctagactttctcataattattaactgagaaaaaataccactgggcattttgtattttcctcagttgtaaagagtaaatgaaatagttactggtaagaaatagtcaacaaatattagctgttattatttaaaatagtgattttccattgtattaatatgcaaaggaaaaaattaagatgagtgaaaagctaaaaactttaggtaatcttactgtttcgggtttttatttgtttaaaaattatattctgaaagctgaagaatctagctggattattcttctgtggctgtagcccattaacaactagaaattagtcaaatatgaagacgagataattggaaatctagtcattctttacaacgaattgcttaatgaatctttttagccactgactgctcattttctgctgacattattaatttactatttatagcatgttgatccttatgttctgtgtgtttttaaaataccaaatcagagatagagctcatgaatcacattattaattaatagttttcaaccaagctacaggtatagtactttgtggatatattgaaatcttttgttagcaactactgtcattaagactatccgtattctattttacttttgatagttttaagtgtatacaataatgatgggtaaaacaggtaactcatgctggtcctgataactttgttttaacattttgttttgttttttgagaaagagtctcgttttgtagactagagtgaggtgcggtggtgcaatcacagctcactgcagcccccaaatccctggctcattatcttcccatctcagcttcccaggtagctaggactacaggcgtgcactaccatgcctggctaattttttgtgtttttggtaaagacagtgttttgccttgttgcccaagctggtttcgcactcctgggctcaggcgatctgccggccttggcctcccaaagtgctgggattacaggtgtgagccaccgcactggcctgtttaatgagctctcttcgctgccctctctataggatttgctctttgcttaataggtttgaaactagccaactttaggcatgactcatttctaagacaactggcaaaacagttgtatttagtataggatactaaacaacagtgttcttccttttcttagaatcttatgtataaatttctaagttggtatggcacaccgagtggagaggatggacctgagcctgctgtcagaagttgacttaagcccagcgtgtccaacccacaacctgcatgcagcccaggacagttttgaatgaggcccaacacaaattcatatattttcttgaaacactatgagattttttttgttttttgttttttgttttttttttttagctcatcacctgtcagtgttagtgtattttatgtgtggcccaagacagttattcttccagtgttgcccagagaagccaaaagatcagacacctctgccataggctatacttgcggggaaagagaaaggagtagacccaagaattgtttggaaaactgtaactcatataaactgccagctggcgtcacactatgtttgctaatggcaggcactgggaaataagagtctgaaagaaaagaaaaaccaaggatctttttctccttgggttgactgtgtgttctccattcctctggctccagcccctgcctggcaggcccaaatggtctggttcttgagctctgataatctttttccgtgtcatctttccagcctaggggtggtagcagcttcctgctgtttgtaatctctgggtttataccccatctcttctttgggtttttgggggcttgctctttactgtaaccaagtccctacattaaattccctatgccctatgtacttaagtgtagtttctgtttttctggttgcactgactggcataccgttttttttctttctaacttttacagttggttgtaaatgacaaaaatttacctagatggttttaaacaaaaggacaatttattattttaatatt

SEQ ID NO: 705413 - DNA, 3531 bp, Homo sapiens
gttaccctttctcatagcattctattttctttcaaatcagtcattataattatttcagattattcatatacagtatattatttcagtattcagtttgtttaatttctctacctgaactagactgtaagctctgtacacaggaaccatgttggttttccacactactgtattttcaagtcctagtgcagtgatacttagcattcaataaagactttgagtaagtgagtgaatgaatgaatgaatggtgactgcttttagtatttttagaagtgcaggatgctatcaattaagcagcctttgtctagtgtgaggatgaggaaatgtttcttagaggacttgaaaatgagtaagaagggggtatggtattcagtatccaattttccttagagggcaagtaggatgaatatagaaaattttcctttgaatttagaaatgtgggagtcattcatgaccgtaacggggtcaattttaatagagtgaaggaatgcaattcagattccatttgcttgtgaaatgaattagcgagaaaacagagcaaggagcttttcccagaaaagtagatctcagacacttattgctggcttatttgtttgttcataggggagtatgataaaatgaactattaactatgctttaaatattttcactgtaacacaaaaaacaaaagtgcacaaaaacagtactgtagtagaggctaccagaaggacctggttagttgtcatctgtgagtttagctgccatatttatctttcacattgaaatattaaatgtgtaagaaagggtgaaaatgtactttagattggtttacagcttccacctaaatcatcagtcctcttattttgcaagaaattagagtactgaggaaatcatggtagattattcacagtgcaccagaaaccctggctgcctcttttccatgtcctttttgtaaagcatcttaatttctgtgaattttgtctcttatttatttttttttaactttcaggtgttggtaaatcatgcttattgctacagtttacagacaagaggtttcagccagtgcatgaccttactattggtaagttttataaaagggatgagaagcactaaaagttttggatagtttaaatggaaaatgctagaaggtccattctactagtgatgatgctaaaatcagtgaaactggatttgttgttacgctgtttaatctctgtcacttttttaaaaatatgtgtagtaaaaataaatattacctaactttgtagaagtggttaaagaagctactgctgaaagacagtagtttttaagatttcaattgtaattagcgatgaaacaatttaagagacagtatccaagcatggtaagagcagaaactttgactcagcttgctggaagttaaatcaagtctctgctactaacttgctgtgcaagccayttccccgtttcatgtctcagtttctctttctgttcaatgagagtagtagtaccaatcacatgaagttactgtgagcagtgagttagtaaatgtaaaccattcaagtgcctggcaatgtggaaagtgctctagactttctcataattattaactgagaaaaaataccactgggcattttgtattttcctcagttgtaaagagtaaatgaaatagttactggtaagaaatagtcaacaaatattagctgttattatttaaaatagtgattttccattgtattaatatgcaaaggaaaaaattaagatgagtgaaaagctaaaaactttaggtaatcttactgtttcgggtttttatttgtttaaaaattatattctgaaagctgaagaatctagctggattattcttctgtggctgtagcccattaacaactagaaattagtcaaatatgaagacgagataattggaaatctagtcattctttacaacgaattgcttaatgaatctttttagccactgactgctcattttctgctgacattattaatttactatttatagcatgttgatccttatgttctgtgtgtttttaaaataccaaatcagagatagagctcatgaatcacattattaattaatagttttcaaccaagctacaggtatagtactttgtggatatattgaaatcttttgttagcaactactgtcattaagactatccgtattctattttacttttgatagttttaagtgtatacaataatgatgggtaaaacaggtaactcatgctggtcctgataactttgttttaacattttgttttgttttttgagaaagagtctcgttttgtagactagagtgaggtgcggtggtgcaatcacagctcactgcagcccccaaatccctggctcattatcttcccatctcagcttcccaggtagctaggactacaggcgtgcactaccatgcctggctaattttttgtgtttttggtaaagacagtgttttgccttgttgcccaagctggtttcgcactcctgggctcaggcgatctgccggccttggcctcccaaagtgctgggattacaggtgtgagccaccgcactggcctgtttaatgagctctcttcgctgccctctctataggatttgctctttgcttaataggtttgaaactagccaactttaggcatgactcatttctaagacaactggcaaaacagttgtatttagtataggatactaaacaacagtgttcttccttttcttagaatcttatgtataaatttctaagttggtatggcacaccgagtggagaggatggacctgagcctgctgtcagaagttgacttaagcccagcgtgtccaacccacaacctgcatgcagcccaggacagttttgaatgaggcccaacacaaattcatatattttcttgaaacactatgagattttttttgttttttgttttttgttttttttttttagctcatcacctgtcagtgttagtgtattttatgtgtggcccaagacagttattcttccagtgttgcccagagaagccaaaagatcagacacctctgccataggctatacttgcggggaaagagaaaggagtagacccaagaattgtttggaaaactgtaactcatataaactgccagctggcgtcacactatgtttgctaatggcaggcactgggaaataagagtctgaaagaaaagaaaaaccaaggatctttttctccttgggttgactgtgtgttctccattcctctggctccagcccctgcctggcaggcccaaatggtctggttcttgagctctgataatctttttccgtgtcatctttccagcctaggggtggtagcagcttcctgctgtttgtaatctctgggtttataccccatctcttctttgggtttttgggggcttgctctttactgtaaccaagtccctacattaaattccctatgccctatgtacttaagtgtagtttctgtttttctggttgcactgactggcataccgttttttttctttctaacttttacagttggttgtaaatgacaaaaatttacctagatggttttaaacaaaaggacaatttattattttaatatt

SEQ ID NO: 705414 - DNA, 3282 bp, Homo sapiens
aggtgacacagctctgtcattttgccaacatggtcttaagctgttgctagcacaaagatgaaatcacttggaatgaaaaatatcatattgcatggatgaaaatcaccataagctagagtggggagtgattttccggttgttccctagagcagctttgacttccatatctctctagactgatggagagctgagtcagccttgcaggagctgcagtgggggtttctccatctcagttagaaaatgtgagaaatgagragaagtccttaggggccggggtgtcaggctgcagtctcaccattactttccttccacatccttctggtcaaacggaatttggttgtgtcctcctgggagtgaacctgaccaaggtcactggaaatgtggtacaggagccctgaatttaacactcagccacgtcagatagaacctgaatgttgtgtctgggtggctctccaagaggcacaggctgtgggcctttctggattgggggacccaatataaagacggaaggatgtgtctgggttccttaggaacaaggccatacaaataacaagcttcaggaagggggcaagtcctagcaagaggcccccagcacggttgagtggtgtggcccctcagtcctggcttagaagaggccgatgcctggagcttacatgagcaagagaaggagttggggccacctgtgttgtcgttgagcagcctggcagcatgctctgtgtttccctctccattgctgtgtcacagactacccccacccatacacacacattgagccgaggttcaaaaggagggagacgtgatgcccaaaagccacaagtacagcctgagaggagtgacaaggaccagctcgcgagcgcctgtgtatttggccgtttggagcctctgtggtcattggctggaggctgtgtcttgactcggtgggcaggagcggctggctgttgccagtggtgccacctgtgggagtggcataaggcctgatgctgagtgcctccccatgatcaccgctcctgctgggcttggggactgcctgtggtcagaattggatggggcagcacccagcggaggccactctcctgcgcgggtggcggcacatgacctggacaccctctgagcaccaggcctgtgtccatgcaccgtggccttggtccaggtggctgtcatctccctagctcatcctgactcctggcctcacccctccgtggcccctctggcatggctctcccagcctcggatggcaggtgctctccccagaattggcctctctctgctccaggggacagggatcctgccacagtgctagcccctcccctccatgtctggcagcagggaactgtcgacaagggggctacgatgccacccccagctgccagcaggaaggaccccaggcacagcctgcaggtctgaagtgggtgacagtggccagaggttctcacaggtcgcaggacttcagtggagtgaaggttggaaattggttacaaaggccatgccttctgcgtcacagccatttcacatttcaatttgtgattctagtggctttttttggcccctctaaagtagcaagtgggggttatgtgagagaaacaaagcttaatctaaaaatgtctgatcttaaaatatcagcgacagacaaagctatcaatttctgttaaaaacaattcttggttgtaaggggaaaccagagtgtacacaatgcatttcatcaacatgcagatactcaggcagtaattcaagagggctctgaagtcatctgttcctttattgaaaactccaggtggccgggatgaaggggtcagtgaacagtctacatggtagtgtccatttgaattttcttagaaaccccattattttacttattttttttcattccctttcttgttttacaaaggattttaggcagcataaagataattaattccttcattagtcatatttagtttctgcccactatgataaagttagttttaattaaatcaattttctcctgcgctgcagggagcctgcttattttgatcagaattgaatctcattctgggaaaccttgtgccccagtctctgagattctccattttattcatcttcagaaggtccacgctgagtttgatggtgactaatgttgttttcattttgaaattttattgctcattaaaaaaaacacacacatttgttgactttaaaagtgaatagtttttgtttttccttttaaaatcctttgcctttttaaaatttttttaagacagagtctcactctgtcacccaggctggagtgcagtggcgcgatctcagctcactgcaacctttgcctcctgggtttcaagcgattctcgtgcctcagcctccccagtagctgggattacaggcatgcaccaccacacctggctagtttttgtatttttagtagagacagggttttgccatgttggccaggctggtcttgaactcctggcctcaagtgatccacctgcctcagcctcccaaagtgtttggattacaggtgtgagccactgcaaccggcccccaatttttttttattaaaaatttttctagagatgagatctcacaatgttacccaggctgttctcaagctcctggcctcaagggatcctcccacctcagcctcccaaagtgttgggattacaggtgtgagtgagccaccgcacacggcccagaatttttttcagaattgtgtgtttatgaactttctccataaggacaaatattgagtcttgatctctgtgtcatttttcagctacttcctgagaagttcccccatgacaagcagaactgtgaaacccattttccaatagcagagatgaacccctgcatgtgaggctccggccctgcggcttggtggtgcccttgcttctgggaggtcagcctgcctctgctgagggctattagtatatattctggtcaagcgtccttaaaacggggacttcttgagggcctgagcctgccctgttctcacatgagcgagtctctggggtctgcttgaaggggactgtgtacttccatctctggccagtggatcatttgggtcctgcttcagggtcaccccaagtatgcaaggccaggcaggggccaagaaacccaggcaacagacgttcaatcttccaggacaaccgaaactatatagtttcaccctgcatgtatacagctaactaaccggtcctaactcagtcatctccggtcctatccattaaacttcttgagttttccaagctgtctcccttctcgggttcattttccctgatgctgtcgtagggtaggcacgcctgttctggt

SEQ ID NO: 705415 - DNA, 700 bp, Homo sapiens
aaaatacaaaaaattagccaggcgtggtgacaggcacctgtaatcccagctatttgggaggctgaggcagagaattgcttgaaaccgggaggcagaggttgcagtgagccgagatggtgcctctgtactccagcctgggtcacagagcgagactctgtctgaaagaaaaaaaaaaaaaaaaaagttctcactttgggctgcagattgccggctttttgctggaagatggggtttcactggggacccacccccatctgcctagaatttctctgcctcctgcctctatcaactccttctgaacatgttctgtactygttccacctatagagactatgttaaagcaaattaggtaacttcctttttaataaattctgaaatgctgctgattaaaagccaaatctattatgtaaaattatttttttaaatcctaaatgaatggcaacaggctttaaggccagactttctagagttctaagaggcttcattcctaaatgaatttttattctaaatcccacaataagctttatctttgagatattactgtgactctgcataaaatactgctttcaggaaaggaccctggcacagttttaactttggaaataatatgtgttctcttctgaagtcagccacagtaggatttgtggtgactcactggaggagcatattaaggtagatccattagcatcaccattaaaca

SEQ ID NO: 705416 - DNA, 874 bp, Homo sapiens
tagcaataataaaggccacggtaatgcaagagccgacttcatgaacacgtcattccagaatggctaaattcaatcaaatatggcagcgcttcctacaacgctacgatcactggggccagtgtgtgacgtgggcccacttactggaagctgttggaaagagaaagtgagcactctgctttaagactaatagacagggtttttaccagcccacaagtggttcagcatccttctttcccaggaattacctagaaattcatttaacatctaaagactacaaatgaaacttcagaaggttaaaagtatataatgagaaggggccaaggggatggtattcactcaacctcaccttaaatatgtatgattcttaggggggaaaaaagtcaacacccataaggtggtaatcaaaaagcaaagccaaagatgagccaggtttaattctaactcagtcaccaacttcttcagtaactttcagagctacttacctttccygttcctgcttcctcatctgtaaactggaactaatactgcttagagactcacaaagtggtataaggaataattagttagcatttatgtaacacttttcatcttcaaagtaggattacagactataaagtagagtagatgtggcttgaaaaatctttttaaaacctaaaataaagcatgaaagcaaattcagagaagtaaactcagctgacatcatcttagagcagccagatagctctgcctccacgggcacccccatcttccctagtcagtatttgcatgtggagacaaaggtataaggatattttattagggaaaatgggaggagatagaaagaagagaaaaaggagaaagagaaggttagagaaaaggaatgggagaaagtata

SEQ ID NO: 705417 - DNA, 2289 bp, Homo sapiens
ggaacatgtttagtttgaggtgtcaatttgctatcttttgaagatgtcaaaaagtgcttacatataaatctggcaattaaagaaatgcaagaggcccaggaatatatgagagaaataggatttatagattatgtttaaagtcacgatgcaggataaagtgactttgacaatgcacaacttagataagagtaaagctgatccctctcttcccatttgtgtgttgcaaaaatgataaggctgtttccatctcatattcaaattagtaattaacctttaaaacactttacctagggtcataatacactgactgaaaagatgccacacacataaagagaacacatttcgtagagataatacaaataggaaagatgttaaggtcagagagaaagtaattttacctgataataacaatctgaatatatattatttaggaagacttgaaaaccttcgacrgaattaatttaacttttgatgaactcattagtgaagcataggacttgataaattgtactgagtagttattactgctgtgttacaaattaccttaaaatttagtagcttaaaacagcaaacatatatgtctcacagtttttgagagttaggagtaacttagctgagtggttctggctcagactcttatgaggctgcggtcaagtcgttggtcagggctgcagacctagctgaaggcacacctgggaaggatttactaatgagctcactcaagtggttcctggcagttgtcagtttcttaatgattattagtcagaaacttcagttcctgggcacaaaagatctcgacagagctgttcataacatagcagcttgttcttccagagtgagtcatcaaatgggggaagagaacttaagctcccctaagacaaaagcgcaattttttaatagcataaccttggtacttatataccattgcttatgctatattttattgattataatgtggaaggatactaacaaggatctgaataccaggggctgggagcattgaggctcctcttggaggcagaccgccacagttggtctttgttgaccttatgaaattgtgggagctagttaagcagtccagtaagcccgttgtcttcacatatgatgttagagtttgaagtatgcaggacacccggtgtggaagaggagatagatgtaacatgggagaggtcaagaacaagctggaacctatagaagcacaagctgggaacccatgaggcaggactaaaatatatgtcagttcttattgcttgtgtcattggtggtgtgggcatcctgagaagccaaatgtctttgtctcagggctaaacacgtgggcccagattctctactgctgaaggaggatctcagggaaggcggagcagtcacagcactagtgcctatcgcacaatcctgagaggagtgagcacataaatgacagtaggtgtatgctatcaaatgactcctgctttatttcaactttctcagcctttcacaagaatctctcttgtggtcaactctaaccaaaaatatatggagaaaggaattctgggaaatgtagttcattctagaaaaggtatcatgttacaaagccactgcagattgtacctgagaagcagagttctcagtgtctgtatgtaacaatggaaatttgaaaagcatccaagagattctagactggataaaaaggataaaaatatactttataatcatgctaattgagagtttttcctagtttctttgtaagaagcaattaacaacaaatattactattaagtattttgtattcctcattatttttacttatataatttataaacatatatcacatataatgtagtgcattatattctataacaatagcatatatataatatacagactattggtaacagatatttatcaacagcttatattcctgaattaaaagtgtttacgtagggaatgtaggtatatctgaaaagcctggataacaattcagagcacggatttcaatatctcccatagaaaaaaatagtaaacaggtaaacaaactgtcctgttcttaccccaagtaacaaggtttatttctagctgaatgggcagcatgtgatgtagactttcaacattattgattatttttatcttctatctttttccaaaagtgaggtgaatatacctactcatgtttattaattttagctttactaagaaaatacaaagcagagattatgatagactttcttatgggtattttccttctgcttcattttgtctcctttaacacttctagtggtatttggagagttgtgattgcgggatttttaaaaa

SEQ ID NO: 705418 - DNA, 2437 bp, Homo sapiens
tataattccagcccttcattccagaaaaaaaaacaacacacaatcaaagacagattaaactgtagccttgaattgcagaaagtgatagtggaaagatcttatatgtaaggtatttgatctatattaaattactcttcaatatatttgtcaacagtttactttccttggtgttcatctgtatatatatttctcaccagaatgaccggcatagggagaatatttaaaaagtgttatctagtccaaaaaacaaaaaatttaacattccgtgttgttgttgaccgactaaatctggttctaatactgagtggaatttccaaacatgaccctggggcaagcagaaagcaaacgtcaacatatttcccaaggtattaaaactatcagaaggaagtactagtatttccttaaacatacacaacacacaatgaatcaagatatgatgtcatgctttatcgaaatatttattttcattacaattcacacagttcttcaaggtcaaagtgacactagtcttactagaaaatatgggatttgagttacataaatcattctctactgtttagaaaacaaatcatgaattttcatgaatttgggacacaactctaggaactggatggtatcaaaattcaaagataagtggcaatatttcttatttcttttttaaagctttcattggaaaaaaaaaaagttaacttttgtggttatgttgaaaaaaaaatgcaaagaccagtacagcctatccttttttcttttagaagttgtggaggcctttttttcagcagtgtgattccctgacatccccctaccctgccattctactaaatttcctctcacatcttctatacagccccctcccacatacacaggacagaagtggaacaagtggagaagaaaatgatgagagtaatgccgagggaagacagcagtgtgtttaacatcacaagatcagagggagcccagaagcagaacctagaaaaatcctttcacagcatgcaatatagaacaaaaatccccagaaaactcaaatactactattatcatgtttcaaaacaagaaagctaagaaaggtgacaaaaggacccaagaaaagatagcacatactttcagccacctgtgtgtcgggtggaaagttttcatcagaaccctttaattctttcttttgatgtataagcccaatcaagacaataatatgtccttgaaccaaaatgaattctctatgatagactatcactctgggtgataaacaaagcttttaaagacataaactagctctgtaggtggccttcactcactccaagaaagcctttgattaaaataaaaatgtatgtaggaacaaacttgaatgaaggcatacaaaaggtttcattccatttgggagaaataaacatgaaaatgagaccttttcaatacccctacaaggaaagacaaattgatcaaatcagacagtaagaaaaaaggagaaaaaacaactgcccttcaactacctcaagatttttaggaaaataaagatcaagggttgaactaccctaaataatttttttctatagcattccttaacatgctcaacaacaaatatgaacatctgttcaattggcttagctcagagtgctgaaaagcaaacaaaagttaaaggaagcttgtgacttctgacctaacggcaatctgaggcagccctctcagatgaagagatgaatactggtgcaaaccaagtgaaagaaatcaaaaagcaagtgagaaatggaagaacaatgggaaacaaagggacgaaattggagctgagctggattttcgtattaacaacagaactcctaatggataaaaatttcttctggttcatagctatagatgactataattaataatggaatccctttctgcctagtaaaaacatgtggaaacataagttattaggtaattcacaaagaaaagcaattataattattgtacatttamtcacctagaagagtatcctgttggattttgaatataatgtaaacaaaactttctaaagacaattctcgtaaagtgagttcatagcacaatcactagaagcacaaccgttttcagaatttcgagcgggtaagagaaattcagaattgagggtcctgttagtaaactcaccatttgatgtctcgaagagcaccagagtacttaaaaatggcagagatcagcggcaaaccattcactttaagttctctaaaagtacatttttaaaaatacctataagctttttggggaagagaggttgaatttggctacatttggttgatatggctaggtattgtttttctaggaaaaccaaaagaaataaaaaatgtacatgaacagacatttttaaactatcacaagttctgctgacagatttgatggttcatagagcaaagatattgcaatctgactttactgtagagaaaatagaaagtagaattttaatttttta

SEQ ID NO: 705419 - DNA, 2026 bp, Homo sapiens
cggcctcttcttgatattcccctaaaattactcaattctccaagccacatagaactgcttaagattgtccaaacaagctgtttttctgagcttgaatatctttgggccagctaattcctttgccagaaaagctttcccacaccctttctagcttagctgaccctaattactcttcatggttcaacctaggtatcagagattcttgaaatctaccctgactctatcctccagtccagtttgggtgaagtgactctatgtttccacagctgtgaattcctctagcacaccgaattttatagtcttttttagttgaccatctattttaccagatgatgcattttttgatgtaaagaatttttcattttatctatgaatatggaacactttgctcaatgcctaacacatggtagcactccataaattataacaaattcaaagcaaaagaggttctgattatgatagacatatcacccttttagttgagctcagttgttgacackgactgcaattgcttaccttcttcactcctatttgcatatttagcctaaagcctggcaatagtacaaaataaatatattattgaagcctcaccacaaccattacatgctcccaccaccctatgtctgggttcctcagctatgaggatgacggtgagaggccatctctgcttaaagtgctcttttctatcaatttccttgattgtgttctgaggggtggagctggagaagatctgcaagatgctgaatgtcagctacttcacttcttgaaagcgggttttatacgacattttaaaattggattcaaacaccattttggtttccagaatatcacgatacctaaaccacatctaaacaaatcaaaaaactatatatgtttggacttaaaatatgattgatttatatgagagatttcatctgtgtcacatcattcataaacatataaataaatattctaaaatgagcaaatacaaaccaactattgatatgcatttgtcattcttaatgatcaattaattatagtgctgcagggtctataacacacatctattcctaagtctcatttattaaattgagacataacacagatgatgataattaaggttcctctttcaaaaataaacagaacaagtctgtctctatcaccccgttgaaaccagtttatacttgttataatgaaggcagcacagtaacaaatgaagaaattaaggaaaaactgtttaggatcccagggctagaaaaatcacatttctatatcttacaataaatcatctatgttcattttgatagctccataatgtacatatttttagtaaagaatttaagatgtccttttaaagattaatttacttcttcaattttttacaggcttcattttcaaagattagaattgaaggacaagaatctatgtcattctactgaacatttgttttccctctctgcctgaactcatttgatcattctacccttatgaaacatggaaatttaaaaactgattaagatggttagacacacatatattcaggaaactctagtatgtgaaaagattagatagtcacacaattcatggatatcaaactcatctcaaaatttcctatctctagaacagtattaacacaggaaaaaaatgcaaacccaatgtatcttataaaagcacttcttgcctccagcaaacatacaaaaaaaatggttttaatccttgaggagagtggggagcagaggtgcaatacaggagatcattttattattcacatacataagtgtgtgtgtgtgtatgtgtgtgtgtatatacacattattttgtgagttccaaatattatataataaacatttaaaatgtttattaaactcaggtaagcagggtccatatgaacagtgaaaaatcatgctgatagtatacattcttgaaattatgtgaaaatagcatttatgtattcctcccaaaaacctgtacctccaggctaatcatgaggaagacatcggaaaagttcctgttggagggacattctacaatatacctgacaagtgct

SEQ ID NO: 705420 - DNA, 2026 bp, Homo sapiens
cggcctcttcttgatattcccctaaaattactcaattctccaagccacatagaactgcttaagattgtccaaacaagctgtttttctgagcttgaatatctttgggccagctaattcctttgccagaaaagctttcccacaccctttctagcttagctgaccctaattactcttcatggttcaacctaggtatcagagattcttgaaatctaccctgactctatcctccagtccagtttgggtgaagtgactctatgtttccacagctgtgaattcctctagcacaccgaattttatagtcttttttagttgaccatctattttaccagatgatgcattttttgatgtaaagaatttttcattttatctatgaatatggaacactttgctcaatgcctaacacatggtagcactccataaattataacaaattcaaagcaaaagaggttctgattatgatagacatatcacccttttagttgagctcagttgttgacacggactgcaattgcttaccttcttcactcctatttgcatatttagcctaaagcctggcaatagtacaaaataaatatattattgaagcctcaccacaaccattacatgctcccaccaccctatgtctgggttcctcagctatgaggatgacggtgagaggccatctctgcttaaagtgctcttttctatcaatttccttgattgtgttctgaggggtggagctggagaagatctgcaagatgctgaatgtcagctacttcacttcttgaaagcgggttttatacgacattttaaaattggattcaaacaccattttggtttccagaatatcacratacctaaaccacatctaaacaaatcaaaaaactatatatgtttggacttaaaatatgattgatttatatgagagatttcatctgtgtcacatcattcataaacatataaataaatattctaaaatgagcaaatacaaaccaactattgatatgcatttgtcattcttaatgatcaattaattatagtgctgcagggtctataacacacatctattcctaagtctcatttattaaattgagacataacacagatgatgataattaaggttcctctttcaaaaataaacagaacaagtctgtctctatcaccccgttgaaaccagtttatacttgttataatgaaggcagcacagtaacaaatgaagaaattaaggaaaaactgtttaggatcccagggctagaaaaatcacatttctatatcttacaataaatcatctatgttcattttgatagctccataatgtacatatttttagtaaagaatttaagatgtccttttaaagattaatttacttcttcaattttttacaggcttcattttcaaagattagaattgaaggacaagaatctatgtcattctactgaacatttgttttccctctctgcctgaactcatttgatcattctacccttatgaaacatggaaatttaaaaactgattaagatggttagacacacatatattcaggaaactctagtatgtgaaaagattagatagtcacacaattcatggatatcaaactcatctcaaaatttcctatctctagaacagtattaacacaggaaaaaaatgcaaacccaatgtatcttataaaagcacttcttgcctccagcaaacatacaaaaaaaatggttttaatccttgaggagagtggggagcagaggtgcaatacaggagatcattttattattcacatacataagtgtgtgtgtgtgtatgtgtgtgtgtatatacacattattttgtgagttccaaatattatataataaacatttaaaatgtttattaaactcaggtaagcagggtccatatgaacagtgaaaaatcatgctgatagtatacattcttgaaattatgtgaaaatagcatttatgtattcctcccaaaaacctgtacctccaggctaatcatgaggaagacatcggaaaagttcctgttggagggacattctacaatatacctgacaagtgct

SEQ ID NO: 705421 - DNA, 1589 bp, Homo sapiens
tgggattatttcttgaaaatacttggcggcctccatgcttctgttttctttgagtcaggtagtcaggagggtttacaaacaatgcctgggctcccccgcaggtgccggcagatggggtagcgaatggtcctgtgcctccacctgctccgggagggagtctcccgtctctaggcctggccccttcctaaccctccacgtatcctgttctccagagacttcagaacccactcctgagaacagcggagccaggcgcttagaggaagaccaaatgctgccaggacacggattgyccagggattacattccagcatcttattaggtatctggatctgttggggaaaaaattagaaactatgtataaaacttacaaatattcaagtatcaaaaggttatttaggatgaaagttttaaaacaagtcatcagcaagctgctaccaccaagtggagacttatacaaaagttgagcgagtccactgagctgagaggacagaaatgaagtcacctgtgctggggcaggggcagggacactgggggcagggagtgtgtgggcagagaagccagagaagtccaggcctgtggaagccaaacaggagagcgtgggccggaagggcggtcaggatcgggggacgaggtcgctctccctggagaacgaaccctaaggtgcgtagcctgggattccctccctggaggtcctgtcccccgacatttcacaggccttctgagctgctttccaaggaggactaacacggcaacaaaagaaccatttctgcacaaaaatcctggaaagaaaaagaagcaagccgagaatggagtcaaaacgctacccagtgctgactaagcctctcaaaccctgttctaagtggactgtggtttctaagtcagggaaatggaagaggccccacccacacagggacagggccacggcccccacaggatgaagcagcagcgtttattcaagatacaacagtgagggaatccggtcacgttcccttctccccagagagggcgcatcttgacaagtgatcgagtagaaatcttttaaactctaagttaagttcataaaaaccactggtttcactctgtctcccagggccaggcctggcctctgagatgcactggcttggggcgccctcaggtggctgcatggaaaacccacagtctgaggccagcctggggctttcagacctgggcgggatctgcccaggccacctgtccttctgctttgggccgctgtctcttggcagatggcctgacacctgggggtggcccaaggatgcctcagaaaatcttgattcccactctacagatagcctgattagccagaggtttccaggccatctgtccgcctccaggagatggactgggacctttagacatcggtggagaacaggatgctctgtcccttgctgtccggggcagggacggcctccagccgcaagaagtacagcagcacctcgacctgccctcgcggagtggggaagaggagagtggctcagaggggggctcacagctgctggtggggaggtctttggggcccaagtccccaagtccacctcaggtgctagaaacccctgctggtgtcatgaacc

SEQ ID NO: 705422 - DNA, 1589 bp, Homo sapiens
tgggattatttcttgaaaatacttggcggcctccatgcttctgttttctttgagtcaggtagtcaggagggtttacaaacaatgcctgggctcccccgcaggtgccggcagatggggtagcgaatggtcctgtgcctccacctgctccgggagggagtctcccgtctctaggcctggccccttcctaaccctccacgtatcctgttctccagagacttcagaacccactcctgagaacagcggagccaggcgcttagaggaagaccaaatgctgccaggacacggattgtccagggattacattccagcatcttattaggtatctggatctgttggggaaaaaattagaaactatgtataaaacttacaaatattcaagyatcaaaaggttatttaggatgaaagttttaaaacaagtcatcagcaagctgctaccaccaagtggagacttatacaaaagttgagcgagtccactgagctgagaggacagaaatgaagtcacctgtgctggggcaggggcagggacactgggggcagggagtgtgtgggcagagaagccagagaagtccaggcctgtggaagccaaacaggagagcgtgggccggaagggcggtcaggatcgggggacgaggtcgctctccctggagaacgaaccctaaggtgcgtagcctgggattccctccctggaggtcctgtcccccgacatttcacaggccttctgagctgctttccaaggaggactaacacggcaacaaaagaaccatttctgcacaaaaatcctggaaagaaaaagaagcaagccgagaatggagtcaaaacgctacccagtgctgactaagcctctcaaaccctgttctaagtggactgtggtttctaagtcagggaaatggaagaggccccacccacacagggacagggccacggcccccacaggatgaagcagcagcgtttattcaagatacaacagtgagggaatccggtcacgttcccttctccccagagagggcgcatcttgacaagtgatcgagtagaaatcttttaaactctaagttaagttcataaaaaccactggtttcactctgtctcccagggccaggcctggcctctgagatgcactggcttggggcgccctcaggtggctgcatggaaaacccacagtctgaggccagcctggggctttcagacctgggcgggatctgcccaggccacctgtccttctgctttgggccgctgtctcttggcagatggcctgacacctgggggtggcccaaggatgcctcagaaaatcttgattcccactctacagatagcctgattagccagaggtttccaggccatctgtccgcctccaggagatggactgggacctttagacatcggtggagaacaggatgctctgtcccttgctgtccggggcagggacggcctccagccgcaagaagtacagcagcacctcgacctgccctcgcggagtggggaagaggagagtggctcagaggggggctcacagctgctggtggggaggtctttggggcccaagtccccaagtccacctcaggtgctagaaacccctgctggtgtcatgaacc

SEQ ID NO: 705423 - DNA, 1656 bp, Homo sapiens
tggtgcacgtaactagaagttatagaaaataaggaattgtaggtgagggcatactgcagcctgctctgaagcctgtgtaaagaggtttaagtgtctgtcaatggattttgggaagcagagttgcatgactagacctaaactttaccaagcccctcctagatgcagagggtacatgtttagaggctgcagaggtatcccaggtgatacatgaaaagttctcaatttagtgagtgggataatatgggactagaagtgggaaacaggcatccttctggagaggcagtttgaggttcttaagtgtccattcaccttataaacattactgtgcactgtgctatcagcaggcactgcactttcagcactgtgctaggggctgggtgtatatgcagtgaagaagctacagtggctgccttcatgatgcttacactgcattagcatcctatttactggaaaaaattgtcacacatgtgatggcttcaaacaatacaaatttatgatcttatagttctggaggttagaagtgtgaaataggtcatagaaggctaaaatcaaggtgtgagcagggctgcgtccttctggaggctccagagaagaactgataacctttatttccagcttccagaggctgtctgtatggctggcttgtggtccctgcctctgtcttcaaggtcagcaatgggggtgagtctcacaccacgccactctaacattgactcttctgtcttctcccatccacatttaaaggatgcctgagattccattggctttgcttagatgatattgggtaattttcttatcttaaagtcagtggattactaaccataattccatttgcaaacttaattcccctttaccatatgtcatcatatgttcacagattctgaggataatgcatggacgtctctgaggaggcactcttctgcccatcatgcactgtgctgagggaagccagatgacaagataaacagatacatgaattgcatgcatttctgtatatatgtgcatttgtatacatacataacttcacatcaagaaatgcatattgacagaagcaaagaaaatgctgtaatggagaataaaatggagaacaagtctgttggaagaggagacatctgtgctgagaactgaaagagaatacaatctctcttccaatttctcttctctaagaaaatagctttatggtttatacycataagattgttttgaggattgaatgatgtgaatgatgtaaatgatgtaacaatttttacagaacatctagtagtatcactgatgattccccaatgcttacaatagtttcttcacagcggtggctgcagaacagcggtggctgtagaacagcggattttggtgacccgcaaatgctgctgcctgatcattcctctggaagttttgtctcagaggagtacccagccgtgtgaggtgtcagtctgcccctactggggggtgcctcccagttaggctgctcgggggtcagggatccacttgaggaggcagtctgcccattctcagatctccagctgcgtgctgggagaaccactgctctcttcaaagctgtcagacagggacatttaagtctgcagaggttactgctgtctttttgtttgtctgtgccctgcccccagaggtggggcctacagaggcaggcaggcctcc

SEQ ID NO: 705424 - DNA, 1010 bp, Homo sapiens
gtgttataattttctataatttctaataatttattgtgagttctctgggcttgtattttaggggaaaaatggaaagaccaggatattgaagatgaacacaaaaaccagggaagaaatctaaggtgagttgcattcacaaataattatatagcccctgagagaatcttagtatttcataaatttcaaaagccaagcaagcaaaacaataagcagagtttcaggtttattcattcttagaaaatttttactgaaggtgtttcattgaaactgtcatgggcagccaggcgtggtggctcatgtctgtaatcccagcactttgggaggctgaggccagtggatcatgagatcaggagatcgagaccatcctggccaacatgatgaaaccctgtctctactaaaaatacaaaaaattagccgggcgtggtggcgtgcacctatagtcccagctactcgggaggctgaggcaggagaatcgcttgaacctgggaggtggaggttgcagtgagctgagatcgatccactgcactgcagcctggtgacagagcgagactccgtctaaaaaaacaacagaaactgtcattggctgggtaargtagcgaatacctctaatcccagcctttggtaggtgaaggctggagaattgcttgaggccaggagttcaacaccagcctggtcaacatagtgaaaacctgtctctacaggaaaaaaaaaaaagcaatagatgttcagggtgtgagaagaaatcactatgaaacagcatttaaaaatcctggctgggcgcagtggctcacgcctgtaatcccagcactttgggaggctgaggcgagcggatcacctgaggtcaggagtttgagaccccgtctctactaaaaaagatataaaattagcggggcgtggtggtgcatgtctgcaatcccagctacttgggaggctgaggcaggagaatcacttgaacccaggaggcggaggttgcagtgagctgagatcacgccactgcactccagcctggg

SEQ ID NO: 705425 - DNA, 1606 bp, Homo sapiens
  misc_feature 432, 709, 710, 711, 712, 713, 714, 715, 716, 717, 718, 719,720, 721, 722, 723, 724, 725, 726, 727, 728, 729, 730, 731,732, 733, 734, 735, 736, 737, 738, 739, 740, 741, 742, 743,744, 745, 746, 747, 748, 749, 750, 751, 752, 753, 754: n = A,T,C or G
  misc_feature 755, 756, 757, 758, 759, 760, 761, 762, 763, 764, 765, 766,767, 768, 769, 770, 771, 772, 773, 774, 775, 776, 777, 778,779, 780, 781, 782, 783, 784, 785, 786, 787, 788, 789, 790,791, 792, 793, 794, 795, 796, 797, 798, 799, 800, 801: n = A,T,C or G
  misc_feature 802, 803, 804, 805, 806, 807, 808: n = A,T,C or G
taagcctcaattttttggctgactttcctcattcataaggttgttgtgaaaaacaaagcaaaactaatcaatatgagtaaactgctatgaaacactgtctattatatgttttcttgataaacatttattgagtgctgtctttcagttggtctcctgtgttagtagcttgtcatacagagcttcaagaagtcaagcttcaggccatagtcacaaagaattcagctctgatttggagagataaataagtacttagggtgaggttgtgtactaacaaacccactgtaaagtcaaaaaattgtaagccaaaccgtcaaaagtaagagactgtatatgtaactatgtgtgtgtgtgttgttgtttttaagatgtgttttggacaaacgaaagtaaaatctcatttaaaagattgattttaaaagcttccccaaagtnattgtcagtgcattattagagatccagcccaatatttgtcatcatttgtatctattattgcagacaatgagaataaatgtttacaaggtgatgcagctatgctatgtgaatcaccaaagattaaataatcatcagtatacatttgtgtgacatatttttgcttgtattttatagatgtaaaaacaaataattcatctataataaaaatgattggctgggcgcagtggctcacgcctgtaatcccagccctttgggaggccgatgtgggcggatcatnnnnnnnnnnnnnnnnnnnnnnnnnnnnnnnnnnnnnnnnnnnnnnnnnnnnnnnnnnnnnnnnnnnnnnnnnnnnnnnnnnnnnnnnnnnnnnnnnnnncacctacacctatatgataggtgcaagaacatcaatagaatggcaattcactataaatcaagattttgttagcaatcaggacagccaaagtacataacaggacaggactgaaaaaaagtacatcaaaatctttgaaatttttgaaaatgctggcataaaacagcataagtattactgataaagacactggacttcttttgcataatgaatcttaatgtcttgctttatttttcacagtattattgaaaactaataattttgtgtctgctaaggaaatcccagatttttaaacaaagatatcaggtgcctccatatgaatgaaattgcaaatattctaccaattttgacctacaaaactggcaatttcatatggcttaacctatttctgaagtaggtaaaagaaggtagagattaaaatagaagtgaaggtccagcttaaagacatcagagttttyttttaagaccctaaagttatggttaagagtgaaaagtggtaacattttaataactgatgctgccaagaaataatgttggtttagtaaaaagtaaaataaaaaggtttctaacgcattttacatggctcaaaagcaaacatcaaacttctatccaatgtcacgtgtactccctctttcctttcaaatgatttgagaaagaacccagtatcaaaccttcaactttttctaaagtgcagaggttgctgtttgcctctactccgctccgaaccccctccccccaaccagttctgtgttgtgtgtagacatcgctccattactgtgcttcccattaaatccgtaataa

SEQ ID NO: 705426 - DNA, 677 bp, Homo sapiens
tttttttttttgagacagagtctctgttgcccaggctggaggtgcagtggtgctatcttggctcgctgcaacctctgcctcccgggttcaagcgattctcctgcctcagccgcccgagtagctgggattacaggcgcccgccaccatgcctggctaatttctgtatttttagtagagacrgggttttgccattttggacaggctggtctcaaactcctgacctcaggtgatccacccgccttagcctcccaaagtgttgggattacaggtgtgagccactgcacccggcctggcagctctgtaaattctgaaagtagttgtcttcttttctcattctaaatactcacttttgcacctaacttttgattcatcattttggtatgcgggtagaaggagcctacatgggcctgggctctgcagacaccagggctgggcacacttatctggtatgcgttgcccagcagcctcggagttgggcagttttacctccactgtacacaaggggaaatggaggctcagaggcgagtgaatggccacggtctccgtgaggtctgaacacaggacacccggccctgatgtggggtcctctcccagaagccagagcaatgtctccctccccagcgccctccgcccactggccaggccccaccttattcggaaatggggtctttgcagac

SEQ ID NO: 705427 - DNA, 3531 bp, Homo sapiens
ggcatcacttggcttcttttgaaatcagcagaatattgaaagacactcattggaattgcctatgtatttactcactttgatatttgaaaagggaactccaattgcctctaccaaaggaaaaatgacctactacatccatatataaacacttaaaaattgcagatttaaccccttctaaatgttttttaaaacataatcagagttattgtagacattcaaaaatatagcatattttagagaaattagcataaaacttaccatgaagtgggatttaatttttttctctacttttatttcgagtgaagtaactacacaaagtgaaaaattaatttaaattattgatactaaattttcatttgaatgtaaaattactatgtctacttttaatatctacaaaaagccttgtgattcataaataagaaaaaacgtttgaaagtacttgggtgtttttcaggagaatatttttatgtatacctattattgtaaattatacattagtgaaatttgaattaatttgatttacaatgttcgcagggtttgtgtatgtacgtatgtgttttgtagtgaagaaaaatatgtagaagaaaagtgcactcatttatctaacacatatattgttcacttatgtatgaggcaatgtgctaggtgttgtgtgggattcataaattagctttaagaagtttacagtccagatcacgtaaggaaaataacatgtatacatatctttgcatacctataagtaaatatagaatcatatttttaataacgaacattatttctattatagtccccatcacgaaaactatttttcagctatttctaggagtccatagatggtgctcatagatgtttagagtaaggtgatttagccacagtagccatgtgccattttttctttttcctctgaaacaatttgattatgcatgctcaaaaatcctggtaggtgactcatctgggctactagttgttatcaaaagctttaattttgtgcctcccacttgttgtctcttttcattctcataggccccatgggaatttttatcctgtgcctccaaacttataagtagcaaagtgattgataaccacagggtttatctgagtctgccaaacttgctgttggaccaactactgaaaatgtggtgtcaaagagacgttgtagctgaaactgctagctgtgtgaagaccctttgtgagctgggaaagctggtggtcttcaggctctatagctatggtatgcaacctcaaatatggaaaattgtttctacttttatggtgtgtataccaataatattcagaattttagtgaagcagtcatttattgttgcttgccaatagtagctccctatctccctgggatttagacataaataaatcctcaggaataggaaaggaaaactgtatcaaaatcacctggaccctctgataatgagagcattgctattgaaccagttttgtttttctatatgtatttatctttggttaatttctttccaagtgcttattgtcttcttgcagatatgttacttgtgcacacctaacctgtgcacacctaacctgtgcacttgtgcacacctaacctgtcctgccaacctgatggaacttgtctacattttaaagtgagaccactttgtacatacctgggccccctatgagagttcgcagacaaggaggtatacggcttaagaaaaaaaaaatttgtctaagaagatttcataacaatgtaatatttgagctgatatttaagagaattgaggagagaacacgaccagatatgcagaaattaaaaaaaaaattaaagttgtaaatgggtgccaacaaagccagttgtgtagcaaattttaagcagaaaaggtttaaattaaaggcctacaaaatgtgtggagggctaaaggaggggatcccatcctggccctccagggaaaatttccagagcatgagataattgattcaccaaaatttcctcatgcttccgtatggttgctatgggcactactaagtttaagactcgaagggagctgatttcctaggattagaaagctgtacctgccagtactcaggaacctgaagaggggacagtggaatgatttgcaggaacatctcacatccgacaactttgcctcctagcagaggaagttgacctcaggctcacttgtcccattataaatattgtgagatacatctaactgttggtattgtgtttgtattcagaatcgtgcctgaaagatagatatggaaaaattataccatgaaataaatatatttacatacagttaaataataatatataacagttatatataatttaataatatattattaataatataatatataatatataatttatataatatatagtaatatttacaccatgaaaattgacaaataatacacatcagaccccccaccaccactaagagccagccgatttttaaacatttattagtacatccctggtacattgactcaatccatattatcttccatattttgcacagtatatataatatgtaaataaaatatacaatacaattagaatattataagattagaattttgatgaattatttggtgttgacaaatatgaagctattccttttgtaaatttttgtaaataatcttatgaatgaaggcactggacttaagccactctgctgtgatatattaaggaaccaatatatatacatgtttattataaatatacatgtttatatataaatatacatgtttataaatatatgtaaacatgtaaatatatgttcctattaaaaaataccacatttattaacaacctatgtctctgtcttgacccagttttacagtttgaagctggcacgaaataaatattgtatacatggaatatgatgcagcaactaattttttctaccatccaaacatcactgatagtatcttaagttgaaatttaaaacatcattaatggtgaggcagtttatttgcatgaaaataaacatcagtttacattacaatgaaaattctaatattagctttaaaagaacttgtatgtaagctaggagaaaggatttcaattagcctttgactttataattagttaataataattaaatgcattttcatttgagmcaaaataatcttttttttttctcttaaatttcaaaatgttcttgagtgcctcatggaaataaactgaagaaaagttaaaacggcttggttgttttcatataaccaaggttaggccttgtatggaaaggacattctatcctcttataaactgcaattaagggcactgaggagataaaacttttaagaatggaattaactgtgtcatgtagaaataatgacagaaagcatctgtcatcacgtgagctcttgatatttattgagcacttagaaagagtctgacactgtacttgaccctagagatgaaaaagtcacataattttgagcagtttacagttgtccttttgtattttttgggtcctaaaattgattgacacaaccaatgaaattggagcttctctcaggtaagggcaacttctgtgaattttgagg

SEQ ID NO: 705428 - DNA, 3096 bp, Homo sapiens
gtttatcagcactttgcttctcttggaactctgcgttggaaatcacaactcccatatatttatattccaacttttgtcagaaactttactagattctctatatgtgttgtgtttactaattgaatcttcacaataacttactgaattaataactattaatctagttttagagatttaaaagtcaagactcagcttgccttaggtcacaggtgtcagaagacatctatttgaattcaggtctgctgtatgctctaaattgtctgtagatatgaactattcaaccaacattaagtatacttaattgggccataagtgatcctataaaatggttttggctcaaaaggatttttaaaaaaatattatggcacatttcatgttgaaactgacatttctatgacctattggaaaggagtatgattatattaggtgggcatattcttagtgaaagcatactttagtctagtgttcctgactttttcacctgtcattgaaagccatctacttaatcatttatccctgcgattaacatctatcttaataatctatagttttttgtgtcctttgatatttctgcatcatgacttttagttattttgaatctggctcctggaaatttttcagaaattttctatagtttccaaatgatcattgacagtaaaatttgaaaagttattttctatgtttaatatttttttctagctaaattagatttttctaattctaaattacataatactaatttatatggttctaaattctaatatgatacagtgaccctttctcctaaatttcctataaacttccatgccatcaatcactttttctctctttggaacaattaatcccaaagtagttattactctatttattccttttgccttctgatagatgaaccataaatgcaagtcaaaaattaaccagctgttctggtaatgatggaccaatcagaagatgtctaccatttctttgtttcttataacaatattttgaagtaaaaaatgttaatcatctctatttcatagatgagacaaaataaatccagagaagggtaagtcagaaattgggcacatgtaattcttataagtgaatacattctacaactaggaaaaattactatgtgtattagatatcaaaaattgtcatttattttcactgaaattaatagtaaaaaatgcaatttatatcatagaccaattcaaacacttgaatgcatgcaggtaaatatatacacagaggtatatttattgtattttatttatttctttatatataacagagaaaagttccaaaagtaatatgtactctcggccgggtgcagtggctcactcctgtaatcccagcactttagaaagtggaggtggatggatttcttgaggccaggagtttgagaccagcctgagcaacattgcaaaaactctactaaaaatacaaaaattatctgggtgtggtggtgtgcacctgtaatcccagtcattagggagtctgaggcaggagaatcacttgattgcgggaggtggagttgcagtgagcccggatcacgccactgcactccagcctgagcagcagagccagactccacctcaaaaacaaagaaaaaaagtactctctctatgttccttaaagtatacttttttcctattattttattaacttttaatttaattttatttgattaacttctatgtctattataaaaatgctggtcacaacccaatgaattgattttatgattcactgttggtgacctatagctggggaaatctgtcctagatgatatcacttctgtgttaatttttgtacaatgcactaggatcattcaatggattagggagtctctagtaaccctaagcaatgatatcactgtttctctgtttttcctttcttatatagagagagttatatacaagtatatgatttttaaatatgcagtattatatctccttctagacaacctaattcctagaagaaatacatattcttctttatccttattacagataaagatttatcaccagttcttaataatatttaaattattaaatttatctacttgtgttgaaatgttagtttcagtgtgtttgttcctcatgtactcagccaatattttctgagcacctaacgttttcaggtgcaagtcctgaaggcacacaaattagcataacaggcagtaacccagttctcagaaagtttgcctattatagtacacatattgctttagagacacctgggaatataagcacttttccaaaaccaggtctttattgaattcaactttaaaatgtttgataaaatctctgcattgctagtacgacacttgtagattgtatgtggaatagttgatgttctgaaacacagaaatgtctttaaatattttttgattttttctaatcatgaaaattcagccaaaaaatatgttccttaccatgacaacttggcaaggctctattccatccaggtcttccatcatctcccatgatacaggtgagtgttgaataaccttgaagaacataaccagcatcacagtaataggtgactgttgaccctaatttataatccattccaagtctggtgccattcattatattgcctggatcaaagcaggactctcgcagttttgctgtaaaacaktgttagtataacattaattgctttaaaatacagttggcactccgtaatacatgggttctgcatctgtggattcagccaactgcagattgaaaatatttggaaaaaactgtatctgtactgaatatatacagactttttttgtcattactccctaaataacatagtataacaaccgtttacctagcatttacatcatatcctgtattattagtaatctagaatgatttaatgtatgtgggaggatgtatataagttatatattcacatctgtgaatgttagtatcagaaggtttggaaccagttacccagggataccaagggacagctgactgttttttatggacctttaagacatgttcatttctttttctaacccagaaggaaaagcagcagcatcatttctgtctttttgggggggctcaaagtacaaaggagcccttgtgcatatctgacaaattgctaatgcat

SEQ ID NO: 705429 - DNA, 3096 bp, Homo sapiens
gtttatcagcactttgcttctcttggaactctgcgttggaaatcacaactcccatatatttatattccaacttttgtcagaaactttactagattctctatatgtgttgtgtttactaattgaatcttcacaataacttactgaattaataactattaatctagttttagagatttaaaagtcaagactcagcttgccttaggtcacaggtgtcagaagacatctatttgaattcaggtctgctgtatgctctaaattgtctgtagatatgaactattcaaccaacattaagtatacttaattgggccataagtgatcctataaaatggttttggctcaaaaggatttttaaaaaaatattatggcacatttcatgttgaaactgacatttctatgacctattggaaaggagtatgattatattaggtgggcatattcttagtgaaagcatactttagtctagtgttcctgactttttcacctgtcattgaaagccatctacttaatcatttatccctgcgattaacatctatcttaataatctatagttttttgtgtcctttgatatttctgcatcatgacttttagttattttgaatctggctcctggaaatttttcagaaattttctatagtttccaaatgatcattgacagtaaaatttgaaaagttattttctatgtttaatatttttttctagctaaattagatttttctaattctaaattacataatactaatttatatggttctaaattctaatatgatacagtgaccctttctcctaaatttcctataaacttccatgccatcaatcactttttctctctttggaacaattaatcccaaagtagttattactctatttattccttttgccttctgatagatgaaccataaatgcaagtcaaaaattaaccagctgttctggtaatgatggaccaatcagaagatgtctaccatttctttgtttcttataacaatattttgaagtaaaaaatgttaatcatctctatttcatagatgagacaaaataaatccagagaagggtaagtcagaaattgggcacatgtaattcttataagtgaatacattctacaactaggaaaaattactatgtgtattagatatcaaaaattgtcatttattttcactgaaattaatagtaaaaaatgcaatttatatcatagaccaattcaaacacttgaatgcatgcaggtaaatatatacacagaggtatatttattgtattttatttatttctttatatataacagagaaaagttccaaaagtaatatgtactctcggccgggtgcagtggctcactcctgtaatcccagcactttagaaagtggaggtggatggatttcttgaggccaggagtttgagaccagcctgagcaacattgcaaaaactctactaaaaatacaaaaattatctgggtgtggtggtgtgcacctgtaatcccagtcattagggagtctgaggcaggagaatcacttgattgcgggaggtggagttgcagtgagcccggatcacgccactgcactccagcctgagcagcagagccagactccacctcaaaaacaaagaaaaaaagtactctctctatgttccttaaagtatacttttttcctattattttattaacttttaatttaattttatttgattaacttctatgtctattataaaaatgctggtcacaacccaatgaattgattttatgattcactgttggtgacctatagctggggaaatctgtcctagatgatatcacttctgtgttaatttttgtacaatgcactaggatcattcaatggattagggagtctctagtaaccctaagcaatgatatcactgtttctctgtttttcctttcttatatagagagagttatatacaagtatatgatttttaaatatgcagtattatatctccttctagacaacctaattcctagaagaaatacatattcttctttatccttattacagataaagatttatcaccagttcttaataatatttaaattattaaatttatctacttgtgttgaaatgttagtttcagtgtgtttgttcctcatgtactcagccaatattttctgagcacctaacgttttcaggtgcaagtcctgaaggcacacaaattagcataacaggcagtaacccagttctcagaaagtttgcctattatagtacacatattgctttagagacacctgggaatataagcacttttccaaaaccaggtctttattgaattcaactttaaaatgtttgataaaatctctgcattgctagtacgacacttgtagattgtatgtggaatagttgatgttctgaaacacagaaatgtctttaaatattttttgattttttctaatcatgaaaattcagccaaaaaatatgttccttaccatgacaacttggcaaggctctattccatccaggtcttccatcatctcccatgatacaggtgagtgttgaataaccttgaagaacataaccagcatcacagtaataggtgactgttgaccctaatttataatccattccaagtctggtgccattcattatattgcctggatcaaagcaggactctcgcagttttgctgtaaaacagtgttagtataacattaattgctttaaaatacagttggcactccgtaatacatgggttctgcatctgtggattcagccaactgcagattgaaaatatttggaaaaaactgtatctgtactgaatatatacagactttttttgtcattactccctaaataacatagtataacaaccgtttacctagcatttacatcatatcctgtattattagtaatctagaatgatttaatgtatgtgggaggatgtatataagttatatattcacatctgtgaatgttagtatcagaaggtttggaaccagttacccagggataccaagggacagctgactgttttttatggacctttaagacatgttcatttctttttctaacccagaaggaaaagcagcagcakcatttctgtctttttgggggggctcaaagtacaaaggagcccttgtgcatatctgacaaattgctaatgcat

SEQ ID NO: 705430 - DNA, 652 bp, Homo sapiens
cacacaataatgatgggagactttaacatcccactgtcaacattaaacagatcaacgagacagaaagttaacaaggatatccaggaattgaaatcagttctgcaccaagcagacctaatagacatctacagaactctccaccccaaatcaacagaatatacattcttctcagcaccacattgcagttattccaaaattgaccacatagttggaagtcaagcactccttagcaaatgtaagatgcaaattattctcacttatggaaaagaaaatatatgatacaatttctcatttaggccaggacatcagtataattgtccatgtgaatgaaagtgtattttgcaagtattgtttttaaaaaatatctaatttttatcgtgattttttatttttagattatcttattaatgaataataaatgtgtgcttgcatcacacatgtattatatcatcatatacagagcattatttgtaatttaaaatatatttaaacatgcaaactttagcattttatgaactttttagattaatctgagctatttttcttgaacaggttcaggtatctctgctcccacataaaatcarttgcttcattttcaataaatagagacattatgtgtatcttcaagtcagaaaacatctttcaaaaaatg

SEQ ID NO: 705431 - DNA, 1927 bp, Homo sapiens
atcattaatttctctgaactcatttaggaataaaaacaaattcaataaagaacatatgtataggccttcatggaaaaatgagaaagaacatatgtagtgggtaaaagttaggagcaagacaagtccttaggaattgtgtacttaacacatatttctaactcttcagctatttagttaagctttctaggattctacattgaaagttttggtcttgttatggtggttggaatggagacagagcattttctgggctagggaataccacttcccacagtgctttccaaagatttggagcagttaggttgaggattgtatttggtttggggctaaagattttcaccttggttttgtaaaattatttttgatatagataacacattttgtttaatgccagtttagaacatttggattattttatttttttaatttttatttatttatttttagatggagtctagctctgtcgtgcaggctggagtgcagtggtgtagtctcggctcactgcagcctctgcctcccgggttcaagcgattctcctgcctcagactcctgagtagctgggactacaggcgtgcaatatcatgcctggctaatttgtwtttttagtagagatagggttttaacatgttggccaggctggtctcaaactcctgacctcaagtgatccgcccacctcagcctcccaaagtgctgggattacaagtatgagctatcacacctggctccagtttagaacattttgaatataaaatttaaaataagaaatctaaactataatgctacttgggaaccattaaacctaattaaaaatcagaatgaatttactgttaagatacatagtaacatgtaatattcagtagagtaaaacatctcactacatagtatgtaagactttttacttctgctacaaccagaaacccaattgggtgagtaaaaagcaatttctcttttattgattaaaagacttactctttcaagactgaagtatccctttagtaaatctccagatgatgtatatgactagctgatgtgcataattatctatgctggagccttgtagttaagactcatgagttgtgatgtgtttaacaggtgcatttcatttttagttctgagtgtaacacaatcttgctttccatccttaggctcacattgtccttgaagttcctccatatcataacccagcagttacagctgcagtgcaggtgcacttttatctttgcaatggcaagaggaaaaaaagccagtctcaacgttttacttatacaccaggtacgaggagtcatgatggtttactatagagctttctttcctaatgaataaaaagttatttaacgaatcctatattacagtgtttaaggtagagtgcttataaacaatgaaaacaccaacagatgcccactctaaagtttttgttgactttaaatattagatgtggtctcagttgttattttgtaatgatttattataaggaaattagaagatggacggtaggtttaaggtcttttttcagaagggttttaatcaaaaattcccagcattacagaggggcaggtgttcgtgagtatgtgtgtggttctgggtcatgaactctccttgtacccttagcaccataaaaaggcagtgtggccaggcgcagtggctcatgcctgtaatcccagcacttagggaggccgaggcgggaggatcacctgaggttgggagtttgagaccagcctgaccaacatggatggaaaaacttcatctttactaaaaatacagaattagccgggtgtggtggtgcattcctgtcgtcccagctactcaggaggctgaggcaggagaattgcttgaacccaggagtggaggttgcggtgagccgagatcgcaccattgcactccagcctgggaaacgagcgaaactccgtcacaaaaaaaaaaaaaaaaa

SEQ ID NO: 705432 - DNA, 717 bp, Homo sapiens
aaagcaccatcagtccgggtatggtggctcatgcctataatcccagcactttgggaggccgaggcgggcaaatcacaaggtcaggagatcaagaccatcctggctaacacagcgaaaccccatctctattaaaaatacaaaaaattagctgggcgtggtgttgggcgtctgtagtcccagctacttgggaggctgaggcaggagaatggcatgaaccggggaggcagagcttgcagtgagccgagatcacgccactgcactccagcctgggcaacagagggagactctgtcttggaamaaaaaaaagcaccatcaatctgtctcttaacctcctagtcagttgtctttcaggtactttcctgaaagtcctaaccaatgactttcgcttcgatcttgttggtctcctctatgcgcaaagatgactgggaaattcagttttcaactgggcacgttgacaattctgttctgttgctaaggtagaaggagagaatagatcttggatgatggagataaacactagcattttgttccatcatccccactgatttttgcctcccacagccttgggaatgccttgtcttctgtactctacccaggagtgtgtaggtgtcctcataatcatagctgaggactccccttcacttcagtgctctttcctgagtgtcttcatgtagcattccagagggggaagccacaattgtcagacccaggccagaa

SEQ ID NO: 705433 - DNA, 2608 bp, Homo sapiens
tggagcaatctgcattccaaacaatcatcacctgtaacatgtttgtaaaaatgttttgccttatgaagacctatgatacacaacatgttgatataagtatactytctgagtctaaaaaaattcaatggaaaggaaaaacacatatgtctcatttctctgtgacaaaataactatgccttgatttatattctattaaatatagtaaattaatagcagctatttgcaatgaccttttataatccatagaagcacagagtttcagtggaatttgaaatcacagagttggaatatttccttggctttgactccattcaattctgtgagacctcccaacactctaatattacacacacatctgaattctcctatattgttatacagatgattacatgtagtgttagccattcccctatcccttccatgctccctgatgtctactgttccaaagttgaagatggcaatgatggtgtgtaggcactgcaaataaattacggctattaaccctgcaatggcagcaaattgacatagcctgttcagggcactaatattggatattctagctcttagctggtatggcaattgtcatataattctgtttttcaaaattgctttaacacatctccaccaacacctcaatacttgagccttgggcttctaatgcattgcagataccttaataaaattgtttgattctgcaacccattctcctaattcaatggaaaggaaaaaacatgagtctatgaggaagtagctaaggtcaatctgagtgattaacactcaacttcccttcaaatcacccacctgtggccataccttggatggagcttgaacacctcaactggcttttccttggtgaaggcctctttcaattgaggctcctttttttccttttgctcattgtcacctggcagttttgttctgcagactttccaggcatgactcttcctctcaccaccatcaccaacatatcaaggaaacaccactggtaccacagataaaatatcaccatactactgaagctgcagaataaaatcgttataaaattacattggcatcaaagatttcttgtcattggtcactattgaacattggaaaagaataggtaacagtggggtgagtaccctattcgaaccacaatgggacatcccattttcttctggattagccaattacaggaaatgtttctatgccacaaacacccttctagatactgcattgtctgagaccccacatttcatttaggaatatcttcttgggatgtctaaaggagggttatccagagtaagagaattagctggatgctgagagaaatgtcagggcacagaagcacatcattcctgcttgatggtctttgggtgaagtgcacctctccccagagagccacatgaatggcatctagtatagcattaggagtgtgagcacagaggatgttcagtgccaactcattgcacaggggtgcacctgggtctctgggtactagagtaggctgagcttgctcagatagagctcaacaagatctttctactgattctactgattctcacacttttcaatcagccccatctgtctaatacctgactaatactaatatgactaataatttatctgccatacctccagcacataaaaactttacctatttcatgaccatgtgagcaaacgaacagcattaagtatcctaccatatttttttgcgcttttgcctcacctttaataattttcaaactaagattttcacctctttgtcttccggtttggctccaataatctttccctaaagtgatgaatggcacatgtctaaggctgcaggagcacatggaagggtccttgaagtaaaagtaaatacattatatgaagcacagttggcaataagtgacacaattgaattcctcaaattaatccaacacataagcatcactcactttgaacagaagaggaatctccttggcgttaagtaatgattctcaagagggatgtcctcttcacagagtcacagaggtgaatacaacataatcactttgagaaccttttcaaaccatacctccccagtaacatgcactccttaagggaaatggagttttcctctcatctctcatcaaaatcactagtagaatgcaaattggtcgtataattcagggtttttttttcttctaatgatataaaaatacaattataagaatcacattaatattaaaagaaatgacaataataaaacaatgacaataatgaagtaaaatggcatttgctaatgatttccaaagagtggcttaagttcaaataaatgagtaatttactcagcattctgcataaacatctctattaacttataagctgtcttttaagaaaatcgtataaatttaaggggtacaagggcagttttgtgacatggatgtattgagcagtggtgaagtctgggccttagtgtacatggtacccactaagtaatttttcatcattctcccctctcttaccattggatgtttatcacagtactcttcgtattagcaaatgtatgattttttaaaattttctcttgtgatagacacatcataaagatctagcaaacacacacacacacacacacacacacacacacacacactattgg

SEQ ID NO: 705434 - DNA, 2553 bp, Homo sapiens
gtaccctagaacttaaagtataattaaaaaaataaaaaaaaagaacgaaagtaggttgtcagtagggttaaataggaaactggtattttagaacatgccccttgttgcacagtatctcttaatggccgttctcactgaggatgtgagctgggcttggtggaagcactatcacaaggagtcctgccagggttagkagggttgcactactaaattgaaacaatagaagtgtttagaagaggtgacccaaagcaatatatttgctttacagaaaagaagaagggctgtggagaggggtcaaggtctgcggttagagctgggaaaacagtaaagaatgtaaagtccaaagagcaaggcaagagagacatgagacactgaatattaaggtcgtatcaagaaagtcagtaacaggttggaatcacatgtgaggaagactgatgggaaaagtgcagatataaggcttgtgaggtgagtatgtgcttgccctggccttttacactgtgctcaggaaaagcagtgtatataaaaagtatatataaaaagtagtagatataaaagtgacttaaagaaacattgtgcttcaggtaacaactaaatatttctttagatcaacagatttctattattcttagtagcataactctctttaaaataattattgtgcagaaatttgatatataaatggataaaaaaagaattgatcttatttaggtgcaggtagaatccaaggtgatttcactagccagccagctgggccctcagccctttgggatcccctcagtagctttcctgagtattagagcctgtatggtttgaaaactactcttctaaatctttgaagacatgtccttatatcaagtcacataatcagaaactgatatatttagactttattaaattggttgtctatcactgaataataacttattcattttttgtttttaaaaatttatttacctttatatgtttatggggtacaagtgcatgcatatattgcacagtgttgaagtctctgttcttaatgtacccactgaataataattcaatatgccctgattttttattattatacttaaagttttagggtacatgtgcacaacgtgcaggtttgttacatatgtatacatgtgccatgttggtgtgctgcacccattaactcatcatttagcattaggtatatcccctaatgctatccctcccccctccccccccccaccccacaacagtccccagtgtgtgatgttccccttcctgtgtccatgtgttctcattgttcagttcccacctatgagtgagaacatgcggtgtttggtttttaaagatcagcacaagaaacaactatgagaaatgttgtttttttaaacattcagtagaattgccattaaaaaccttgttcatttcttgcttattttctctgaaatgatttcatgtgataaatatatcttagaaaattggtctcagggactggctattattatttttcccatctgtgataaaaggtaagatttgatggattctaaacatctcttcagttattaaattatatcattctaaacaacttggttaattaacatttcttttaaacacaacgtttattcaggaagttactttggagaaatctttctgttttccaggctcagtacgccatctgtgaaaacagagaggagtttggttcattctatcatttctccatccctccctctccagtctcaagggtctgtttctgttcccagacatgccaatcttatgtctgtattaaacctgtctccacttgcttttatctctggcagagcctcactagttggcacctcctcatttttcaattttgtttcaagtatcatcttcttaggggaaattgccctgctgtctccatttaaagttgcttctttccgtcttcttcactttatatcacttcatgacttgccaaacagtaggcatttaataaatatttgttgaataaataaaaacattaaaaaatttaaaatgaagaatcaattcctaacaccaagagctcactaattggttagagacaaagctataaacaataataatattttaagcactctaatgaagatatgtgctacatataaacaaaataagaaatgtctatgctagggaattctaggcaaaggcaatcacatttgagctgtgttttgatgaatggatagaagaacatcaaacaaggaagtaagagaagaatatgccagtaaaagggaaaatgtgtcccaaaatactgagttgggaaagatcacagggaagaagttcagaaggtaaagtagcttcaggattatggaagcaatgttaaaacgtgtggactttattctgtaactgctgaggatttttgaagaattttaagtgaaaaagcaacatgaattagatctttgggtaaaatagatttcacttgtgtaacagcgaagaaaacaagataatgggttttgctgtttcttctgaagaaagaggagtagaatttcaatcataggcggaaatgttcccttgaagcagggcacagagccatttgcattagtgtgtgtgtgtgtgtgtgtgtgtgtgtgtgtg

SEQ ID NO: 705435 - DNA, 2553 bp, Homo sapiens
gtaccctagaacttaaagtataattaaaaaaataaaaaaaaagaacgaaagtaggttgtcagtagggttaaataggaaactggtattttagaacatgccccttgttgcacagtatctcttaatggccgttctcactgaggatgtgagctgggcttggtggaagcactatcacaaggagtcctgccagggttaggagggttgcactactaaattgaaacaatagragtgtttagaagaggtgacccaaagcaatatatttgctttacagaaaagaagaagggctgtggagaggggtcaaggtctgcggttagagctgggaaaacagtaaagaatgtaaagtccaaagagcaaggcaagagagacatgagacactgaatattaaggtcgtatcaagaaagtcagtaacaggttggaatcacatgtgaggaagactgatgggaaaagtgcagatataaggcttgtgaggtgagtatgtgcttgccctggccttttacactgtgctcaggaaaagcagtgtatataaaaagtatatataaaaagtagtagatataaaagtgacttaaagaaacattgtgcttcaggtaacaactaaatatttctttagatcaacagatttctattattcttagtagcataactctctttaaaataattattgtgcagaaatttgatatataaatggataaaaaaagaattgatcttatttaggtgcaggtagaatccaaggtgatttcactagccagccagctgggccctcagccctttgggatcccctcagtagctttcctgagtattagagcctgtatggtttgaaaactactcttctaaatctttgaagacatgtccttatatcaagtcacataatcagaaactgatatatttagactttattaaattggttgtctatcactgaataataacttattcattttttgtttttaaaaatttatttacctttatatgtttatggggtacaagtgcatgcatatattgcacagtgttgaagtctctgttcttaatgtacccactgaataataattcaatatgccctgattttttattattatacttaaagttttagggtacatgtgcacaacgtgcaggtttgttacatatgtatacatgtgccatgttggtgtgctgcacccattaactcatcatttagcattaggtatatcccctaatgctatccctcccccctccccccccccaccccacaacagtccccagtgtgtgatgttccccttcctgtgtccatgtgttctcattgttcagttcccacctatgagtgagaacatgcggtgtttggtttttaaagatcagcacaagaaacaactatgagaaatgttgtttttttaaacattcagtagaattgccattaaaaaccttgttcatttcttgcttattttctctgaaatgatttcatgtgataaatatatcttagaaaattggtctcagggactggctattattatttttcccatctgtgataaaaggtaagatttgatggattctaaacatctcttcagttattaaattatatcattctaaacaacttggttaattaacatttcttttaaacacaacgtttattcaggaagttactttggagaaatctttctgttttccaggctcagtacgccatctgtgaaaacagagaggagtttggttcattctatcatttctccatccctccctctccagtctcaagggtctgtttctgttcccagacatgccaatcttatgtctgtattaaacctgtctccacttgcttttatctctggcagagcctcactagttggcacctcctcatttttcaattttgtttcaagtatcatcttcttaggggaaattgccctgctgtctccatttaaagttgcttctttccgtcttcttcactttatatcacttcatgacttgccaaacagtaggcatttaataaatatttgttgaataaataaaaacattaaaaaatttaaaatgaagaatcaattcctaacaccaagagctcactaattggttagagacaaagctataaacaataataatattttaagcactctaatgaagatatgtgctacatataaacaaaataagaaatgtctatgctagggaattctaggcaaaggcaatcacatttgagctgtgttttgatgaatggatagaagaacatcaaacaaggaagtaagagaagaatatgccagtaaaagggaaaatgtgtcccaaaatactgagttgggaaagatcacagggaagaagttcagaaggtaaagtagcttcaggattatggaagcaatgttaaaacgtgtggactttattctgtaactgctgaggatttttgaagaattttaagtgaaaaagcaacatgaattagatctttgggtaaaatagatttcacttgtgtaacagcgaagaaaacaagataatgggttttgctgtttcttctgaagaaagaggagtagaatttcaatcataggcggaaatgttcccttgaagcagggcacagagccatttgcattagtgtgtgtgtgtgtgtgtgtgtgtgtgtgtgtg

SEQ ID NO: 705436 - DNA, 2553 bp, Homo sapiens
gtaccctagaacttaaagtataattaaaaaaataaaaaaaaagaacgaaagtaggttgtcagtagggttaaataggaaactggtattttagaacatgccccttgttgcacagtatctcttaatggccgttctcactgaggatgtgagctgggcttggtggaagcactatcacaaggagtcctgccagggttaggagggttgcactactaaattgaaacaatagaagtgtttagaagaggtgacccaaagcaatatatttgctttacagaaaagaagaaggkctgtggagaggggtcaaggtctgcggttagagctgggaaaacagtaaagaatgtaaagtccaaagagcaaggcaagagagacatgagacactgaatattaaggtcgtatcaagaaagtcagtaacaggttggaatcacatgtgaggaagactgatgggaaaagtgcagatataaggcttgtgaggtgagtatgtgcttgccctggccttttacactgtgctcaggaaaagcagtgtatataaaaagtatatataaaaagtagtagatataaaagtgacttaaagaaacattgtgcttcaggtaacaactaaatatttctttagatcaacagatttctattattcttagtagcataactctctttaaaataattattgtgcagaaatttgatatataaatggataaaaaaagaattgatcttatttaggtgcaggtagaatccaaggtgatttcactagccagccagctgggccctcagccctttgggatcccctcagtagctttcctgagtattagagcctgtatggtttgaaaactactcttctaaatctttgaagacatgtccttatatcaagtcacataatcagaaactgatatatttagactttattaaattggttgtctatcactgaataataacttattcattttttgtttttaaaaatttatttacctttatatgtttatggggtacaagtgcatgcatatattgcacagtgttgaagtctctgttcttaatgtacccactgaataataattcaatatgccctgattttttattattatacttaaagttttagggtacatgtgcacaacgtgcaggtttgttacatatgtatacatgtgccatgttggtgtgctgcacccattaactcatcatttagcattaggtatatcccctaatgctatccctcccccctccccccccccaccccacaacagtccccagtgtgtgatgttccccttcctgtgtccatgtgttctcattgttcagttcccacctatgagtgagaacatgcggtgtttggtttttaaagatcagcacaagaaacaactatgagaaatgttgtttttttaaacattcagtagaattgccattaaaaaccttgttcatttcttgcttattttctctgaaatgatttcatgtgataaatatatcttagaaaattggtctcagggactggctattattatttttcccatctgtgataaaaggtaagatttgatggattctaaacatctcttcagttattaaattatatcattctaaacaacttggttaattaacatttcttttaaacacaacgtttattcaggaagttactttggagaaatctttctgttttccaggctcagtacgccatctgtgaaaacagagaggagtttggttcattctatcatttctccatccctccctctccagtctcaagggtctgtttctgttcccagacatgccaatcttatgtctgtattaaacctgtctccacttgcttttatctctggcagagcctcactagttggcacctcctcatttttcaattttgtttcaagtatcatcttcttaggggaaattgccctgctgtctccatttaaagttgcttctttccgtcttcttcactttatatcacttcatgacttgccaaacagtaggcatttaataaatatttgttgaataaataaaaacattaaaaaatttaaaatgaagaatcaattcctaacaccaagagctcactaattggttagagacaaagctataaacaataataatattttaagcactctaatgaagatatgtgctacatataaacaaaataagaaatgtctatgctagggaattctaggcaaaggcaatcacatttgagctgtgttttgatgaatggatagaagaacatcaaacaaggaagtaagagaagaatatgccagtaaaagggaaaatgtgtcccaaaatactgagttgggaaagatcacagggaagaagttcagaaggtaaagtagcttcaggattatggaagcaatgttaaaacgtgtggactttattctgtaactgctgaggatttttgaagaattttaagtgaaaaagcaacatgaattagatctttgggtaaaatagatttcacttgtgtaacagcgaagaaaacaagataatgggttttgctgtttcttctgaagaaagaggagtagaatttcaatcataggcggaaatgttcccttgaagcagggcacagagccatttgcattagtgtgtgtgtgtgtgtgtgtgtgtgtgtgtgtg

SEQ ID NO: 705437 - DNA, 2553 bp, Homo sapiens
gtaccctagaacttaaagtataattaaaaaaataaaaaaaaagaacgaaagtaggttgtcagtagggttaaataggaaactggtattttagaacatgccccttgttgcacagtatctcttaatggccgttctcactgaggatgtgagctgggcttggtggaagcactatcacaaggagtcctgccagggttaggagggttgcactactaaattgaaacaatagaagtgtttagaagaggtgacccaaagcaatatatttgctttacagaaaagaagaagggctgtggagaggggtcaaggtctgcggttagagctgggaaaacagtaaagaatgtaaagtccaaagagcaaggcaagagagacatgagacwctgaatattaaggtcgtatcaagaaagtcagtaacaggttggaatcacatgtgaggaagactgatgggaaaagtgcagatataaggcttgtgaggtgagtatgtgcttgccctggccttttacactgtgctcaggaaaagcagtgtatataaaaagtatatataaaaagtagtagatataaaagtgacttaaagaaacattgtgcttcaggtaacaactaaatatttctttagatcaacagatttctattattcttagtagcataactctctttaaaataattattgtgcagaaatttgatatataaatggataaaaaaagaattgatcttatttaggtgcaggtagaatccaaggtgatttcactagccagccagctgggccctcagccctttgggatcccctcagtagctttcctgagtattagagcctgtatggtttgaaaactactcttctaaatctttgaagacatgtccttatatcaagtcacataatcagaaactgatatatttagactttattaaattggttgtctatcactgaataataacttattcattttttgtttttaaaaatttatttacctttatatgtttatggggtacaagtgcatgcatatattgcacagtgttgaagtctctgttcttaatgtacccactgaataataattcaatatgccctgattttttattattatacttaaagttttagggtacatgtgcacaacgtgcaggtttgttacatatgtatacatgtgccatgttggtgtgctgcacccattaactcatcatttagcattaggtatatcccctaatgctatccctcccccctccccccccccaccccacaacagtccccagtgtgtgatgttccccttcctgtgtccatgtgttctcattgttcagttcccacctatgagtgagaacatgcggtgtttggtttttaaagatcagcacaagaaacaactatgagaaatgttgtttttttaaacattcagtagaattgccattaaaaaccttgttcatttcttgcttattttctctgaaatgatttcatgtgataaatatatcttagaaaattggtctcagggactggctattattatttttcccatctgtgataaaaggtaagatttgatggattctaaacatctcttcagttattaaattatatcattctaaacaacttggttaattaacatttcttttaaacacaacgtttattcaggaagttactttggagaaatctttctgttttccaggctcagtacgccatctgtgaaaacagagaggagtttggttcattctatcatttctccatccctccctctccagtctcaagggtctgtttctgttcccagacatgccaatcttatgtctgtattaaacctgtctccacttgcttttatctctggcagagcctcactagttggcacctcctcatttttcaattttgtttcaagtatcatcttcttaggggaaattgccctgctgtctccatttaaagttgcttctttccgtcttcttcactttatatcacttcatgacttgccaaacagtaggcatttaataaatatttgttgaataaataaaaacattaaaaaatttaaaatgaagaatcaattcctaacaccaagagctcactaattggttagagacaaagctataaacaataataatattttaagcactctaatgaagatatgtgctacatataaacaaaataagaaatgtctatgctagggaattctaggcaaaggcaatcacatttgagctgtgttttgatgaatggatagaagaacatcaaacaaggaagtaagagaagaatatgccagtaaaagggaaaatgtgtcccaaaatactgagttgggaaagatcacagggaagaagttcagaaggtaaagtagcttcaggattatggaagcaatgttaaaacgtgtggactttattctgtaactgctgaggatttttgaagaattttaagtgaaaaagcaacatgaattagatctttgggtaaaatagatttcacttgtgtaacagcgaagaaaacaagataatgggttttgctgtttcttctgaagaaagaggagtagaatttcaatcataggcggaaatgttcccttgaagcagggcacagagccatttgcattagtgtgtgtgtgtgtgtgtgtgtgtgtgtgtgtg

SEQ ID NO: 705438 - DNA, 2553 bp, Homo sapiens
gtaccctagaacttaaagtataattaaaaaaataaaaaaaaagaacgaaagtaggttgtcagtagggttaaataggaaactggtattttagaacatgccccttgttgcacagtatctcttaatggccgttctcactgaggatgtgagctgggcttggtggaagcactatcacaaggagtcctgccagggttaggagggttgcactactaaattgaaacaatagaagtgtttagaagaggtgacccaaagcaatatatttgctttacagaaaagaagaagggctgtggagaggggtcaaggtctgcggttagagctgggaaaacagtaaagaatgtaaagtccaaagagcaaggcaagagagacatgagacactgaatattaaggtcgtatcaagaaagtcagtaacaggttggaatcacatgtgaggaagactgatgggaaaagtgcagatataaggcttgtsaggtgagtatgtgcttgccctggccttttacactgtgctcaggaaaagcagtgtatataaaaagtatatataaaaagtagtagatataaaagtgacttaaagaaacattgtgcttcaggtaacaactaaatatttctttagatcaacagatttctattattcttagtagcataactctctttaaaataattattgtgcagaaatttgatatataaatggataaaaaaagaattgatcttatttaggtgcaggtagaatccaaggtgatttcactagccagccagctgggccctcagccctttgggatcccctcagtagctttcctgagtattagagcctgtatggtttgaaaactactcttctaaatctttgaagacatgtccttatatcaagtcacataatcagaaactgatatatttagactttattaaattggttgtctatcactgaataataacttattcattttttgtttttaaaaatttatttacctttatatgtttatggggtacaagtgcatgcatatattgcacagtgttgaagtctctgttcttaatgtacccactgaataataattcaatatgccctgattttttattattatacttaaagttttagggtacatgtgcacaacgtgcaggtttgttacatatgtatacatgtgccatgttggtgtgctgcacccattaactcatcatttagcattaggtatatcccctaatgctatccctcccccctccccccccccaccccacaacagtccccagtgtgtgatgttccccttcctgtgtccatgtgttctcattgttcagttcccacctatgagtgagaacatgcggtgtttggtttttaaagatcagcacaagaaacaactatgagaaatgttgtttttttaaacattcagtagaattgccattaaaaaccttgttcatttcttgcttattttctctgaaatgatttcatgtgataaatatatcttagaaaattggtctcagggactggctattattatttttcccatctgtgataaaaggtaagatttgatggattctaaacatctcttcagttattaaattatatcattctaaacaacttggttaattaacatttcttttaaacacaacgtttattcaggaagttactttggagaaatctttctgttttccaggctcagtacgccatctgtgaaaacagagaggagtttggttcattctatcatttctccatccctccctctccagtctcaagggtctgtttctgttcccagacatgccaatcttatgtctgtattaaacctgtctccacttgcttttatctctggcagagcctcactagttggcacctcctcatttttcaattttgtttcaagtatcatcttcttaggggaaattgccctgctgtctccatttaaagttgcttctttccgtcttcttcactttatatcacttcatgacttgccaaacagtaggcatttaataaatatttgttgaataaataaaaacattaaaaaatttaaaatgaagaatcaattcctaacaccaagagctcactaattggttagagacaaagctataaacaataataatattttaagcactctaatgaagatatgtgctacatataaacaaaataagaaatgtctatgctagggaattctaggcaaaggcaatcacatttgagctgtgttttgatgaatggatagaagaacatcaaacaaggaagtaagagaagaatatgccagtaaaagggaaaatgtgtcccaaaatactgagttgggaaagatcacagggaagaagttcagaaggtaaagtagcttcaggattatggaagcaatgttaaaacgtgtggactttattctgtaactgctgaggatttttgaagaattttaagtgaaaaagcaacatgaattagatctttgggtaaaatagatttcacttgtgtaacagcgaagaaaacaagataatgggttttgctgtttcttctgaagaaagaggagtagaatttcaatcataggcggaaatgttcccttgaagcagggcacagagccatttgcattagtgtgtgtgtgtgtgtgtgtgtgtgtgtgtgtg

SEQ ID NO: 705439 - DNA, 2553 bp, Homo sapiens
gtaccctagaacttaaagtataattaaaaaaataaaaaaaaagaacgaaagtaggttgtcagtagggttaaataggaaactggtattttagaacatgccccttgttgcacagtatctcttaatggccgttctcactgaggatgtgagctgggcttggtggaagcactatcacaaggagtcctgccagggttaggagggttgcactactaaattgaaacaatagaagtgtttagaagaggtgacccaaagcaatatatttgctttacagaaaagaagaagggctgtggagaggggtcaaggtctgcggttagagctgggaaaacagtaaagaatgtaaagtccaaagagcaaggcaagagagacatgagacactgaatattaaggtcgtatcaagaaagtcagtaacaggttggaatcacatgtgaggaagactgatgggaaaagtgcagatataaggcttgtgaggtgagtatgtgcttgccctggccttttacactgtgctcaggaaaagcagtgtatataaaaagtatatatawaaagtagtagatataaaagtgacttaaagaaacattgtgcttcaggtaacaactaaatatttctttagatcaacagatttctattattcttagtagcataactctctttaaaataattattgtgcagaaatttgatatataaatggataaaaaaagaattgatcttatttaggtgcaggtagaatccaaggtgatttcactagccagccagctgggccctcagccctttgggatcccctcagtagctttcctgagtattagagcctgtatggtttgaaaactactcttctaaatctttgaagacatgtccttatatcaagtcacataatcagaaactgatatatttagactttattaaattggttgtctatcactgaataataacttattcattttttgtttttaaaaatttatttacctttatatgtttatggggtacaagtgcatgcatatattgcacagtgttgaagtctctgttcttaatgtacccactgaataataattcaatatgccctgattttttattattatacttaaagttttagggtacatgtgcacaacgtgcaggtttgttacatatgtatacatgtgccatgttggtgtgctgcacccattaactcatcatttagcattaggtatatcccctaatgctatccctcccccctccccccccccaccccacaacagtccccagtgtgtgatgttccccttcctgtgtccatgtgttctcattgttcagttcccacctatgagtgagaacatgcggtgtttggtttttaaagatcagcacaagaaacaactatgagaaatgttgtttttttaaacattcagtagaattgccattaaaaaccttgttcatttcttgcttattttctctgaaatgatttcatgtgataaatatatcttagaaaattggtctcagggactggctattattatttttcccatctgtgataaaaggtaagatttgatggattctaaacatctcttcagttattaaattatatcattctaaacaacttggttaattaacatttcttttaaacacaacgtttattcaggaagttactttggagaaatctttctgttttccaggctcagtacgccatctgtgaaaacagagaggagtttggttcattctatcatttctccatccctccctctccagtctcaagggtctgtttctgttcccagacatgccaatcttatgtctgtattaaacctgtctccacttgcttttatctctggcagagcctcactagttggcacctcctcatttttcaattttgtttcaagtatcatcttcttaggggaaattgccctgctgtctccatttaaagttgcttctttccgtcttcttcactttatatcacttcatgacttgccaaacagtaggcatttaataaatatttgttgaataaataaaaacattaaaaaatttaaaatgaagaatcaattcctaacaccaagagctcactaattggttagagacaaagctataaacaataataatattttaagcactctaatgaagatatgtgctacatataaacaaaataagaaatgtctatgctagggaattctaggcaaaggcaatcacatttgagctgtgttttgatgaatggatagaagaacatcaaacaaggaagtaagagaagaatatgccagtaaaagggaaaatgtgtcccaaaatactgagttgggaaagatcacagggaagaagttcagaaggtaaagtagcttcaggattatggaagcaatgttaaaacgtgtggactttattctgtaactgctgaggatttttgaagaattttaagtgaaaaagcaacatgaattagatctttgggtaaaatagatttcacttgtgtaacagcgaagaaaacaagataatgggttttgctgtttcttctgaagaaagaggagtagaatttcaatcataggcggaaatgttcccttgaagcagggcacagagccatttgcattagtgtgtgtgtgtgtgtgtgtgtgtgtgtgtgtg

SEQ ID NO: 705440 - DNA, 1253 bp, Homo sapiens
gatttctagattggtcatagctgctttttgctgttgttgttgtttttttttttttttttggacagtaaccttgcaaggagaaaaaaaggattgagtttatacatgtaggatgaaaagtttctataaaactgctttagatctttaaattcttattaatttttcagttgcaatgctagttaacatggtttattctgaaagagatactgatggttatagagaccagttttttggataaactaggatttacgtgattcagagatcagttttagcgagatctcttgattgctgtgtagacccttgtatgcagactgcagytggtctcttttcactttctgagaatgggatactactttacacataattggataagaatcaggaataatttatttgcatgtgtgaaaaatacacttaaacagcttaaatcaaaaggagactccactgacccgtgtaatcgaaaagtccattgggacacctggcttcgaaaaggctggatctactagtctcgtgatgtgatcaggtccaggtctttctctcttcaattctttgcttggtttccttgttgctgacttcattctaagcaagatctctcctgtggttctaagatgactaccagttactgtagagactacataccttctcaatgcataactcatgggaagaaagcatattagtcccagaattctcaagacatcagaactggattaaattacatgctcaccccaacccaatcactgtagccagagaaatgaaatgcaccaaatacttagcctagcttcaaaccccttcccaccactccacaatgcaatgccagtgaactacacaagtcatcaaatggaaatttatggcttttagagtggtgagaatggatactggagacataatcaactctacaatggaatcttagaaatagaatgagactttagaatcttcagccaaatgcttactgactgatcaaactttataaaacattaagcaaaaatggtcatttagtctctgaagataccactcatgccaatgaaccagctactaccttctgagactgtttgatttttgaactgttcagtttggcaaagcctgtcttatattgaacataaatttgcttcccattgtcctttattcatcggtgtttattttgccctttttagccacagaaagtaaattcaatccttccacattacagcttttctagtatatattaaaatattaatagttaagatagttatcctaagctgctttctccaggctcaatatcc

SEQ ID NO: 705441 - DNA, 3042 bp, Homo sapiens
atagtctcccaagctccatttttgtctagattagccaaaggtcaataccatttgtcttgtgcttttccttctttgtctacatttaaattggagtcattgaaagtttacagagacttcaagttcaagttcaagttcaaccaccataacaatcactgcagtagcaattctcaataccaagctcccaagctcccactgtgggccaaagcagggcactagatgctttagaaatgcactcttgtttaattctcaagtgtagaaaacctagcctgcctgacttaagcagtagggaatttattgggtcatgtaattaaacagttttttagacccagctccctctatccaggctcaaagaaggttatcataattggtatctatctttccactgctctccatacttggtccatggacccatttttatgtcccatgtagttatagtattgcacacaacagtgacacatcctctgtaagaccatacacagtggtgacaagccctgagcatcattccctgcagcacctctaatgtgcccttgcacttcctcgggggaacttgcttcagtgcagggtcttacccagcaagcctggagtagggcctcccacccactggagatccaggtttgtcacaagctcccaggtgatgcctgtgacccagaccacatttccaggagcaaagcactccagtgcccaaggccatacaattagcagatgacagatctgggacttgaacccagtctgattgattctacagtccaggtgcctcctaccactgcctccatctctgtgaacactgcccatgtctccctgagggaagtgctccttttcctcggagcccctttagcatcccgtatgtcttttacagtgcctgtgttccatgtcttagtctagttatttgggtaggccgtacaatgcactgcaagtattaccgttgctcactttttccccctttaacttctcaattagaatcctatgagaaggtgggactgttttccagaatgttgctttaatgaggtcagggtaaaatcccttcccctgcttctggtaacagtcttaccagccaactcttctgtggattcctgtctctggtcacaaaggaactgtcttagggaccaaccatggatggagagatctaatcacgcacctggtaaggacatctgtgctcctcctagttctcagccctatgcctggtactcttgggcaggacccagacaaggaaaaaggcatgaagagattggccctgcccacaacaatccacttagggagaccagaataacccacgtgaaaccgtggtgaacaagacaagacaacctgataataaaatgctaatttgaaggactagaagtgatgttggattcagaggcagaagagattcaagagagctggaataggcaagaaagattccacagaggagggacctgaattaagttttgagagggggaygggatttggagggggcagaggtcattttaggccaaggaaacaactcagacactgccttcttcatgtctaaaagacagaacacctctgtggcactgtttgtgttgggcacactgacgacatggcaggtaacctccaaagctgccaaagtgacttgatatttattcagactctaaaataaattggcctattacatcagttgtaaggaatcatatttggacagtgactagatttgaaggatctagttaagttatgttgccagttaaagaaatctcagcgttcattttctctacctttagtggaaaggatcagtccatcaataatatggacaggacttggctggatgctggggaacatggagcagcggggggtggagggaactaaaagggagtgttaagatacagagatgcatggatttgggggacctgtcaacagcagggagagatatctccttccccaaatgttggtgtgtgaggaaggtctaggctagttcacagtaactgggaacttttgcagggtttaaaggaagagaggtggaaactttgagacaaagaaggaggtcattgctgacaccaaagttggggtacacggaatggtgttggggaacggcacaggattgggacgtgaggccatcagcagagggcatgacctagagggaggttcccccactggtactgactgggctaacttctccatagagttctcaatggtctgggtgaaataagggaaagtatggtacggttttttcctaaatgcactcagcttatagccttgtatttttgaaaattgctgtttcttttatgaaacgatggggatagtggtccctcaaaaataaccttccttgacaaaattaaaagttagaaactccatacagccctcagataaaaaaaaaaaaaagtaagtgatctatacaatctaaaacctgggaaccaaccgctggtccaagaatacagagagaaaaggatggagaggaaggggccaactggcggcaaccttgtttattatttatgttatgtattcattcattcattcattcattcattcattcactcagcaaacacctactggcctggaagccttgcttaattatagctactgcagacttccgtggagactggtggtgagcagtgctggtctttgggaaggtgagtctcaggctgtgtttgtgctggtcttagaggagaaggcaaagtcaatgtcctgtgagaccctcctggagcctggcttatgttgattacaggggtctgccttcatgggtagtggtccccaggataagcagagggaagagggaggaggagaaccaggaaccagaacaaacctttcagcccctagggaacatccagattgaagagctgtaagggagaatcatgccagaggctcttttagtgcatttgggtccaacaattaatatttactgaacacctagcctgatcaggacgcagcactggatacagcctaggttactgaataaccacgcttatttcatcaaaataagtagtgtttaaagggccaaatgaaatcaaaaagtggtccaaagtcactactttctatttccaattgctttggggcatcagttattgagaagaatgcctgggtgaatttgaagtatca

SEQ ID NO: 705442 - DNA, 655 bp, Homo sapiens
atgtttttctgttaccaacatataaactttggctgtgggggtggtggggggtgaaataaggtttaattatttgcagacatctaaaatgaggagcagattttactaaaatttagggtgtcacttctgatttaagagtgatgtgaaaattgatgtaatgacatttaggatttgactctccctaactttggcccacttccgtgaggtggagactgcataacctctgtagcctgagacggttttcctgtctatagataggaattctctatgtggccagactataacccaacttaacaagtactggtttcctctaataggatctatttccagggcgaatgttcatcaccagggatagagagmcttttctaaagagtttaccacctatgtaaacaagggttgattttaacacatattctatttttgtttgtgtaatttttatatttttgtcatttttttcttaataagaaactgaagatttcaatttgaattctctataacagtctgcaattgcataacaatcgtgctgcttatctttagctcattttgtttcagtaagaatgaggctgcctcattaggtttgaggctaacattgcattacatcattagttttcctgttgtaccagaataagacattactaacctagacaagaatctccat

SEQ ID NO: 705443 - DNA, 930 bp, Homo sapiens
  misc_feature 834, 841, 850, 874, 883, 923: n = A,T,C or G
tgccttcatctcatgtgagtttctcctcctcttccatcccttataaggatgagggtcgttgggcttagggccccctgggatgatccgggatgacctcatctccagataacctctccatgacagctgcaaagacccttgctccaattctgagattctgagattctggttggacatcacatattggaggccaccattccacccactacacaaagaaaccctcccctccagaacccctttccctgtccgaccagccctttgcagctttcacaccccctgacaaatttggttctgttcccttattctaccccctgccctaggccgagatccctgaagcgggcccagctccgttcactgctcccccggcctcctgctgtttcccacacgcagccatggtacagggcagctcatcccaccacctccccaaccgcagcctccagggatgtacaccctgcctcaggggctstgcctgggccctggctggtggagggcacagccgtcagggaaggccctcagctgcaggatgccgtgcctcagagaccaaccaggccctcgaaggcactgtggccggcccagatgtcagcagctccagcaattaggctgggacagatggtgcctggtgacacaaggggactgtgggggccacaggggaccctgctcacctggacctaccgtggaggccagggagggagatggactcgaagggcggaagggcccagagaaggcacatttgcagagcagcggccgcatttccagagctcgggagcccaacaggaatcccgtctggccatgggaccaccgcccttggggctgggggatgcccgcaggggacggcanagggcanacaggccangaaaagggggggggcagagggcanacaggccangaaagagcgcctgcagtgcccaaggaagggaccaaaccangcccctg

SEQ ID NO: 705444 - DNA, 1622 bp, Homo sapiens
gatagagaaagatacacaaccaacattttttttatgtgagattttctactttaatttttttcacatggaaagtgcacataccggacatactagtttattccgcctctactgttatagttcctctagtaaatgattgattatagaacagctaacagcaaactggtatttttcttttgtcttttactacctattttatttttcgaagtttacttttgattctctctaagaatagtgtttctcttccatttccaagaactatgtagatgtaatgtgaaaatcaggacaatttmaaacgtctcttccttccttctctgctttgagctcttttttttttctttttttaaaatctgttttttttctttccttgtaccatttatgtttagccctttcacctccctagtactcattttctcattcccttttcccttggctctctctcagctttgcttgaaggtttttagtgggttccttgccattcatacccaattatcttagtgatagcagcactcccaggaattgaagtctcataagtggttgggatggaattgacaccacagccccacaaacaactctataactgtatggattttagtggtttctgtacaaacgttcagcaactgggcagaagctggtcatcatacaatgttgttaaagaaaaagaaagatacatgagaaggaaggtcatgttatttaaatctagattggttcattgccctctcactgatagaggggttaagcaacaaggtaaagataaataaatatctagggaaacgtgattatatacagaaaacattctgaatatgaaaggaaatagtttgtaatgtgaaaacacaatgggccacagacttaggaaagctagttgagaaaaaaatctctatttgtaaaggatctaatggatctcagaggaaaacctggcagagactggggcgtcagaattagtggctctttttcccagagttaaggctagttcaggataaaagtctacaagagaaaagtttgctctctataataccatttcatcaataacattgtgttacagcctagatcccccaggtatcacattatagcaagaatacaatatagaaaaggttaaaggattaaactagacgtcctttctcccttccttctgcaaaattcatggaatcatatggacctggaaatcattgatttcaacctcaccctcaaagcaggaaacccttagacaatatttttaacaggtggtcatccagtttctgcttcattacttcccgtgccagagaagtgagtcactgccttgcaaagcagtaattctacatttaacatccttttaaagacaaatactatcccataaagagctgacagtcatgcatcactcgctaggtaccaggtgaaggcctcagtgctttactgggtgtgttattttggaagttcccagatgaccccctgcaacaggcttgtggcttagagtggttaggtagccagacttgcagaagggacagagtctggatttgggcccagtctttttgactccagacgaggccttcacatcacgctgaatcacacttgcctccctgtagcttccacacgttcactctggtctggatcccagaggacaaagcaaaactcccgttcttccacttcaa

SEQ ID NO: 705445 - DNA, 1622 bp, Homo sapiens
gatagagaaagatacacaaccaacattttttttatgtgagattttctactttaatttttttcacatggaaagtgcacataccggacatactagtttattccgcctctactgttatagttcctctagtaaatgattgattatagaacagctaacagcaaactggtatttttcttttgtcttttactacctattttatttttcgaagtttacttttgattctctctaagaatagtgtttctcttccatttccaagaactatgtagatgtaatgtgaaaatcaggacaatttaaaacgtctcttccttccttctctgcttkgagctcttttttttttctttttttaaaatctgttttttttctttccttgtaccatttatgtttagccctttcacctccctagtactcattttctcattcccttttcccttggctctctctcagctttgcttgaaggtttttagtgggttccttgccattcatacccaattatcttagtgatagcagcactcccaggaattgaagtctcataagtggttgggatggaattgacaccacagccccacaaacaactctataactgtatggattttagtggtttctgtacaaacgttcagcaactgggcagaagctggtcatcatacaatgttgttaaagaaaaagaaagatacatgagaaggaaggtcatgttatttaaatctagattggttcattgccctctcactgatagaggggttaagcaacaaggtaaagataaataaatatctagggaaacgtgattatatacagaaaacattctgaatatgaaaggaaatagtttgtaatgtgaaaacacaatgggccacagacttaggaaagctagttgagaaaaaaatctctatttgtaaaggatctaatggatctcagaggaaaacctggcagagactggggcgtcagaattagtggctctttttcccagagttaaggctagttcaggataaaagtctacaagagaaaagtttgctctctataataccatttcatcaataacattgtgttacagcctagatcccccaggtatcacattatagcaagaatacaatatagaaaaggttaaaggattaaactagacgtcctttctcccttccttctgcaaaattcatggaatcatatggacctggaaatcattgatttcaacctcaccctcaaagcaggaaacccttagacaatatttttaacaggtggtcatccagtttctgcttcattacttcccgtgccagagaagtgagtcactgccttgcaaagcagtaattctacatttaacatccttttaaagacaaatactatcccataaagagctgacagtcatgcatcactcgctaggtaccaggtgaaggcctcagtgctttactgggtgtgttattttggaagttcccagatgaccccctgcaacaggcttgtggcttagagtggttaggtagccagacttgcagaagggacagagtctggatttgggcccagtctttttgactccagacgaggccttcacatcacgctgaatcacacttgcctccctgtagcttccacacgttcactctggtctggatcccagaggacaaagcaaaactcccgttcttccacttcaa

SEQ ID NO: 705446 - DNA, 1622 bp, Homo sapiens
gatagagaaagatacacaaccaacattttttttatgtgagattttctactttaatttttttcacatggaaagtgcacataccggacatactagtttattccgcctctactgttatagttcctctagtaaatgattgattatagaacagctaacagcaaactggtatttttcttttgtcttttactacctattttatttttcgaagtttacttttgattctctctaagaatagtgtttctcttccatttccaagaactatgtagatgtaatgtgaaaatcaggacaatttaaaacgtctcttccttccttctctgctttgagctcttttttttttctttttttaaaatctgttttttttctttccttgtaccatttatgtttagccctttcacctccctagtactcattttctcattcccttttcccttggctctctctcagctttgcttgaaggtttttagtgggttccttgccattmatacccaattatcttagtgatagcagcactcccaggaattgaagtctcataagtggttgggatggaattgacaccacagccccacaaacaactctataactgtatggattttagtggtttctgtacaaacgttcagcaactgggcagaagctggtcatcatacaatgttgttaaagaaaaagaaagatacatgagaaggaaggtcatgttatttaaatctagattggttcattgccctctcactgatagaggggttaagcaacaaggtaaagataaataaatatctagggaaacgtgattatatacagaaaacattctgaatatgaaaggaaatagtttgtaatgtgaaaacacaatgggccacagacttaggaaagctagttgagaaaaaaatctctatttgtaaaggatctaatggatctcagaggaaaacctggcagagactggggcgtcagaattagtggctctttttcccagagttaaggctagttcaggataaaagtctacaagagaaaagtttgctctctataataccatttcatcaataacattgtgttacagcctagatcccccaggtatcacattatagcaagaatacaatatagaaaaggttaaaggattaaactagacgtcctttctcccttccttctgcaaaattcatggaatcatatggacctggaaatcattgatttcaacctcaccctcaaagcaggaaacccttagacaatatttttaacaggtggtcatccagtttctgcttcattacttcccgtgccagagaagtgagtcactgccttgcaaagcagtaattctacatttaacatccttttaaagacaaatactatcccataaagagctgacagtcatgcatcactcgctaggtaccaggtgaaggcctcagtgctttactgggtgtgttattttggaagttcccagatgaccccctgcaacaggcttgtggcttagagtggttaggtagccagacttgcagaagggacagagtctggatttgggcccagtctttttgactccagacgaggccttcacatcacgctgaatcacacttgcctccctgtagcttccacacgttcactctggtctggatcccagaggacaaagcaaaactcccgttcttccacttcaa

SEQ ID NO: 705447 - DNA, 1738 bp, Homo sapiens
tctctcccgcttgctacactgcaattgaagtgtggctgttcattataagtttcaaatgctaactctacacatttgatgaatctagggatttgaatagatattatagcaaactggcatgttcttataaaagacagaattcacaatttcttgccctttctttactcaaaggataaactttattactgtgttatcaccaccaactaaagttgatttaagagatatgatgcttcttttaaagacatgattttcataataagtgaagcaagggagacctctagcagcatctgctcatgatgaaatcttaaatcaatgatttggcttcattcccaactaacaggtatatctgcatggattattattattattattagctaccaagaaaagaaagtattacacaaggggcactcaccctgacatttccaaatattcataaaatgatacaatattttcaaaaatacaggagtaatgtttcacttattcaccctgcgatgcccagtcaattcmatgaatgaagtcacaggtggtgataaagcacaatgtgagtgttagtcaggataaaataatacttggctgagaaccacaatcccaaaagccaaaatccctgaccacttgctttcttctgacacagacttgcaaaagagacttttagaaaggttatataaaacaaaaatctccctatttttagagtaaggcctagcaccttgatttagtcaacaatcattaagcagccactgagtgcagttggcagaaatgtgttgagtggtttttggatcctgaatgcagactctctagattgacatactaaaggaaggcaacccaaggcaaaagacatcaaggagaaaaaatgcagtgaaatacacggaagtatcaatcatatctattccccaaactttccttagtatgaagtttcttctcaaacagtaaagggcagcctgatatcctcttatattattgctcaagtggatggtacagagatactgcaaagagagatgaagaatgatagattttcagagaaattgtgccgaatatttatcattcactgaatctgacctgtatttgagaaaaaatgaataacagaagggagaagaaggaactttatactcttcctagaagccaaattttccacatttattgttattaatttttatctattgggcttaaaattcagactgttttaaaccaagagtatagctgtgcccatgaaggaggaaacttgagtgtcaagtatcttacctaaacctcgagtttttctttttttttcctccttcttctcattgatgtaacatgcatttttacttcaaacaatggcatatatgttttagccacagatgactcagaaatcgaaagttagaagacaatcgttagttttctccaagaacacaaagctctagaacaaaattttaatcttctagctcccatcttgattaatgcgaaggcatttgtctatccaagctcactgtgtaaaggtcatgtgatgtatgccatataacatcacaatgctagcaatatgaagtacttcaaatttatttctactccattaactttaacagtgagaacctttcacattttcaagtgaaactattgattccacagtgaaattaatgttccacaatacatatataaaagcatttctgccactcaattttcttatcctgttccaggcaagccaaaaatctttcactcgggtgcctgtttggagtctccttctctcaatcagtggattctaccatcttttcca

SEQ ID NO: 705448 - DNA, 1730 bp, Homo sapiens
cgcctgactcggcctgccaaagtgctgggattagatggatgagccactgtgcctggcctacattttaaaatgtgaaatatctatcataaaggcagagcacctggtttctgcatcttaattaaaaagaagagatttagctcagactgactctaaatcaacaggctttggattataaaatactttcattgagatacaagctattaatacttgctattgtgactagtcaatactgaattaaagctttgcatgtaatatacatttaaatatattatatgtaaacatatctacttcaaatgcatatggaactgtctttgtgcaagcataatgcaattgactctgtataaagcatcaagtggatacttcaaaaggcttttctgtgaaaattggtttgtgtaaattccttcattatgtcttaccccactgctgtctatgcacttataaaagcaatacacatttagaaaaatgtaaagtttcagtcctatgtaacttctgccatctgatattgctaattgatatttcaacctgctgcttcaaactatttgtgaaatatttktatgccatcattatgcatacacatctattcaaaccatggtatatttttaacttacttttttttagttggatgaaacaggataaaagtttaccatttctttgcattaaatctctttttaaatttaatgaaaatgaatattgataatgctaagaaaaaatattctgtgcttggtatctcttttatttgtatcaaatgcttattgtccaaaagtttagtatactttaggcttttgatttgtgactttgaaccagaagtaatatgataaaactagttaataatattataaacatttctggttgcatgatatattttacatgtgttcagcattgtatgcaaatatgtgttttcacatttactttcacttacatttctacatgcatttctcattagcagtctgtgtgctaagtaaggcaagagttaacatttccaaattaattaacaataggctgaagttcagaattatcaagtcacttcttttggccatgcacaggaaacagagaaggcacaattaggaactctaagctcctttctccctacccaaaatctttctatcacactcgattatggtgttttaaaaattttagtcatttacaattaattaacaaatacttaaagtccatgaaaagcataaaggtagtactttgcctatgtttgaaatgagtgatagcataccttccctccatctggctggcccccactttttgtccagatgaacttaaaatgggaacacgttttcacatcacctctacttacttatccatgactttggtgtttcctggatcacacacatctttgtttgtgggcaactctacatctggaagctcggggagttgggcagctggcatgaagtaagtgcacacaaaaacgtccatggctgttttttcttgacaacagtcttcaaacttagaattctttgtggataaattgtcacagagttttactgtgtgttcaggcagctacaaaacgaatggttagtttgtgcattgttagtttcctgatagtctaattaaaaataagaattacataggcttacaagctttggcatcacatttatgaaagtcagtatgaagactctcagaaagaaaattggtacaatatttggaaaggcagtttgtcaatatgtactaaaagtcttaaaaatgtacaattctatttttaagaatttatactcagaaaa

SEQ ID NO: 705449 - DNA, 604 bp, Homo sapiens
accagtccttctgccttatctggcattcttagaagtaccaagtggaaatgtagaagggcctctgatgtccatcagcacccttaaagccacaatatatacgtatgacacataaaacctaagtaaaaacaatgtgtttgctatatatataagtgaattttcaagtcaagtatttctgtcttctcttccaattcatttcccacctttaagctatccttcaacagtccctattggatgttgtaaaatttaaaaattaatttcctaccacagtctacaaggactgatctcccccatctattactgaaaccccctccttcatgcttattaggcttaggcatactgaccatcgagttccttaaaatataccacataccttagtgcctttttgaacgttgyttcttctcccagaattttcttcctttaggtgttcactaaactgttaccacctcattgaggtctttatctgagaagatatgtcagttagttattagtgtaatagtgtgtatatcaataacaaaatttctgtggtatgcaattctaaacatctatttaggccaaatgtgtgagcattggttgggggcctgatggtaaggatagacttcactca

SEQ ID NO: 705450 - DNA, 2804 bp, Homo sapiens
aaaaaaattaacctttaaaagatgaaaagtttaaaattaaaaaaattaagatatgtaagcacagatatcaagaatattgttatgttttcaacattctaataggttttctccctatattttaaagtgtggtattgtgttagtacctattattatatttttgcatgtttgagtttaatgaattgagatataatcagtttttttttattctgttgattcatacattattctgttgatttatacattgtcaagtacacatggaacggtttctggtaatcctgaacaagaacattgattttatccatgctgtaggtaggccatagatgtttaagccccaagcgaatcttggtagactagcagaacatcatattagattctcgtgtattcaaagcagaggcataaatcatgatattacaagggggtatcagttgacttattgctgttttgtgaccataggtaggttggattgctgtttaaagccatgtcagtggttctcaaatcagtcaggcatgaagccttgtcatatgcctctataattgtacctcaccagactttctctaactattcagctggggctgtgcattttgtctcaaacacccggctggccagcatctgacaggagctttctcatcatcctgtcagtaatatgttaactagagtgtatctttgtggcctgtagaagcaggtggaagggatgcttcttttaaaagcagatgtctgaatgttagctattattttgaccattatttagttagtaaattcaccctcagaaagtctataagcatattagttacagagatttgattgtgtagtgcatgttgttttggggatatttagagcaagcaatatgttatgagtactggaattacgttaataaactgtaatttcttcctttgttatagttgcccccaggcatttaagcatatgcttttctctcctctcattaattccatcaagggcatatgtaaaaagaaatctttcgatctctggaaaatcagctattaaatatagattttacaggtttagtcagactgaaaggcagtccagaggattttaacctcttcatctggattatacatattcttgatttgtctcttaatggagccacctgtgtcagcatttaatctgaaacccgaagtgcagagactctttctggagatgaggaattgaacatttggtgagagaacaaagattacgtagtcctgcttcctagttaaggttattaaagtgtatttttgtgcctcatgtttttaaagctgcagcagagtggtgcagttaaaaattgttatcatctctcagggaaagattctagaagcaatttttagatttttaattcttccccaaacccgtaagcaaccagttatgtcatctgaaactgaataattctacttaccagtttatcatttcaccggtacacagctattctgaacattgtatttttagtcagtgctaagtgaatatgactggagtggggaaatggtactgttgaggtcatcaggaagcagtttattggaagggatgtgtgaaggttatttggaggagacttctgttacaggaaaactagaggtgtttttatcttccaactcctgtagtgataatggctctgtttttcatgaaaataaacacgtatttctgccttatgatttagtccatttgtgttctaaaagtaaataattggcttttaattcacaatgaagaattttttaatttaacaattatggaattatcaaagagttgttattaacttgtcattcccctaggctctgtaagctttgttcctgtatgatatccacagaaatgaccttggatgatttcagtttaccaagcatttttttttcttttttcttatccttatagcttacagacagtgataatgttagtattttttatatggaacagtgacaattttgtgctgatagtgtaatcaacattaaataaaagaaaataatgtatgtgttggttttgtttctttaataaaactattgagggcagtgtgtttattttaaaatgtaccttctatatttatatgttttcacatactataattttttttttcattttacagttaggcaagtttttctcttccagtgagctttcttatagtgcagtttagctcattgttgacatcccattcaataccgccaaaatgsaactcgccatcttttccccatagtctccttctcctactataaagggctaatttggtgaatcactcctccctctcatctgttttccccacctacatcctataggttctacctccttaatcttttcttctccgattcctgttcttcaactgcccactgtcttagttcagcagttactacttcccacagatattattttcagatcatatatactgaattcacttacataaaatgatgatgttattaataattatagccaatatataatatagggcatgctttgcgctacttaccctactgagaaatttatttaaactaactcatttaattattatgtattatgtggtaggtacagttgttatccacggtagacagatgaaaatgtggattttgaaattgagagggagtaagttgatcaaggccatagtactaggaattggtttaaccagttctgtatgattccaaagtatatgcttacaacctttatgcaattttgcctcttacaatgaccatcttataaaaccaaatgcatccttaccttctgccccaatatagtatcccttcccttaaggaacctctgtttattatttgaattacttacagtgaagtgacttttttcctcgtctttgcaggtctagtcgattatctctcaatgtgtca

SEQ ID NO: 705451 - DNA, 1482 bp, Homo sapiens
tagtttcaagatgtaaaaatcctacatagtcagacaacctgctttggctatatcatcagaaatggcttaaaagcaaaaatgacattccagttattccacacacaaatccctgatgttaacatccctagcctaaaaatagccatttggaaggaaagccctatttcaaagcaaaggaaatgtgagtaagacaatatctggtcctggraatgtcagactcaaaattgagttctttagatgggaatcgattctaaaataacatctctgatttgttatataacaaaacacaatggctttataaactttatataaacattatcaatttctgatggttttctcttaaaagggtagctctgaagtaattattctctctttaaactgtatttactgagccgctgacttttttctgatttcattcattcattttccccatttcccctccccattcccagtctagactaatgaacacaatatttgagaaatcaaaaacttaggcaaagatcttttacttgtggttaggcttacaccattccaaaaagtaaatataattaacaaaacacttaaaagtaccagaggaggtgccccggtatcagtagaaggcactaatcagaccacagaagaaagcttgacaaggatcttcatatacggatgccagcttcaatcatgtcaaatgaacatgttgttctctcagtggtaacagttagtaggccagagcagaactggagactcttttccactggtgtaggcagccagggctctccaggagtactattatagatgacatgaaggtgactaccacggtagcaatgacaacaatcccagttacaatgactgaacaaagctaaggccatcagtataggcttgaagcgatctagaaatccttctggagcctctcatcagctgatcatccctgatacatcccttggatggccacagaatccattttcacaaaactgaatccaatgcattgtgttatcactgcaacacgtgaggtctggtagttgctaatttggaaaaatggtaaatactaatactattgcaaatagtcaatctatgctacaagaaaaacatattaacacacacaggtacttttggtggtatggctttaaattctgtgctgggctataaaaagcattataagcaaagttaatgagtaacagtttttattaaaaagaaaaaaaagaagtaatttaccaaaattagtttaagacatattaaattttatgcaaatacctttacaaaaactgaattatataattagagtgctttttatacattaatactgaatatgttacattactatatattaaagatataatttgaaaactagagctgtttcaaaatactgtgttcaaatgtcattctttgggaacccagagaaattgcctgatcaccatgctgtccttccacaaggggtttctctcctgagtcaggagagagtcattaagtaacatttaaaaaaaaaaaaaaaacaagagtaaaaca

SEQ ID NO: 705452 - DNA, 1482 bp, Homo sapiens
tagtttcaagatgtaaaaatcctacatagtcagacaacctgctttggctatatcatcagaaatggcttaaaagcaaaaatgacattccagttattccacacacaaatccctgatgttaacatccctagcctaaaaatagccatttggaaggaaagccctatttcaaagcaaaggaaatgtgagtaagacaatatctggtcctggaaatgtcagactcaaaattgagttctttagatgggaatcgattctaaaataacatmtctgatttgttatataacaaaacacaatggctttataaactttatataaacattatcaatttctgatggttttctcttaaaagggtagctctgaagtaattattctctctttaaactgtatttactgagccgctgacttttttctgatttcattcattcattttccccatttcccctccccattcccagtctagactaatgaacacaatatttgagaaatcaaaaacttaggcaaagatcttttacttgtggttaggcttacaccattccaaaaagtaaatataattaacaaaacacttaaaagtaccagaggaggtgccccggtatcagtagaaggcactaatcagaccacagaagaaagcttgacaaggatcttcatatacggatgccagcttcaatcatgtcaaatgaacatgttgttctctcagtggtaacagttagtaggccagagcagaactggagactcttttccactggtgtaggcagccagggctctccaggagtactattatagatgacatgaaggtgactaccacggtagcaatgacaacaatcccagttacaatgactgaacaaagctaaggccatcagtataggcttgaagcgatctagaaatccttctggagcctctcatcagctgatcatccctgatacatcccttggatggccacagaatccattttcacaaaactgaatccaatgcattgtgttatcactgcaacacgtgaggtctggtagttgctaatttggaaaaatggtaaatactaatactattgcaaatagtcaatctatgctacaagaaaaacatattaacacacacaggtacttttggtggtatggctttaaattctgtgctgggctataaaaagcattataagcaaagttaatgagtaacagtttttattaaaaagaaaaaaaagaagtaatttaccaaaattagtttaagacatattaaattttatgcaaatacctttacaaaaactgaattatataattagagtgctttttatacattaatactgaatatgttacattactatatattaaagatataatttgaaaactagagctgtttcaaaatactgtgttcaaatgtcattctttgggaacccagagaaattgcctgatcaccatgctgtccttccacaaggggtttctctcctgagtcaggagagagtcattaagtaacatttaaaaaaaaaaaaaaaacaagagtaaaaca

SEQ ID NO: 705453 - DNA, 1482 bp, Homo sapiens
tagtttcaagatgtaaaaatcctacatagtcagacaacctgctttggctatatcatcagaaatggcttaaaagcaaaaatgacattccagttattccacacacaaatccctgatgttaacatccctagcctaaaaatagccatttggaaggaaagccctatttcaaagcaaaggaaatgtgagtaagacaatatctggtcctggaaatgtcagactcaaaattgagttctttagatgggaatcgattctaaaataacatctctgatttgttatayaacaaaacacaatggctttataaactttatataaacattatcaatttctgatggttttctcttaaaagggtagctctgaagtaattattctctctttaaactgtatttactgagccgctgacttttttctgatttcattcattcattttccccatttcccctccccattcccagtctagactaatgaacacaatatttgagaaatcaaaaacttaggcaaagatcttttacttgtggttaggcttacaccattccaaaaagtaaatataattaacaaaacacttaaaagtaccagaggaggtgccccggtatcagtagaaggcactaatcagaccacagaagaaagcttgacaaggatcttcatatacggatgccagcttcaatcatgtcaaatgaacatgttgttctctcagtggtaacagttagtaggccagagcagaactggagactcttttccactggtgtaggcagccagggctctccaggagtactattatagatgacatgaaggtgactaccacggtagcaatgacaacaatcccagttacaatgactgaacaaagctaaggccatcagtataggcttgaagcgatctagaaatccttctggagcctctcatcagctgatcatccctgatacatcccttggatggccacagaatccattttcacaaaactgaatccaatgcattgtgttatcactgcaacacgtgaggtctggtagttgctaatttggaaaaatggtaaatactaatactattgcaaatagtcaatctatgctacaagaaaaacatattaacacacacaggtacttttggtggtatggctttaaattctgtgctgggctataaaaagcattataagcaaagttaatgagtaacagtttttattaaaaagaaaaaaaagaagtaatttaccaaaattagtttaagacatattaaattttatgcaaatacctttacaaaaactgaattatataattagagtgctttttatacattaatactgaatatgttacattactatatattaaagatataatttgaaaactagagctgtttcaaaatactgtgttcaaatgtcattctttgggaacccagagaaattgcctgatcaccatgctgtccttccacaaggggtttctctcctgagtcaggagagagtcattaagtaacatttaaaaaaaaaaaaaaaacaagagtaaaaca

SEQ ID NO: 705454 - DNA, 753 bp, Homo sapiens
caattaaaaaaaacctaaaaaacaaaaattccatcctccagaggattttaacaggattgagagtctcacaatgtaatattcagaaagtccaaaattagttgatagaccagaaaccaggaaaccctaaaccagttctcaagggaaaagacaatcaacagatgctaaccctgagatgacccagatgttggaattatcagactttaatggggccattataaccataccccatgaggtaaaggtattaaaatgagtgaagagataaaaattcttagcagagaaatagaaactataaaaaggaaccaaacaaaatattataactgaaacatattatacatatatgtattttaagatcactgaatgagtttaatagcagaatagaacctatgggacaaaaacaaacaaacaaaaaaatcaaaactctaacctttctgtcattggaatacctgaataggaagagtaagagatsgatacagaaaaaatattttttgaaataatggctggaaagtttccaaacttaatggagaaaaatccatacatattcaggttcaagaggtttggtaaagcccaaagaagataaatttttaaaaaacccatgcccagacacaacctaacaaaaattctgcaagccaaaaacaaagagaaattgttaaagtagtcagaaaaatgatacatgttacctaagaacaaacaacagttcaaataactgtgaatatttcatcagaaaccatagatgctagaagaaacactgggaca

SEQ ID NO: 705455 - DNA, 647 bp, Homo sapiens
ctgaatagctgggattacaggcacatgccaccacacccggctaatttttgtatttttagtagagacagggtttcatcatattggtcaggctggtctcraactcctgacctcaggtgatctacccgcctgggcctcccaaagtactggggttacaggcatgagccaccgcgcccggccttgagcaactttctgtttacacatgaaatatcagtctgaggagcctggcctaaagacatctgcattgagagcctataaccttaacaatctgcgaaaccatatttgaaaaacccctcttccccttccagcacacgtatacccactgcagttctcatgtcaggacaaactgctttataaagaatcaaagcagaatgatgaacaaaacaaaattaaaatctctagtgggatctctgtcctgttcgtattgccaaaatcacataaatgcagaactcatgatatctaaacagccattgccacaaattatacactagatacctataattatacattgaaaggtaagcttgtgaatgtctttgtttttgtagaaacatgctatcacagctttagcgagagtcacatgtctcatccataaattcagtccacagatatatttaatttgggcacaatgttttttaaaaacccaattttaa

SEQ ID NO: 705456 - DNA, 682 bp, Homo sapiens
ttttactacctatttagaatttccaatgctcttcatttattaccttatgtctgaatttccatattgttttatcattttcataggttttccttagcattttcatagattagatacgctggcaacacaatttgcctttatgtttacaagattttttactggacatagatttgtacattgacaggttttttgaaatcactgtatcaccagcatctggcacgattcctgacacacatagtgaagtcattccttaaacacaagatacatcctaaaatcaacatgtaaaatgaaaatcatctggtcaaatgactttgcgtaatgccttaggaaggtgcgacattgaagaatgacattcttttctcagaacgttcagcactgccagcttctcctccagtgcaggagcagatgactgggttgttccttttgtttgacccgcagattaagtaactggcttgcactcgtggctgaccacactacatgcaaaatatgtatctaaacaaaagaatgacgttcagcaaagtgaggtgttcacactatgaratgaaagaacaaattcgtgcctttcatctcacactcaacccagggtatatattaactgaatataatggtgggataatttgcctgtactatttaaacaattttctcctagtgtgtatagctgaattcatgtaaatgaaatatgtcc

SEQ ID NO: 705457 - DNA, 1886 bp, Homo sapiens
tacagggaggcagttagagcagcttccctggatacaaaagcttctttctaccccttggagatgaggtttccaggcaggttatttttatagcagggctcaggcaggattcttcagagaaaataaacaaagtcatacacaccagtccttcacacccttcagccccttccctggagaggggcccagcctagctgtgccgacacagggacgcccaccaccccagaggggctgtgggggctgctgccgggatatcaagaggccaggggtctgggatgggggagggggcgccaaggagggagactgacacaggtcccctgcagccccagtcaggccaggaggagatggctggaaccttggggtccctgcctcaccactggggccagagtcttgggtccggcatctgtaggggagagtcagattcaaatgcaggcgtaacccaaattttctaaatgcttaccaagtgccaggcactgtgcttgcaatttacaaacacattttacttattcctcatcactgaattcactgaattcagtagaagtcatttctacaagttgccacttagtattggcctctatgtgcctggcactctgttaggtgctagggagacaagattaaatgacacatggagagagagagagctcagagagctttccagctggtgagacattgattgaatcccttactatgaagatttcaaggtggatatttttatgctcattttgcagatgagaaaagagacttagtgaggtcaagtgacttgtccagggaagcttggacctttgatgtcaagggcataagggatcagggactcagagatctcttggggcaggtttcttgggggtagaaatgtcagctaagagggtgtagagggcaagaagcctgagatgggataggagaacaaggtacaaatccacgtgcagttttcctggggtcttgggccattccagacctagggtggagcacacgtggtccctcattcttgagggcaggcagtcaacaatatcttgtctaacagatcccagaaaggaaggcctttcataaccagattggctgcagtcttctcaaagctcttttatgaggaagcctcaggttaaaaaaaacttcataaatcatgtgcattccccgtcaggcatgacaaaaatacatgacccttgtgggtccctgcccagtgaaggcaaacagctcactgaggcaacgctgggagtgcacacaggcctgccactgtcctccacctccctcagccgagcatgttccccagctcagggcagcccccatcatccttgacaggccagggaattccagataccagacaatcattctaatgacccttcaggagtgagtttcagtgtgctgccttagcctccacaggcattcggccttttttttttttcttttgaggtggagtctcgctctgtcaccaggctggagtgcagyggcgcgatctcggctcaccgcaacctctgcctcccgggttcaagcaattctcctgcctcagcctcctgagtacctgggactacaggcacacgtcaccacgcccagctaatttttgtatttttagtagagacggggtttcaccatgttgcccaggatggtctccatctcttgacctcatgatctgcttgcctcagcttcccaaagtgctgggattacaggcgtgagccaccacgcccggcctcattcagcctttttatgactaattctggaatgaaggaatgtgtctgtttcagaagttccaagtatcaataggtagagttctagtgaattcccagagtctggggagccccaaaataacatattctagtgtctacgtttgcttgtctttaaaagggagctaataatactcacgtcttggggtacgaagagtttgcagacaggcagtgccgagccca

SEQ ID NO: 705458 - DNA, 2863 bp, Homo sapiens
tgggtttgcattgtagagaacagatcaagtgtgtcagaaaagtaggcactggctagggaggaggaaatcattaactatttcaggccactaatatgaaatggtattcactgaagaaataaaatagcaaattacatttataaagaattaatgttcctttaaaaatatctggccatttgattatttgcctcagagaaaatgacccccctccccaggtttgtaaatttaagagtgctagtgagcttgaaagagccttatgatgtttactttttctctcctttaccaaagagaaaagggacttacttgggaagataatatcatcactttttgatttttttgatgccatgtcatcttattgatgttttaaaagacttggaacaacatgaagcactttaatggagagataaatattttttaaacaagttattattttttctttggccttttatctgttgtactacttagtgtaaatacaatttaaaaatcataagttgaaattttttaatttagatttagttctccttaagaaattcaacaagaaggaaatataaactctaaatagacctttcttatacataggccatactgcggtgtgtktattttctataaaataaatgtcacttttagcttctgttaacccacatcattccagaacatttcctaatgattctttttaaaaaacatttttttgttctgtaaatctattactgtgaaagtagttccttcctggcttcctgctgtgtttctctgctattgcattattggtacttactgtgtcacaatgatctgtctttacaaattaattttgtctttttcttctgaattttttcaatgctcttgattttttttcaatttatactaacattttaattatcaattcctttctaaagaggcattcatactgtttgcaaaatttaattacagtgccttccttccttaatacattaaacctataagtcttcttagatttttgtattttctgttagctcaaattaataagggagaatgaaaacattcttacattgatctaaattattttcctcttcttttctattttttgagcagcaaattgaacattatttatttttatcatatttgagattcttgactataaaaacatgtccttctacctctcctaatataagggtagtctatagttttaagaaagtatacacttacatatcccacatttatttgtcttctctgtgtccatttattcagccagacatctattgagtgcctatcacaggttggacactgtgttaggttatgtttatttgttattgtttctttacaagagcaacttaaaaaattatctttctaatgccgctcacaaaaaatatattgaaactaactctcttactctgatctcaacgatatctcttacataggtaattgaactgtagtgtatttatgaaataatagacaggacaaccaaataaacactagtagttctgataattctaaaactatccagtgaaattgtctatgtgtttgtttatgtgtacaaatcatcaagatttgtgaaaaaaaactacagaaaacttgattatctttactggcaataatttagttttaaatggcagactgagaacaagtgaatgtaagctgtaacttaatatcatttagttatgcaccaacttggtcaaatcattaattttatctaacatcaaaaagaaaagctggatgcatgaaaaattcttgatagatatgttaaaattatttcatttactgaaaattaactcttttcaaataaagtttagtttttagatctttatagattatgagaaaagaatcaggagaaagaggaaagaaataaaaaatggaagtctaaaccaatttctggttcggtttagtctccttcactgaacaaatatttacaaaacacctgctctgagccaagcagaatgctggggatgcaggaggactcacttgaatcatgagtgatgatattgccttactttatgctagatttaagtttgggatgccctatggaaatactatgaaactatgttgttagctaaatagcatgaaataccttgtagaaaatgcaagtgaaaaagaacctgggaaagaaggttcactttcaaagacaaactattaagaatatcagtgactgcaggttagacagtaattgtagacaattaagagaagacagaacttctgattagaagagtgattggcaagagagttggccaggcagaaaggtgatgagacctttaggtgggaggcaggagcagagcttggtgtttcttttgtatagtgccccatctctgggttttaggaagcatactatcaaatgtttaaataatgctccaaaagttaggtaactcctcaaggttacgcagccttcaagtggtggtgcctggacttaaacctctaactctgtagctagtgatcttaggaaggtctgcattttagaatttttctgctgaaacaatagaattcccatagctattacaagttcaagtatgagaaggaatgaaaaagaaatactgcctgaagatttccttcatcagagaaacatagggattgaggaataccaagtggtcttgaggatatgcattgcagaccagttcatttatgatttatttattcattcaacaaacactgatttgacatcctccacataccatgagccctgcttctcacacctggcatgggtcttgagagccactctggcaccatgttgcattttattgggttctccaaagtgaaacctatttataggttcatccttgtatccaaccaccaaagttcagataataatttgcctcttgatttgcagccaggggctttccagttagtgagaggggttgatataagggagagtgaagaaccaaaagaggtaatttgtcttcatttc

SEQ ID NO: 705459 - DNA, 714 bp, Homo sapiens
gcatagttttgtttttctgtctctgacatttactaatcctttaatcacacaacatttgttcaacttctcagagtatatttcctcaccacgagagattgaggattaacctgatgagtggatctataagtagcacaatccagttcctggattatatcagaaagtgaataaatggcatttcttggtgtattattttcatttttcttcttttcatttaatgaatgactttttaagagccataggctacacacttcaggagttkaaagacaattcatccatgtctactatcctggaagagtccggagtcccagggtaacaagtggacgtgccaacagaaaggtgtgatgatggaagctatacaggtagactggacacagtgcagtgacatctccactaattttctttttaaagaagaaaatacttaacttgtgaacaaaaaaggaaaagttccatgccagagggacaggtcagaggaagatcatggtacactggaataaaagcagttcggtacagtgaatttctaaaacccaaaccaaggtggggagggacagacaggtgcaggcaagtcatggaggcctgcatagccatcccaggagagcaggcccatgaactcacaatactttttattgaggaaatcattttgataggaatcttttcaaacatattttccccaacatattttttatttattcattaaaaaatttaaaccattttatt

SEQ ID NO: 705460 - DNA, 714 bp, Homo sapiens
gcatagttttgtttttctgtctctgacatttactaatcctttaatcacacaacatttgttcaacttctcagagtatatttcctcaccacgagagattgaggattaacctgatgagtggatctataagtagcacaatccagttcctggattatatcagaaagtgaataaatggcatttcttggtgtattattttcatttttcttcttttcatttaatgaatgactttttaagagccataggctacacacttcaggagtttaaagacaattcatccatgtcyactatcctggaagagtccggagtcccagggtaacaagtggacgtgccaacagaaaggtgtgatgatggaagctatacaggtagactggacacagtgcagtgacatctccactaattttctttttaaagaagaaaatacttaacttgtgaacaaaaaaggaaaagttccatgccagagggacaggtcagaggaagatcatggtacactggaataaaagcagttcggtacagtgaatttctaaaacccaaaccaaggtggggagggacagacaggtgcaggcaagtcatggaggcctgcatagccatcccaggagagcaggcccatgaactcacaatactttttattgaggaaatcattttgataggaatcttttcaaacatattttccccaacatattttttatttattcattaaaaaatttaaaccattttatt

SEQ ID NO: 705461 - DNA, 714 bp, Homo sapiens
gcatagttttgtttttctgtctctgacatttactaatcctttaatcacacaacatttgttcaacttctcagagtatatttcctcaccacgagagattgaggattaacctgatgagtggatctataagtagcacaatccagttcctggattatatcagaaagtgaataaatggcatttcttggtgtattattttcatttttcttcttttcatttaatgaatgactttttaagagccataggctacacacttcaggagtttaaagacaattcatccatgtctactatcctggaagagtccggagtcccagggtaacaagtggacgtgccaacagaaaggtgtgatgatggaagcyatacaggtagactggacacagtgcagtgacatctccactaattttctttttaaagaagaaaatacttaacttgtgaacaaaaaaggaaaagttccatgccagagggacaggtcagaggaagatcatggtacactggaataaaagcagttcggtacagtgaatttctaaaacccaaaccaaggtggggagggacagacaggtgcaggcaagtcatggaggcctgcatagccatcccaggagagcaggcccatgaactcacaatactttttattgaggaaatcattttgataggaatcttttcaaacatattttccccaacatattttttatttattcattaaaaaatttaaaccattttatt

SEQ ID NO: 705462 - DNA, 714 bp, Homo sapiens
gcatagttttgtttttctgtctctgacatttactaatcctttaatcacacaacatttgttcaacttctcagagtatatttcctcaccacgagagattgaggattaacctgatgagtggatctataagtagcacaatccagttcctggattatatcagaaagtgaataaatggcatttcttggtgtattattttcatttttcttcttttcatttaatgaatgactttttaagagccataggctacacacttcaggagtttaaagacaattcatccatgtctactatcctggaagagtccggagtcccagggtaacaagtggacgtgccaacagaaaggtgtgatgatggaagctatacaggtagactggacacagtgcagtgacatctccactaattttctttttaaagaagaaaatacttaactygtgaacaaaaaaggaaaagttccatgccagagggacaggtcagaggaagatcatggtacactggaataaaagcagttcggtacagtgaatttctaaaacccaaaccaaggtggggagggacagacaggtgcaggcaagtcatggaggcctgcatagccatcccaggagagcaggcccatgaactcacaatactttttattgaggaaatcattttgataggaatcttttcaaacatattttccccaacatattttttatttattcattaaaaaatttaaaccattttatt

SEQ ID NO: 705463 - DNA, 1049 bp, Homo sapiens
gactgaaagaaatcagtatcacttaacttacagaaagaaaaaagatcacagccaatcaatctgtcacttttataagctaacagaataagagaagaaagggttaagatgaaggaccaagaattttggttaaataaaaagaacatcaagtgatattattaaaaagtagaaactgacagagatataaaatttgtaaataagtagactctgaaacagattacatcagtgtataatggtggtcttatctgaagattaagcagtttctcaaatttgttatagagtgaaatagacacagaaaaaggtggcagtcaagaaactgaaatccttgtagtccccactgctaacactctgtatagcttaggacascaacttcagtaatttggacctcagtttcctcacttgcaaaattagagggtctaattgtatgtctttttctctcttagttataaaaaagtatgattctaggctaatatgggttatggctaacacaatatgtcaagaatacaggagtaagccatgggaatatatcaatgattacatacaatgaggcaaagaacaggtgcaaatgcattattacaatgcactaaattactactttgatataacaaatggtataccaagtagtatgaaattttttaagaagcttgacaagatacttataccaggaaacgaactatctatctaggtcactaatactgtacatgaatataaaaatcaagtaacaattatacgttataatatttggtaccaaaataccatgcttgccttctgaaggtcattttaaaaaacagcacagatttttttttatttttttcatgttatgctttgttcataagaaaaagaacatttgcattctcgaagcatatggaaattaacagtgagaaaaaagagatgctaaaatgtcttaggttgtagagggattaagaaattcattcctgacataccaacgatgtactctagataaaaaagatatgattttcatccatctattagtaatcacttatcataaatgcactcaatattttcacttaaaaattaactcaccaaatgga

SEQ ID NO: 705464 - DNA, 824 bp, Homo sapiens
aacagggagttctctcaatgaaagattattagtacctccaaggcaactattagcagaactagacttattttacggctgtttaaattatctggaagaaagaatgcacaacttacgggatgccagtgcctctgttctccattccattcaaaggatatgctccaggtttagcatgagatggcagacttgaatcttctgtactcttgtttggcttctcctagtgtgaacatcttgctgcgttgagtgtaactctggtgtttaaagatacacatttttttttttttggtacagcatggtctgtaaatacaagccaacttcatcatctggtgttcaactaaagaaacacccaatactgaaggaaaattggctgcatcrgactttttgggaggctgtatattcactttcaatgtggcactttcctaaggcattttttaaagtttcattttttaaaaaaattattattatgaaatatttcaggaatagcaaaaagtatgccattttctttgtttttcatttaatttgcacgaactaaacataaatacaatataattccatgttataagtatttattgagtacctattaaatgcatattatttcccatctcccagctagcttgcaaagtgaatgttattctctccattttacagataaggaaactaaggctcaaagatattaaaatttacccagtttaaaaatgataaagctgaatttggacccaagtctgcttaaatttaaagcctggactcttctcttaatatcaagatgctaatgagtaaaacaggaatcattataaaacaaaaagatagcatttaagtgaaatcttgat

SEQ ID NO: 705465 - DNA, 1309 bp, Homo sapiens
attaggcaacccaaattaagcggttctttacaaaataactgaccagtccccttcaaaagtgtcaaaatcatgaaaaaatgggaargactggagggcttgttccagattaaagatgagggatcttgcaagcaaatgcagactgagatctcgaatcagatcctagaccagagagaaaggaagattgacagatctgaaagagggctggagatgaaccaacaggaccacgtggatgtaaatgtgctgcctgtgaaccttgttctgtggacactcacagtcggggtagctgtgaagagtataaggggtaggtgaagagtacaaggaaattttgcattctttttgcaatttcaatacatctaaattatttcaaaattcaaatttgaacatttttaattaaataggaaaacaaacttggctttgtatttgacatacaagaaagatgctcagcaaatggcgttcattattccttttaacaagaagaactgatggctgggggtgcttttagcccattgtccctgagaaagcatgccttggcctcggaagggcagagtgaggaagcaaagttgtttttataactgcttcaaatttcaaggttgctgagggactctgtggaggagaaaaatgtgctggattctggaaagaatgatcttttttcttttcacagaaaagaaaaactgcagtgcacgaaacaaaattcagagagcacaataagtcttccacagcctgttgctatcaggcaagccattgttcaggcctgggtgttcagggccacagcctggaaagagatgcagcttcctcacttcctgggcaattcactcggaatcgcattgcctctgtgaaaagaaaaacccagatcctggaaggggaaagccagctcctgcctgctttggccgcccacttagcttagggtgggcgtattctgatgagggggcaccatcaccctggcattgactcacgatcccagcaccaatgaatgcaggaaggcactgctctcctcctgtaactccatggtgcctgagatgacattcctttaataaacaaacaaacaaacaaacaaacaaacaaactccaaaatgtcatcctgatgctatcatatatttgatcttggtattctcttccaaaaaggatggggaaggcagggtgggatatatttcagcagccaccttggatttttagctttccttgctctgcctccaatgattagctgtgaggagccctcaaaatatattttaaaggacttcgtgtggctcacaggggcttctaacccagatcacctcctgtctctcctaccatgaatgttatgatccaggaa

SEQ ID NO: 705466 - DNA, 644 bp, Homo sapiens
caaataaggaggaaaaaactaatgctattgagaagtttgtccttattcttgtaattcaggtgctagtatcttatcaaaaggctgtttgagagtatacattgttttaactctgagatataatattttcattagaaaataaccaatggattgctctttgctaaacagcataaacttgagacagaaatataggaaatttgatgctgaaatacagcgcatatggggaagccactctacctggggtgggggaaggccctggttctctctccggtcttaacccatggtcattttgtgatctagaaggcaccagccttctygggcatcaggctgcctgccagcttggaaagctgtaccaaaggaaggggggataagaaggtggtttctaagattcctttaatctctggaaagctgtgatttaactgtcttgaggtccaaaaagtgatggaggataaaagatgataatttgtacaacgaactgaaagccaagcccctagtaaggaaatgggagcgcatttgtctgtggccatgaatcacaggtgaggtggacacttctctaagctgttggccctgaaaaacaccagagatatttctggttttatttttcttttatccttccgcctattcctcctgcacctttaaaaaaatct

SEQ ID NO: 705467 - DNA, 644 bp, Homo sapiens
caaataaggaggaaaaaactaatgctattgagaagtttgtccttattcttgtaattcaggtgctagtatcttatcaaaaggctgtttgagagtatacattgttttaactctgagatataatattttcattagaaaataaccaatggattgctctttgctaaacagcataaacttgagacagaaatataggaaatttgatgctgaaatacagcgcatatggggaagccactctacctggggtgggggaaggccctggttctctctccggtcttaacccatggtcattttgtgatctagaaggcaccagccttcttgggcatcaggctgcctgccagcttggaaagctgtacmaaaggaaggggggataagaaggtggtttctaagattcctttaatctctggaaagctgtgatttaactgtcttgaggtccaaaaagtgatggaggataaaagatgataatttgtacaacgaactgaaagccaagcccctagtaaggaaatgggagcgcatttgtctgtggccatgaatcacaggtgaggtggacacttctctaagctgttggccctgaaaaacaccagagatatttctggttttatttttcttttatccttccgcctattcctcctgcacctttaaaaaaatct

SEQ ID NO: 705468 - DNA, 1003 bp, Homo sapiens
tttaaaataccagagtgacactgggattaaagctaggcccatttatgccggcatatgagatctgagcctctgttctccaagaatcagaacacctgagttttatcagagtcaaagagacatcaaygaattctgaagaggagtagcaattcaacaataatttaagatttgatggcaagtcaacctacacaggttctctatcacataaaaattccatgactgtctctaacaagaggccttgacactgctgctaatctagggatattcacaaatacactgggttgaatcctttacaatcactgtcctgattcctgctttcaatgagctcttaaataatttgtttatcacttgagccatttggtgataaatggagttcattcagtgtgtcctctaattaattagtttgctttctgtgctattaatggaagcagaagtatatccattagccatttgggagttcgcctgcatgcagcctttgaaaaaggcatgcttcatatctgtggaaggtgctcgctcctcgcaaagctgtttgggcttcaacaggaagagaaaggtctttccaggcaatcagattttcctttagtccaaaagggaaaataaatatccccccggattgtgcttttcttaaagtgcctatagtttcattgcaatttccatccaaggcaacatgcattttgtcaggctgcggttcagccattaggttgctaattaagttaacaagtgctgtgtgcagcttaatttggcaacaagctatcttgtagagtgttcaataagaaaaacagcatttctgtaatgattctgtttttaagcttggaattaagctaaaaaccacaatggtcctcatgatgggatgtctgatgcatgcattcaaaatgcagaaagtgaggatatactattttgcacattggaaactcacaccttttatttacagatttacttcactgttagctgaaatagggctaattacctgtgtacattttaaattcatcacaattcaaatgaaatg

SEQ ID NO: 705469 - DNA, 1003 bp, Homo sapiens
tttaaaataccagagtgacactgggattaaagctaggcccatttatgccggcatatgagatctgagcctctgttctccaagaatcagaacacctgagttttatcagagtcaaagagacatcaacgaattctgaagaggagtagcaattcaacaataatttaagatttgatggcaagtcaacctacacaggttctctatcacataaaaattccatgactgtctctaacaagaggccttgacactgctgctaatctagggatattcacaaatacactgggttgaatcctttacaatcactgtcctgattcctgctttcaatgagctcttaaataatttgtttatcacttgagccatttggtgataaatggagttcattcagtgtgtcctctaattaattagtttgctwtctgtgctattaatggaagcagaagtatatccattagccatttgggagttcgcctgcatgcagcctttgaaaaaggcatgcttcatatctgtggaaggtgctcgctcctcgcaaagctgtttgggcttcaacaggaagagaaaggtctttccaggcaatcagattttcctttagtccaaaagggaaaataaatatccccccggattgtgcttttcttaaagtgcctatagtttcattgcaatttccatccaaggcaacatgcattttgtcaggctgcggttcagccattaggttgctaattaagttaacaagtgctgtgtgcagcttaatttggcaacaagctatcttgtagagtgttcaataagaaaaacagcatttctgtaatgattctgtttttaagcttggaattaagctaaaaaccacaatggtcctcatgatgggatgtctgatgcatgcattcaaaatgcagaaagtgaggatatactattttgcacattggaaactcacaccttttatttacagatttacttcactgttagctgaaatagggctaattacctgtgtacattttaaattcatcacaattcaaatgaaatg

SEQ ID NO: 705470 - DNA, 856 bp, Homo sapiens
atgctgacattttaacatttctaatcattactattgtgcaaacaaacaagtttcctctaagtcatttaggagaagacagtcatttaatattaaagaaatagaggtttttgcttttttttttggccaatataatagctatactgggctaggtatggtggctcatgtctgtaatcccagcactttcagaggccgaggcaggtggatcacctgagttcaggagttcaagaccagactggccaacatggtgaaaccccgtctctactaaaaatacaaaaattagccaggcatggtggcgggcgcctatagttccagcaactcaggaggctgaggcagaagaattgcttgaacccaggaagcggttgcagtgagcaaagatcgcaccactgcacttcagcctaggcaacaaagcaagactctgtctamaaaataataataataaaataataatatttatatggtaggtcccattcatgtttttaaatatcatggtataaaactcaccagaacactgaatacttttagagttaaaaagtaaacatccagaaccaactgaaagtgctctcgatggccaaaaatggaacaatttgagcaacaaaataaagtaatattggattataaaccagtgaataaaataaatttctacaaatccatactaatataaatgattgaataaattaataaatggggagaagagacaagtctcctgcccagaagaatcccaaatattttatctggattccctgccatcaaggggggggagcataactccccgctccttaaaagtgcacttcacatagtgacttccctccaaagaggatagcatgagaagggggaagggaggggtggagtgggtggg

SEQ ID NO: 705471 - DNA, 1310 bp, Homo sapiens
tgcaatatttgttaacctgctaacaaccagcagatgttattgcattgtctcctggaatctttgagaaggtaaatgttgctccagtgctcttgtatttcatcagttggtgtcttgtgttacagaattgaaaggtccataattgtcatgaatcctcactgtaggataaaggactccagacatagggttgatgacttttctggtttgattctctgagtttctagattagttttgctgttgtgtttattctttacatcccaatatatttttcagtttgggaattttaaaacaaattctaatacataagatattgttactgaaggtcagggaccacagtgaggagaaaaatgatggtttggtataacaaaccacccaaaacttagtggcttaaaacaatcatgtattgtatttctcatgattctgagggttasatgaaaatcttttctgctcttttcacctcgcctcactcacacactgcttgggggtgggctgatgtagccaggcttctctttccatgtggcctttcatccttaaggaagctagaccaggccgctcccatggtaggagcagtcccatgagaatgaagacagacagaagcagccagacttcttgaggcttgcttttgaacctacacatcatttatgccacatttcattggtcaaagcaagtcaaaagtcagcccagaatcatgggtacggaaatagacttgagctacaaaataaggtggccattttacctttatagttcctgaaatttcagggggaaaattcttcaatgaggaaaaaaaaattggcagagtaacaaattgaagtgcgtgattaaaataatttttaaggaatagactatacatattgtttttcaattgtccctcataaaaagaagttgctcattgctgttttaaattaagaatagaaactacaaagtctgttcccgtaaatataattaacaattatataaagtcaaattccatgttgtggtgtagagatagcagaattttgataaatactgggaaggaaagagtagcagtgaagaaagtaagaaatagagaggaggccctgctacctctggctcttttttcctttttttttttcctttctcttcccacatcaccttctgtgtctttttttccctctgtgctctttgtcattttctttcttcttccaagattttttctccttctttatctagcagtatgaattggccatcataagctatacacattttaaaaattgtttgcatcactctttcccctacatgtttttaaatcagtaaaatcagatttagatgaacgtgaagagtgactttagtgggca

SEQ ID NO: 705472 - DNA, 1787 bp, Homo sapiens
cccccaaagcctggcttcaaagacaaaccacaaaatgaccagtaaaaatatacttcaaaagacacgactgaatacacattgcggtggcaagaatccaatatataaatacaatcaatttgtttcctcattagaagctttcatgaagaaaatgatttaatacaaatgctaaagttactgacatagattaattgaaaaataacaacagaatcctaattaaagatataacattatttcactcattcacactacaccaaaatgtgaatcaataaataacagaatttagaaagccagcttctactggtaaccactctaagaactacaatgaattactgacattttcataaaatgcctatccttatgtgtacactttcttctatttaagaactgagatgtatacagaaatccagaaatcattttaaaattatttcacacttttcctaaattcgtaccattttacttaatccagattattgcttttgccctcaagttgatttttttccctaattgtaaagattctatactaaagtatcttcttctttttttttttttttttgagacagagtcttactctgttgcccaggctggagtgcagtggcataatctcagttcactgcaacctctgcctcccgggttcaagcaattctcctgcctcggcctcctgagtagctgggattacaggtgcccgccaccatgcacagctaattcttttgtatttttagtagagatggagtttcaccgtattggccaggctggtctcgaacacctgacctcgtcatccgcccgccttggcctcccaaagtgctgggattacaggcatgagccaccgtgcccggcctaaagtatcattcttacccatttactactttgtcataattaaacccttacataaagtacccaattatccaagccataaaaaaatggaatggactttgatctaaaagctaatgactacgtgaccagctctgtggctatatcagtacaggtcaggggtcctcagagtttcgattacaatcaaccagtcaatcccaggctttacctggctcatcttgggaccagggctttcagttctgtctcactttgagggattctccagcatcagaaacatcttgagatgttgccagttcacaaggaagcacagagcagcatatgaacatatccccatctcctcaccccaggagctaatcaggctgaaatgttgtcagctactgacagttcttaagccctgctggaaagattttcccttcattgttaaaattcagttgagaaccaaaatagtcacttacctcaaaaacaaaaaacaaaaaacagggtattctgataaagatttgtacacactttcctgatcttaagaatcccttggaccttttattgaagcacaaattctcagggtccaccccagacctagtgaattagcatctccagggtaggggcctagaaatctatatattttaacaaaatccccaggtttttgttaaaaaacctgatgatggggcarttttggaaaatacgataaaggaaacagatatttaccagtggttgcccattaaggaaattctagacaggcagctctcaattcaagtattgactgtattctaaaagttcatttccagttgtttggaccttggaatacattttcctaatgaaacaaagttgaaagttgtctgggccagctttgaaaatctattaaatcttgttaacagatctgaaaatttgtgaatacagtctttaattttcagaccaatcatatttcgaaagttgaagcatatatccatagaatgtattttccc

SEQ ID NO: 705473 - DNA, 877 bp, Homo sapiens
atttcagtagataaattaatcattaatttcatttgttaattactatatatgataaaagcaagataagaatgacaaaactgagaaagcaatttcttgtcttagcaaaggctggctgcacaaaaattttaccaaatattatgtttaaacaaaacaataacaaaacattgagattttatttcctttaagacaagagccagatgagtttgatgaattcttttatcataggaaattaaataaggtttcttactattattattttaagataggaaattagatgaggtttcttaccattgttcttttaagacagggagctagctaagaatgttcagtacctttgctttgattcagcattgtagtgtttaccaactggtcagtgcatttgggaaagaaaattgctaagaggcatgagacaattttgcagaatattygagcatcttcatagaaccccaacagaatgatcaaagaagtgactacagtttgttaaagctaattagcctgcagtctaataaaatccattttttttttttgcttgcatgcaaggaataaattcagagaaagatgaaatgttggttaaacaagagggagaagaaattcaacttttgctaggcttgggttccctctgaaggattctgaggagggtcaaaggaaagcaagaaaagattggttgctgtttttaaagagggaattgaagacacagggattaaccagagattggctgctgtcttgtggcgagagtgactaaacaattggatatctcctataattaatgaaacaagcaaagcagatctgggacttcactggagagaaaccagtaatcactcaaagtggtgtcttcatgacattttacaactgcagcatgaccttgggagatacagtg

SEQ ID NO: 705474 - DNA, 1905 bp, Homo sapiens
tcagatcaggtaagatggtcattatacttaatctttgtttttatgcatataggcaaaaacaagaaaagtagacatcaggcaacaaaagctagaagtcttaatgtgaataaataaatgctatatcagagtccagagatttcaatgttagccccatcctggccttttgctactcatgtgaccttgaagaaatcaatctgagccattatttacttgtctataatctggagatataaatacctattctatcttattgggttgtcatgtgagataatattcttggcatttgtgaagtgctacacaaatatgaggtaaaattatttttaaaattgagctaaattatttttggctgaaaggcaagtcaatagtcaagtaactgtttatgtcagagtatccctttttcagtggaaaatttatcagtgaattctaccatacgtggatacttttattaatcattgcgtttaaataataacacataattatttgctgactttgaggcacatattgtgctgactttgaggttgctggtaataagtgatagtatgagcatctatcattgccagtaaagtgccaagcactgtggctggggcttcacacatattatttctgcttcttaccaaatctctgcaaaccactgatactaagcattaacaatgagtcaatgacttgttcaggccctagaattctcctacacagggtcaggattcatatttggccaggacatatactgggaataatttggaactcgtatattgttatgaggaactggaagccatcttggggaccagcaagaagcccagagagaggaagtgacttgcctatggtcacacagccagctgataaaggttccaggggtacccagatcttttaacaaactatcttcttattttcttaggttcttatttcctttgctttgacagaatcttcctgtgtagcagcagctgttttccttaccaaagtgagaaataagttggctctaatcctcatcttccattgtttgtgaatttggggccctacactaacatctctcccacaatacaaacatttttaattcctagaggaccatggacggtccctcatggtctttttgtgctcttgataagtattttgctgactaattttaagctgatcctgccccctcacaactagtttaaggccagttggctgtgctcctgaagagtgggctttggtgaaaatctcaaagccttaagatggcaatgcaagtccgtagaaatcagaattcgatttacacaaaacattttagtaccctcatatatattaaacatactattcttactccaaaatgttgtgctttttacaacctttctaccatatgtagaaaaggaatgacatataaggacaggattccggtgtgttatttaagaaattaatcattcatatatgagaaaaaattaagaatgtatgtaattttgttttgcttttgtgtctgcctcaccagaattactgcccccgatgtayataccattttctcaaactatcatattgaacagtttctcctgaaaagtgattataaagataagtgtctgtgtgacacacaacatagaaatgtcacaattggcgatggtctattcataaatgtcagcagagtggagtgtcatgcttggaatagaaaaaaaattaatatggaggtcctggtccttctacaatataatttattgctcagatgtgccctttttcatttaaaagtggaattattataatttgcactttgcttctattattgacactcgagtgactcattataatctttaatcaattctatttatcttttcttgaataaaatagtaagatttgaaaaatactaatatattaaaacatttttgttttcattctatttggtgttttaggtttggataggtatgttgtatgtatgtatgtatatatgca

SEQ ID NO: 705475 - DNA, 1905 bp, Homo sapiens
tcagatcaggtaagatggtcattatacttaatctttgtttttatgcatataggcaaaaacaagaaaagtagacatcaggcaacaaaagctagaagtcttaatgtgaataaataaatgctatatcagagtccagagatttcaatgttagccccatcctggccttttgctactcatgtgaccttgaagaaatcaatctgagccattatttacttgtctataatctggagatataaatacctattctatcttattgggttgtcatgtgagataatattcttggcatttgtgaagtgctacacaaatatgaggtaaaattatttttaaaattgagctaaattatttttggctgaaaggcaagtcaatagtcaagtaactgtttatgtcagagtatccctttttcagtggaaaatttatcagtgaattctaccatacgtggatacttttattaatcattgcgtttaaataataacacataattatttgctgactttgaggcacatattgtgctgactttgaggttgctggtaataagtgatagtatgagcatctatcattgccagtaaagtgccaagcactgtggctggggcttcacacatattatttctgcttcttaccaaatctctgcaaaccactgatactaagcattaacaatgagtcaatgacttgttcaggccctagaattctcctacacagggtcaggattcatatttggccaggacatatactgggaataatttggaactcgtatattgttatgaggaactggaagccatcttggggaccagcaagaagcccagagagaggaagtgacttgcctatggtcacacagccagctgataaaggttccaggggtacccagatcttttaacaaactatcttcttattttcttaggttcttatttcctttgctttgacagaatcttcctgtgtagcagcagctgttttccttaccaaagtgagaaataagttggctctaatcctcatcttccattgtttgtgaatttggggccctacactaacatctctcccacaatacaaacatttttaattcctagaggaccatggacggtccctcatggtctttttgtgctcttgataagtattttgctgactaattttaagctgatcctgccccctcacaactagtttaaggccagttggctgtgctcctgaagagtgggctttggtgaaaatctcaaagccttaagatggcaatgcaagtccgtagaaatcagaattcgatttacacaaaacattttagtaccctcatatatattaaacatactattcttactccaaaatgttgtgctttttacaacctttctaccatatgtagaaaaggaatgacatataaggacaggattccggtgtgttatttaagaaattaatcattcatatatgagaaaaaattaagaatgtatgtaattttgttttgcttttgtgtctgcctcaccagaattactgcccccgatgtacataccattttctcaaactatcatattgaacagtttctcctgaaaagtgattataaagataagtgtctgtgtgacacacaacatagaaatgtcacaattggcgatggtctattcataaatgtmagcagagtggagtgtcatgcttggaatagaaaaaaaattaatatggaggtcctggtccttctacaatataatttattgctcagatgtgccctttttcatttaaaagtggaattattataatttgcactttgcttctattattgacactcgagtgactcattataatctttaatcaattctatttatcttttcttgaataaaatagtaagatttgaaaaatactaatatattaaaacatttttgttttcattctatttggtgttttaggtttggataggtatgttgtatgtatgtatgtatatatgca

SEQ ID NO: 705476 - DNA, 2711 bp, Homo sapiens
ttcagaggtttttctaagacaggtttattaaactacatgattatgtcccttgagtgtcatccctggatcactaccaaagccatccatagtatagccccttacaatgtgtgaatctcatgatggtgaccttaatttaataacttagggatggcccaggtcatcaaacaattactagaatttagattaggacaatgcccgatttctgatttatcctaattcacagtggtattttgaaagtaaaatcaatttgtttgctctaattgaatgctatagtagcagaatatgaatgaacaaaattgtaaatgaagatgatctgtggagatggctctggttttatgctggatatagagaatatggattaaaataatttggcatttttaaaattcactgaatctctttatttatgatatgaatcacagtttgaaagctttgttactgtgtggattttgcagctatgattctttgttatcacaaagactcaataatggagtgtggggggaagtataaaagaaagctctaatggatttccctgcctccatatctttgatggtaagtaagtgagcagcagtattaacaatacgtaggtcaggaaaaggagagagaacctccttagataaatttcacctcaaacttgatttcatagaaatgcaaagaatgcccacagggatccttaggatttcagggctgctctttcaaagttttaaaacttttatagtacaaaaatgaaatatagacttcagtggaggaagcaatactttcctatatgttaaaggaaaacactaaatggttatataaaactggaagtaaactatgtttacaaatgcagccatattgttctcaaattcagtatcaaaatcaatcaagacagaaaaggtaaagtgtcatttacgagctattccctcatggttcctttttattcaaatcacatttggaacctgaattgtgttctgtgatagacagtaacatttgttgaatgtattgggtggcatttgcaatatgtccttactgaaatctcaaatcatatttataaaaaaagttcaatcaaaaaacattttcaacccatttgctgataatactatataatcttcattacttttcttatttccaaatatatgagtttttctccaactgactatggtaaaaaggaaaaaaaatagtatttttatagagcaggcacacaaggttttaaggtgttttttacgttgatgaataatatattgttggctargtttgctgtaagcattgtctaaagtgagctcaagacagttttcaggtatgaaacaaaagaaacatatgtaagaaaagggagcctgtatttatatttcaaatgaagctttatttcctatatagatttttacaaataaaaaagtgaaattctaaataaagttaaaaaagcaatattttctgaactgctacaaaatttaagtttgtcatttccttttcaacaccagatgtttgttgtgctgccataaaaactgtttatacatcagcaaagattttcaaattggggaaagatacaagaggtggagaaatggatatatgtattcaatacaatgacatacagctaattatttttcaaaataaactcagtttttttttttgcctgaaatggcttaaattttgctacaatctacaaaataaaaaagaattttgtaaccacagatggtgttgacgttgcagtgagtcctgatgttgcaactgctctcctctccagcctggatgaccgagcaagaccccatctcaataaaaaaaaaagaaggctttaaatgtaaatgatttatatttaatatatgataaaaaatttcaaattaatagaaaaaagatgtcttactcaatacatgttgttaggatgactggctagccatttggaaaatacagtgaaggtggatttctcactccctacaccaaaaataattccagttgaattaatttttttaaaggcaaataataaatcatggatgagtattcatattataaatgaatgacaaaatcctagaagttatgcagccttatattgaaataaaattattataaataaattcaagaagataaattcaaaagctagtgctatttttatatttattgaataagagataaaaaacaaattatttttattatgaaacatcaataaatcaatccataaaagagaaacttctcaaataaaaggagagcagaaaaatgaaaaacaaattctcaaatgatcaaacttgctaataatactataaaagaatatgtctatctatctaatttgtatatagcaatagatctatatatttatgttagattggcaaaaataattaaaattattgttggcataaagaaaaaaaggttctgtcatatgatttgttatatcatttaggaggaccatttattaatagccagatgttttacagtgtgctttgctaaaccctcagccttaagaatcaatatgatacagtcacatgcatgggggatgggacaaccgaagcatatgtatagaaaggtttcagtgttttgaacaatttttttgaaattttttgcaattttcttctttagcagactagtaatattggaaatatgaactacccataagactgtacatgtttgtggcaacagcaagaaatattctaaatgaatatttagaatttactgtgaaacaacaaaaaagttgtaaaatattaaacatatgattctgtttattaaaaatataataatataatttatcaaaaaca

SEQ ID NO: 705477 - DNA, 824 bp, Homo sapiens
tttaaaaatatcactttaattagctgggcgtggtagcgggtgcctgtaatcctagctgctagagaggctgaggcaggagaatcacttgaaaccgggaggcagaggttgcagtgagccgagatggtgccactgctctccagcctaggtgacagagtgagacactatcttaagaaaaaaaaatatatatatatatacatatatatwtatttatttatttattttatttatttatttaatggctgtaccctatattcttcttgatttctagccttttattggctctcagattgccagagttgggactcaatagtaagtaaccattttgttgaggtggtagtgattctaccagggtgagttatcatgacagcagaatcactgcgtttttctctctactctgtggcatagactctatgccatagagtgacgtgtgaaaggcttgaggctccctacctacgagacaccctggtccattctagcagtatggcacgtgctgactgggttttgagtctcttgctgtaaaatcacattactgcacttccctgcattttctcatccaaaaatggggattacctgctttgtggatcggtttgcagatgaaataacacacgcagggtatctagcatggtcccccacatggcacattcagtgttagccacacttccatactaactgctgcggggatatttaatgagctcttaaatggcagaaatgttgtgtcttttcctgttcccttagtattcctatttttgttggtaatttttcttatgaaccatgcagttgtctagttcaggccattttagtatgcagttttatctttgcttcca

SEQ ID NO: 705478 - DNA, 824 bp, Homo sapiens
tttaaaaatatcactttaattagctgggcgtggtagcgggtgcctgtaatcctagctgctagagaggctgaggcaggagaatcacttgaaaccgggaggcagaggttgcagtgagccgagatggtgccactgctctccagcctaggtgacagagtgagacactatcttaagaaaaaaaaatatatatatatatacatatatatttatwtatttatttattttatttatttatttaatggctgtaccctatattcttcttgatttctagccttttattggctctcagattgccagagttgggactcaatagtaagtaaccattttgttgaggtggtagtgattctaccagggtgagttatcatgacagcagaatcactgcgtttttctctctactctgtggcatagactctatgccatagagtgacgtgtgaaaggcttgaggctccctacctacgagacaccctggtccattctagcagtatggcacgtgctgactgggttttgagtctcttgctgtaaaatcacattactgcacttccctgcattttctcatccaaaaatggggattacctgctttgtggatcggtttgcagatgaaataacacacgcagggtatctagcatggtcccccacatggcacattcagtgttagccacacttccatactaactgctgcggggatatttaatgagctcttaaatggcagaaatgttgtgtcttttcctgttcccttagtattcctatttttgttggtaatttttcttatgaaccatgcagttgtctagttcaggccattttagtatgcagttttatctttgcttcca

SEQ ID NO: 705479 - DNA, 824 bp, Homo sapiens
tttaaaaatatcactttaattagctgggcgtggtagcgggtgcctgtaatcctagctgctagagaggctgaggcaggagaatcacttgaaaccgggaggcagaggttgcagtgagccgagatggtgccactgctctccagcctaggtgacagagtgagacactatcttaagaaaaaaaaatatatatatatatacatatatatttatttatwtatttattttatttatttatttaatggctgtaccctatattcttcttgatttctagccttttattggctctcagattgccagagttgggactcaatagtaagtaaccattttgttgaggtggtagtgattctaccagggtgagttatcatgacagcagaatcactgcgtttttctctctactctgtggcatagactctatgccatagagtgacgtgtgaaaggcttgaggctccctacctacgagacaccctggtccattctagcagtatggcacgtgctgactgggttttgagtctcttgctgtaaaatcacattactgcacttccctgcattttctcatccaaaaatggggattacctgctttgtggatcggtttgcagatgaaataacacacgcagggtatctagcatggtcccccacatggcacattcagtgttagccacacttccatactaactgctgcggggatatttaatgagctcttaaatggcagaaatgttgtgtcttttcctgttcccttagtattcctatttttgttggtaatttttcttatgaaccatgcagttgtctagttcaggccattttagtatgcagttttatctttgcttcca

SEQ ID NO: 705480 - DNA, 824 bp, Homo sapiens
tttaaaaatatcactttaattagctgggcgtggtagcgggtgcctgtaatcctagctgctagagaggctgaggcaggagaatcacttgaaaccgggaggcagaggttgcagtgagccgagatggtgccactgctctccagcctaggtgacagagtgagacactatcttaagaaaaaaaaatatatatatatatacatatatatttatttatttatwtattttatttatttatttaatggctgtaccctatattcttcttgatttctagccttttattggctctcagattgccagagttgggactcaatagtaagtaaccattttgttgaggtggtagtgattctaccagggtgagttatcatgacagcagaatcactgcgtttttctctctactctgtggcatagactctatgccatagagtgacgtgtgaaaggcttgaggctccctacctacgagacaccctggtccattctagcagtatggcacgtgctgactgggttttgagtctcttgctgtaaaatcacattactgcacttccctgcattttctcatccaaaaatggggattacctgctttgtggatcggtttgcagatgaaataacacacgcagggtatctagcatggtcccccacatggcacattcagtgttagccacacttccatactaactgctgcggggatatttaatgagctcttaaatggcagaaatgttgtgtcttttcctgttcccttagtattcctatttttgttggtaatttttcttatgaaccatgcagttgtctagttcaggccattttagtatgcagttttatctttgcttcca

SEQ ID NO: 705481 - DNA, 824 bp, Homo sapiens
tttaaaaatatcactttaattagctgggcgtggtagcgggtgcctgtaatcctagctgctagagaggctgaggcaggagaatcacttgaaaccgggaggcagaggttgcagtgagccgagatggtgccactgctctccagcctaggtgacagagtgagacactatcttaagaaaaaaaaatatatatatatatacatatatatttatttatttatttattttatttatttatttaatggctgtaccctatattcttcttgatttctagccttttattggctctcagattgccagagttgggactcaatagtaagtaaccattttgttgaggtggtagtgattctaccagggtgagttatcatgacagcagaatcactgcgtttttctctctactctgtggcatagactctatgccatagagtgacgtgtgaaaggcttgaggctccctacctacgagacaccctggtccattctagcagtatggcacgtgctgactgggttttgagtctcttgctgtawaatcacattactgcacttccctgcattttctcatccaaaaatggggattacctgctttgtggatcggtttgcagatgaaataacacacgcagggtatctagcatggtcccccacatggcacattcagtgttagccacacttccatactaactgctgcggggatatttaatgagctcttaaatggcagaaatgttgtgtcttttcctgttcccttagtattcctatttttgttggtaatttttcttatgaaccatgcagttgtctagttcaggccattttagtatgcagttttatctttgcttcca

SEQ ID NO: 705482 - DNA, 623 bp, Homo sapiens
aagctggcagaaatgttagtaaatctgcttatccctggtccactttaccaaatatggattcagattttaatcatacacattttggagtgtttggaatgtgtttcttcttatctgtgattagagtcaggtacacacaggaagatgatagtatctctgataaggaaacgttattttgtccataggctaaataatattctttgggggaagagatatgagtttaaaatgtaagccaacaagtatattatraatcaatctgtcataggtatttttttgttggggggagcagatgcccattcagatcatcatactattgaataactactaaacgtacctactaaggcctcggaagttttatgcttaacattaatggttaatagtaagtaggaaaaaagtattatgctctgaaattttggtggatgtattgattacagtctttatttagtaatgttttaatttaagcttggcagcaaagatttgtgagttttactgcaagtcatcatatttgctgttacagcagtgcacaagcaaaagacattaagttgggagaatatgcagagtcttatattttgtttattctttcaaagtgaaattaaaccctcagacattgttccaggcaactcaag

SEQ ID NO: 705483 - DNA, 630 bp, Homo sapiens
gggtgcaattcagatgttttcaattggaaattgaatagcaaataattttgaattttcaacggcacaattaatgacacattcgttgtagaaaaattagaagatgcaactaagaaagcaaacagagaaaaaagctrtatcgcttgcaatcctgtttaatggaggtaacaactgttaacatttcagtggataccctgttttccctttcttgtaaaaatcatgtcttctcattttatgtatttgtattctcattgccaccatcgaacattatagatgagaaaagagctagcagtaatgttgctgatgagtgagaattgtgagggttaattctcttacatggtgtttcacattttcatcttaattttaatttcacattttgtgtgtttacagttttaagggaaaattcatgttcttggtttcaagtggcatcattcatgggctaatgtttttctaactcctcccctcttcatcttcttccagctgtgccaggtaattccatatttaggcacaattcttaaacagttattgttaagacttgtgtagtggctcacacctgtaatcccagcactttgagaggccgaggcaggtggatcacttgaactcaggagttcaaaaccctgtctctactaaaaa

SEQ ID NO: 705484 - DNA, 1884 bp, Homo sapiens
taagtacatgcatctaatggtggtgaaatgttaggaaggcaattgtagatgcaaatctaagttgcacgcttcatagcagattttgattagttataaagctggcattttaatctccatctaactgattcattgtctatccttataaaggaaaagaaggcattttttgggggtcccataaaacctcaacaaatggtacttaaaaccaccttacattttaaatctcaagaaatggaataaaaattactgtcattttatttcaagtctcagtatttcctgttgtttgatggtaacatgtaaactaatatgctttacaatctcttactttcaatcattaactgcttcatcaaatgctgatcttaaataacattaaaaaataagccccctaaattattttcttttactgcaaataattgccataaaaaatcagtggacataagtagctacagcctttacaacaaaataaatttttgtgagccttatcccactggtcctcatggaaatttttattccttccaaaagtggtttgccttacttttcaacatttggttaatgaattgaaacaaagtacactaatttacctcacttaataagatactcaaaagcatttctctttcttgactaaccaactgtgatagtttcatatatgctctatttcttaatgaggacttgagcaactcattatttcaaagccctaaagtagtccttaatattttttaaatataccttgacatttttagttgctaatcaatacagctgatttttcagaagagctaatgggatggggcaatgatatatacattttatattttaaagccaaaaattttctttttggccaggcacggtggctcatgcctgtaatcccagcacttcgggaggctgaggcaggtggatcagctgaggtcaggagtttgagaccagactggccaacattatgaaaccacgtctctcctaaaaatacaaaaattagcctggtgcaggggtgcatgcctataggtcccagctacttgggaggctaaggcaggagaatagcttgaacccggggggcgaaggttgcagtgagacgagattgtgccactgcattccagcctgggttgagagcaagactctgtctcaaaaaaaaaaaaaaaaaaaawatatatatatatatatatatattctctttatctctacattagcatgatccttaacaaatcttatatcaagatttgaacatagcatcatttgtagcctcttcttcactcctttctcaacactttctaaggaggaggagtattcataaaccaacaacattagtttacatggtttcctcttatctcagtgttcttcctcttcactctggttcttctttttttaaaatttttatttacttttttcgatctcatatatatagaattggattaatcatcatctattgtgaatgacatattctctcgtcattggtgttttcagggcttgtcttttcattagttgttatatttgtaattgtaatttgaagatagttacctacaattccaccactcacaactaataaagatctctgtcctcaaggatatattcaaggattatattctagtggggacagataaattaaacaacaagcaaattttaggtaaatataacatgatgctatgaaatgcacacacagagcagaccagaataagggagaaattggctgcagtattttaaaaaaaagctgacagggtaagcttcactttgcacttcagaaagtatgatttagggtaatgaaagggttatctaggcagatatgtgggagaagaatattccaggtaatagaatatctaaagcaaagaaaccaaaatgagagcattcctggaatatttgaggaacacaaggagctcagtgtggctgcaggagactgaatga

SEQ ID NO: 705485 - DNA, 1450 bp, Homo sapiens
cagtcacaagggaaaggccaggccatggagctagggtctagcctgcctttgagagcctctcttaccagaaatcacggtgttggctgccacggtccttagtggcacaaatcttgcctttcgttgcttattggctttcaatgagttgtttttcttttctcttttcgttttttgtattttttctttttttaactcactgcagagctgatggaactgtgaatcaaatcgaaggtgaagccaccccagttaacctcacagagcctgccaagctggaagttaagttttcctggtgtaagtatccacttttcccaggaggattcagggacaggaaatatgcaaactgaaggctagcgccccggcttggagaattcctgagacacctgagtgtcatctataatcactcagcacataattatctgtcaaacacttactacatgtcacgcactagggttgccatgatgagccggacagagctggccttggtacttatggagctcacatcccagtgtggatactgacacgtgaccccgcaatttactataactagctagcgtttcaacaggtgaaacacaagtaggtgcacaccgggtgtgggctgcagaagacacaacccagtcttgtttcccaaaggaaactggggcccgaaacattagcagatattagcagaacaacctgcacggcgcagaaactaggaagcaagagatgacaagagtgacggcaagtttgaatcctgcttctgccactttccagtcacattgttggggatcctgtgagatacctaatgacaggcatttgcctctgggttctgagctaactgaggaagggacacaggcaatagagaaagcaccaaatattagttttatttccgacgaagatacactagagagttcaacccagaactgtgaggctttctaacacgaagagtgcttgaaagcccctttcccacctgcagggtagacactgaagtcatcagctacaaaagttactccctgcacttcctacttctcatctctgccactcctccaccccacaccagtcaagtgcctagagcggggaggagaggaagttctaattttatagaccaagaaaggaatgctgggaggagaaaacagttcttctcacactatgaatatggacaactaacttcacatgtacaagccagaaataactgcccagtgtcgtgaaaataaaccagatacacacgctctgtaaactgtaaagggctttatacacagtttctcttgttatttttatcaagaagggagctaaagtgcaggtgggctgagtgacgcaggccatcactgaactcattagaagtagagttgggacctaaacctaggtctccaaactctcaactgagtatttttcccatagggatcagggacggggattggagygaaagctaactattacatgcataacaaggattagatgtttgcgttaggccttgtag

SEQ ID NO: 705486 - DNA, 615 bp, Homo sapiens
ttggccaggctggtctcaaactcctgacctcaagtgatccacctgcctcggcctcccaaagtgcagggattacaggcgtgagccatctcacccggccaatacgtttcttttacatgctttaaataccttaaagtaggcagaatctcaaatagtgcaaggatgcgtattgccctatggcaacagtgagtggcgacagtgagctgttatggagctgtccagacttttcctccctccagtgagtgccagctgtccttgcatggagtcctggttcctttggtggagaatggtgttgaaaatctcagcctttgcggcggagagcggggacatgggacacaggggagttggtggtgggcagagatgctgctgggccactttcagtgacaaaacatgacagcraaggctcttgaagtcaggtgaggcccagcctgccctgtggcggagagggagtttgggagggggtgaggtggatgggtagagtgagtgggcgaaggggagagaggagggagagaacctgatcaaggtcaagagtgcccaggggacgacttggcctttaccgcattgcgtgttcaaggcttttagcccagattttcctgggccatgtgatcatggttaggg

SEQ ID NO: 705487 - DNA, 823 bp, Homo sapiens
cagtattctcatatcctttttatctctgtaaggtcaaccagtagtaatatcccatttgtttgtttgtttttctgattctagttatttgcatcttctctctttctttgtcagtctagctaaagtttcgtcaattttgttgatctcttcaaagaatcaacttttagtttccttgattttctctactattttgggtttagtttgctcttctttttctagttccttaaagtataaagctaggttgccgatttcagatcttttttcttttttaaatgtaggcatttacagctataaacttccctgtctctatatggaatcagtagtttcattcatgtagttatttattgactgcaaagtatgacaggtactgagaagttctttacattaaagaacttattgtctaaagaagacatagagaaacaatgcatgtaaaatgttgagcacagtgcctggaacatttattgaaagcatataaaagtggtagctmtcattaaataaattctccacaatgaataaatataccttactggcatacttatcacagggagccagaaggaagcaaagaggtagatcaaaatgaagactaacaaatagaaatttgaaaacagttttcaaaagatggaacaatgagagataaagaattcctcaatcaaaaggaaagaacgaagataaaattaatatcgaatacttagattagtaaaagaaatgcagataacatcgaagctctaactataattacagcacatgaatctatattactatcaataagcctaggacttactttagcaacattcagtagactaggagcaaatataatagaaagctg

SEQ ID NO: 705488 - DNA, 591 bp, Homo sapiens
ataaaaataactagcatgagcagattccaatttgaactaaattctgtctgctcaagaatatgagtctagtgattgatttttttcctatttccaaagagcagtgatttttraaatttaggatgactgaagttttaatttgctttaagactcagttgaccagtcatttgaggaaaatctttcaacagtatatttgcaatgtatttagccattctaatcagtagttttgcttaacacaaggtggcttgtgaagtgattctgaattatttcatgatggttgaaaggaggccaactataataaaacaatgcaaacaaattagtgaagctaaacaggaaacacactggtgaactcactgccatcatctggcattttcaattttgcttccaatttaaaaatagctaacatgcacaatgtactgtactgttctacagtgaagatggtcagtaatgaggtgttttcacaattcaatgtaatctctcacttccatctctgatatttcatttacaaatgaatcaagtcatgcaaatgatttcaggataacccccaccccacgagtccctagtcttaatgagttgtgagttgggcatgtaaga

SEQ ID NO: 705489 - DNA, 392 bp, Homo sapiens
caagtgctgggattacaggcatgagctactgcccccggccctgatacattattattggtactcattttcactcttgaaaacattcaagtttaaataacaagttatattgtcctccctttacagtaagcttgagagacccaataaccaaacacagtggatgaaccgtgtatgagrtcttatttgggaaaacaaactctaaaatatatatgtttttagacagctgggtaatttgaatatgaactggttattagatgaaattataattttgtgaggtgtgaaaatagcaacatagttaaaaaaatatcattttttataagatcttactaaagtattgggtgcaatagccagatctctgggatttactttaagataattcagcaaaaaataggata

SEQ ID NO: 705490 - DNA, 1266 bp, Homo sapiens
caatacaaatgacacttaagaactttatatagtatgttttaacagaataagcatagataaaccaacctgacttgtggcaaagcacttatttgcatgactgcaatgggttccccgtggtcagagttccccgctacagctctggaaagtatttaagtctctggctgggagaaaactcaccatatgaagcttctgttgacctcccttgccagacctaacctagtggaaaccacacaggaaggcaatctgtccagagaactatgcttccatttcagaatacgaatacagaaaactcttaggacatgcacaggaaaaatctctcatttcccacagatccccacctggtacttacacctcagagattttcagccttgggacagggccagtcataccttcctgaacttccctaagaggctacttgtgcaatggagtctttggaactcactggaatgacatgactgtcctatttaattaagtcttcccaaaacagatccactctgctattgtagtctcatcctaccaatggaggtccttcctctttccatcttttctttttgctgacctatgctggtttgcccctgctgtcttttgaccccagttgatgtttctctcctcttatccatttacatttttctaacaccaaatgtggatccagaatagtgaattctgcgaaaaagaatagtctaaagttttccaccctctgactgggcttgagtatttgctgtaaatcaagtactcaaaaagcctagagctataaactgagaagacaaggagaagaactctaaacagcaggcagaacccatgtgtaatggactgcagccttcgtaatgaacccttgtagccactagtgagaactttcaacagtggtatctttgaacataaggacaatgaaaaccttttaaaaccaaggcaaatctactrtaactacatgtctataatcgctgggaggtttactccatcagataaatagttttgttgtcttgttttaattttctaaaaggtaacttcagcagagtagtataaaagaaaaagttaccaacatttgatttcaacctcttaagacactaggagtccagtgtctgcagtgtgttaaggctgtgaatttgctataagtctaagtacgaaaacaaaggtaaatatcatagctacagttgatagctgttgcattaatgagaacaaatagaaataagatcttagtgacaagaacacctttggcaatatcaggaaaaagttgaaaacatagttcaaacagaagccttaaaaaccaac

SEQ ID NO: 705491 - DNA, 988 bp, Homo sapiens
tgaaaagtatagacagatagtgccaacacacctcagtagtaccagtagtaatttacctaagagtaccagttcgcccacatgtgatgtactgcaaagacaattttattccaaacataaattagaaacatcagttgttggttctcgaggtggcctgcttttggcaatttatcaaaaagagtaattctagtactgcatcagtgttcaccaaaagcatgaagtaaggccaaacaactgacttgcacaatttaattaacttgtattcctcaataatcaattgatattattgaatagtaagcccgttttaaaatatgttctataaaccagaagaaaacacatattaaagagggttcttgttttaaaaggacgtgrgtaaataagaatctctattaatgccctcagcgtttgattttaacagaacattaaaacaacccatttaatcttattaatacatctattaatttttgtcataaaatgtgtataacataaaatttttcatttttaagcatacaactcagtagcattaattacattcacattgttgtgccaccatcaccactatccacatccaatacttttcatcatcccaaacaaactctaaacccattcaacaatcactcccctttatcccctcccctaagcctctggtaacctctagtctatgaatttacctattctatatatttaatataagtggaatcatataatatttgtccttttgtgcctggctcattttgcttagcctaatgttttcaatgttcatccatatttagtatgtatcagaattccattcctttttatggcagaataacattccatcatagatatatcaagtcagtcctcattagtggattctgtagttgcatatttgcttactgactgcatttatttgtaatctcaaagtcaatactcacaggatattcatggtcatttacagacaaatgcagagtaacaaagaatttgagttgccaagagagcacattgcagctga

SEQ ID NO: 705492 - DNA, 1897 bp, Homo sapiens
ataattatttaatatttcattatatattacaatgtaatagaaataaatgagcaataaatgaactgtgcttgaatcaccctgaaaccatcgcccccatacccccacgtctgtagaaaaaatatctgccaaaaaattgaggactgctgatctatgacaacatagatgtaagatttaaccaacctgaagtttttaaaaaagcagggatatagaaggtatctcagggcactgagtagttttttttttttttttcaccagtcgaagtttaataatttcaagatatactgaaaacaaaggcaagaaacacttaaaatgataacaattctcaaactcaaagtactgtttgtagacatcagatctaatgaggtcacatcacrttaaaatgttattaaataattagctgtacaggcaatattctaagtactttacaaatatcaactgttttaatcttcttaagaaccctgggggagaggcactaatattaataccatttacaaatgaaaacacagagacagagagattaagttaatttaccagctgtcacacagctaataataaatgacgaaagtaagactcaaattcagcaatcaatggtttgatcccctgcactttgctgcatctcggagtgacttctgaggctcctgtagccagaaaggggcaaagcaaggtatagaacagagatttgacttccattgtctcatgctctttccataaaatcatctggtcagttcaaatgttcaactagtgttagaaagactaagaaattctatgtggtggactagtcaattgtcacaagcaaaaacagcaaaagaaatataaagtattcctgaaatcacaactttatgtgatatgattaaactatgatatacatttaaataccaacaacagaattcacaaactaacatatagaataattttaagtgaagtggctcattttgggttaaccccttgcaatcagctcacgtgatgtgaaaaaacaatataaccacaacccaaattaaaccaaagaagagctttcactgatatgaagcattgtttttgttaagccgcactacagcaaccatacccacacaaacagaactgacatatactaaagactttaccaataattagcaatgaaaatattcatgatgtcttccagcaatttaaagatacatcttctaagacaaacaataataatcagtgtatgtgcagcttttaaatagtgatttcatctttatgaaagttataacctcaaccttttaatgttgtgttttaaaaaaatcatacatttacacttccctaccaatgaaatttgactttttaaagactatagttaaaatttctatgctatttacaaggtaggataatagtttgacattcagttaatcaaaaatattatgtgttctcaagcatctgtaaatttagaatattataggctgaacatatttgtagagaattcaaactaccattattttattaagaacattaagtgaaacttgaaacttaacacatgatagatctttacttgtatcacttaacttatactgagtattttagcaattacatttttatttccagcaggtaatcaagaatacagattttcgtggcattggtggtagagtggtgatcatagctgccttctaaaaatgctgatttttatttatcttataaatgcgcaaaacgttttggagaaacaaaagcaaatttgaagtgagtaaaacttaacagttaacaccaggttacatagctggttaatggcagtccttgaaatacctagctcaaatctcaaaatcaaacaattgcatggggtaagaaatagaaagctttctactcctttgttctgtttgttatgctgcttcccatgcccagaaaacatgcagggaaccaagataatgcattcccagagctgcctcatcag

SEQ ID NO: 705493 - DNA, 1295 bp, Homo sapiens
  misc_feature 329, 330, 331, 332, 333, 334, 335, 336, 337, 338, 339, 340,341, 342, 343, 344, 345, 346, 347, 348, 349, 350, 351, 352,353, 354, 355, 356, 357, 358, 359, 360, 361, 362, 363, 364,365, 366, 367, 368, 369, 370, 371, 372, 373, 374, 375: n = A,T,C or G
  misc_feature 376, 377, 378, 379, 380, 381, 382, 383, 384, 385, 386, 387,388, 389, 390, 391, 392, 393, 394, 395, 396, 397, 398, 399,400, 401, 402, 403, 404, 405, 406, 407, 408, 409, 410, 411,412, 413, 414, 415, 416, 417, 418, 419, 420, 421, 422: n = A,T,C or G
  misc_feature 423, 424, 425, 426, 427, 428: n = A,T,C or G
ggatctacagtgttaggagtcaggatgagggttccctttgaggaggaaagagaagacagtgtttgggaagggccatgggcggattctggggtgctgtcaatgttctgtttcttgacttgtgtgttacaaatgtatattttgggctgggtgcagtggctgacgcctgtgatctcagcactttgggaggccgaggcaggtggatcacctcaggttaggagtttgaaaccaggcctggccagcatggtgaaacccagtctctactaaaatacaaaaaattagcaggcatgtcgcagcacctgtatccagctactcgggagctgaggcggagnnnnnnnnnnnnnnnnnnnnnnnnnnnnnnnnnnnnnnnnnnnnnnnnnnnnnnnnnnnnnnnnnnnnnnnnnnnnnnnnnnnnnnnnnnnnnnnnnnnnattccaccaaaaagacacatgcactgtatgttcactacagcactgttcacaatagcaaagacagagaatcaatgtagggcccatcaacagtggactggataaagaaaatgtggtatttatacatcatggaatactacacagccataaaaaagaatgatatcatgtcctttgcagcaacacagatgcacctagaagtcattatcctaagcgaattaatacagaaatagaaaatcaaatatcacacattctcacttataagtgggcgctatatcttggttatacacatacataaagatgggaacaatcgacactgaggactctaaaaggagagaggaagggagaggggcaaggctttaaaaacttcccatttggcacttggttcactatctgggtgaagcccaaacctcagcatcacacaacatacccttgaaacaaacctgtgtatgtaccccccaaattgagaacaaattaaaaatatttttaaagtctcatttttaaaagcaatatgatcaattaaaataacttaaataacttaccagcgacaatccataattaaaatattcagaaagcaagcaagtcatcttgtactaccagattctttttgaagaatgacatttataaaaygaagagaaccaattttacctgcctgtactaaaggaaaataagttcaagaaatgtcctagttataattttcagttagcccaacattaatattgcccagagtttagtgtgatagccactttgaagccctcgtaaattctgtcaccttggatgaatcacaactgattggtttatcaatgcatataattcagattgttctgaataaagctggcttccctgaaggacccaagataacttcatgaaata

SEQ ID NO: 705494 - DNA, 1295 bp, Homo sapiens
  misc_feature 329, 330, 331, 332, 333, 334, 335, 336, 337, 338, 339, 340,341, 342, 343, 344, 345, 346, 347, 348, 349, 350, 351, 352,353, 354, 355, 356, 357, 358, 359, 360, 361, 362, 363, 364,365, 366, 367, 368, 369, 370, 371, 372, 373, 374, 375: n = A,T,C or G
  misc_feature 376, 377, 378, 379, 380, 381, 382, 383, 384, 385, 386, 387,388, 389, 390, 391, 392, 393, 394, 395, 396, 397, 398, 399,400, 401, 402, 403, 404, 405, 406, 407, 408, 409, 410, 411,412, 413, 414, 415, 416, 417, 418, 419, 420, 421, 422: n = A,T,C or G
  misc_feature 423, 424, 425, 426, 427, 428: n = A,T,C or G
ggatctacagtgttaggagtcaggatgagggttccctttgaggaggaaagagaagacagtgtttgggaagggccatgggcggattctggggtgctgtcaatgttctgtttcttgacttgtgtgttacaaatgtatattttgggctgggtgcagtggctgacgcctgtgatctcagcactttgggaggccgaggcaggtggatcacctcaggttaggagtttgaaaccaggcctggccagcatggtgaaacccagtctctactaaaatacaaaaaattagcaggcatgtcgcagcacctgtatccagctactcgggagctgaggcggagnnnnnnnnnnnnnnnnnnnnnnnnnnnnnnnnnnnnnnnnnnnnnnnnnnnnnnnnnnnnnnnnnnnnnnnnnnnnnnnnnnnnnnnnnnnnnnnnnnnnattccaccaaaaagacacatgcactgtatgttcactacagcactgttcacaatagcaaagacagagaatcaatgtagggcccatcaacagtggactggataaagaaaatgtggtatttatacatcatggaatactacacagccataaaaaagaatgatatcatgtcctttgcagcaacacagatgcacctagaagtcattatcctaagcgaattaatacagaaatagaaaatcaaatatcacacattctcacttataagtgggcgctatatcttggttatacacatacataaagatgggaacaatcgacactgaggactctaaaaggagagaggaagggagaggggcaaggctttaaaaacttcccatttggcacttggttcactatctgggtgaagcccaaacctcagcatcacacaacatacccttgaaacaaacctgtgtatgtaccccccaaattgagaacaaattaaaaatatttttaaagtctcatttttaaaagcaatatgatcaattaaaataacttaaataacttaccagcgacaatccataattaaaatattcagaaagcaagcaagtcatcttgtactaccagattctttttgaagaatgacatttataaaacgaagagaaccaattttacctgcctgtactaaaggaaaataagttcaagaaatgycctagttataattttcagttagcccaacattaatattgcccagagtttagtgtgatagccactttgaagccctcgtaaattctgtcaccttggatgaatcacaactgattggtttatcaatgcatataattcagattgttctgaataaagctggcttccctgaaggacccaagataacttcatgaaata

SEQ ID NO: 705495 - DNA, 771 bp, Homo sapiens
cgctcattcgcttaaactctgctaggagagttccacaaggtgtcttaccaacacaaacacaagaatgtcaaaaatcaaactccacacctcaatcccctccaccccaccacagcccacctaaatacaaagcgtggttctcctctcaacttctttctctgggtcaacagtcacctagcttcaactcagagccatccccaacgctcttctcttctgttgctgtctccaatccacctccagtcttgggatttcttcctacgtggacttccctctccttcactgccatttcctctgctcctgtcctgcaaaaggactggattctggagccaaacaaacttcactaaatgtacatttgcggaaaaacggtgtaatttgtataaaatttgatgaaaatagaagcagtaacacttcaaagtccatgggtgaaagtcagccaagggtgaagaggcagaacagccacctgactgtacaggcagcgagacacaaacacagcagtaagtatgtgatcagattgtaatccattctcaggttaaccaagagyattgttcagatggcctcaaaggcatccaaaaaaaaaaaaaaaaccataatagaatcttaaaacagaccatcataagggacaggggaggcgattaaggatatgaggattaatgaaatctcagtgaggcaaaggagtgtagaaacaccaacatgaaattgaataacaaggctcatgttaatctgaagcagaagtgtcagttcatatgatctggttttgtttttatctcacacaaa

SEQ ID NO: 705496 - DNA, 888 bp, Homo sapiens
aaaatcacataaatgtctatgtttcccaaggacaaatttaacatgtaatatcattgtcacaacttactctttaaaaatttgtccaaatttttaaagactgtcccgacattagtgtgtcctgttaaactgaactgaaaaataagtcaaaattgaaatatatttctgccaaagtactttatatgtgtgtgtgtrtatatatatatatatatacatacatacacaatgaacgggaataatgtattatacatatttgcttcatgcttcatttattatccttgttttaaatgttgacttgaaaaaacagcttttctcaaaaacaaacaaaaaaagagccactgacagaatgaaaggcatttcaagtgttaactttaatacctttgtatttttagagacagggtctcactctatcacccaggctggagtgcagtggcgaaatcgtagttcactgtagccttgagcccttcggctcaaatgatcctcccacctcagtctcctgtgtagctggggctacaggcatgccactacactgggccaatttttaaatttttgtaaagatggggtcttgctatgttactcaggctggcctagaactcccggcctcaagcaatgttcccgccttggcctccgaaagtgttaggattataggcgtgagccaccatgcctggcccaataccttatttcaacagaggggaaaaaaaagttactctgtccccaaaaaactgcttcatatacttggaacatgtatgtataggtttcactcagggaacgatgcgtcagtgtaattgttctcagaaataactgcgtatttttagaataatttttacaattggttaagtcacagtaaaaatatacaacgattttgattatttttagattaaagctatcaga

SEQ ID NO: 705497 - DNA, 2894 bp, Homo sapiens
tgtttttataatgtaagaaacgtgtctctgtcaaagataaaaaggttgctatttagtcaagaatctagtctaagacttatttttaaaataccaaatgacaagaaacagagcaagcaggaaatatgaataacctaaaatggtttctgtaagtagattttcatattcattcattctccaatttataacaattgggctggctgtttttagccccaaaataagtttttaactgattcattcccaatgattaaacaaagccacttgacaccacacacaaaactatttctaattcctttccgattattttatagaacctataaaataagggtaggcctaaagaaaagaaatggcaagattcaggtcattaaatctggaatctgtgaatgagattttggtgtaaataaattattatgacacactgacatataaattatccgaattccttcccttctaaaagtacatttctaaattcctttttaagctgcacaaaaagttataaaatcttttgagttgtcaaataaccaaagacaattcttaattcatattttcaatagcataaacacgtacagtctgtaatagatattgactcacattccaaagtggagctcctaaaagttaataattcagtaattaaatcttctcactcatttctttctcagagcatccttatgaaaggcataaattaatcaatcatcccagaatacaactatggcaagcaggttgtgacccacatgtactgcagttggctccattctataacttggctgagggaaatttagaaagcattttcccatcaaaaagataaatgtttatttggcttgaaacacttcaggaagcaatagtttatgaaaataataatgtcatttattataccactttgaaatatatcttaataaacaataaaatagacttcaaaataaatacttatccccaaatcacttaattttaaaatgtttggcaaaagcaagaccaatacaaataaaaatcactttctttgctatccaagaggcaggcaagtttcttaaaattaaaagcaaattacatattgaaaagcctcaataaacacgagagataccttctcttacctacacattatttctctctccttttctattcaaggaatcccaatcagttcaaacagtactggagaggaagggaaggcccctaccccaggccaaggacatggatcacaactggtctaaaccaagtggagccatctcactacccttgattcatgatcgaccaggaggttcatgtgaccaaggtcttcccaacaatatgcgacgaagcaatttatggggtggggacttagaaaagcattttcttccctgattttaaaaaagagagccaatacattctacagacatctcctttgtccctttgtcctcctccccacttccttcttgaaacaggaaagtgatgcttcaactataaggcaaaagcacagaacaaaaattaacacattaaggaaggagaagcagaaaggcaggcagaaactgggttcttcatggcactggggagtggctacatccagcactatatcgactgcctgtcaacatcagataatgttaaaaactaatacataaacagcaaacgatttgtgcatttcaagtcwtttgaaaccagcaacatttaaaagtgatgagccatacaaaaagtatgacaactgaaagcataccttacataaagaggagtataaaaaggtactacaaatacagtaccaaattcctatgaaatgaacaaggtacttcaaagaatagacaaaacttctcatgcaatttcagataaaatgcaagagttacaacaaaaagaatacacaaaaatcataggttagaagatacaatactataatgatgtcaattgtcccaggtcaatctatagatttaatgcaatctcattcgaaatctgagcagagttttttggtctgtgtttacgtgtatgtcatttgacaattgattctacaagtttacatggaaactttacatggaaacttaaaactctttcccccattaaataatgatcaagacaatcctgaacaatgaatttagagcactttcattaccaaacataaagactatttgtaaaactacggtaattaagatacggtgataatggtgcataggtagacaaaacagaccaatgaaacgtaatctgtatttcctggagcaagtagaaagagtcctacaaagtcactcaatttaggacaaaggtgacactgcgctgcactggagaaaggatgattatgttaattataatgatgctgcatcaaacagacatttatatagaaaacaataaatcatgacctctatctacctcctactctggaattgtaaaaatccattccaggtaggttgtatacttgtagatggttctgtttcttgccacaactgttaccttagaaaaggtacaaaaaagtacaaaaaaaaaaattctgaagaaaaaagggggtagatggcctgaaaaagaactgagcaataaaagagggaaacaaatttgaagataaatccaggagacttaacagccacatagaaggagttcatttattcatctgtgcaatacatgtattatatggacctactctatggaaacagtgctctaggcacttaggatagacaaaaatccctctacttttagagcttatatcctaaatgaatttcagaaagagaaaagagagacaacaggggaaagaaataattttattacttctttctgggaaaataatatatcttcccacaaaagaaaaacattagtttccagattaaataacccaccaagacccagatcaaggccaccatgccacatcaacgaatatcaatgcaaaatttcaaaccatcaaagaaaaagacaagtaagagtattccaacagggaaaaacacacacacacaaaaaagaatcca

SEQ ID NO: 705498 - DNA, 2894 bp, Homo sapiens
tgtttttataatgtaagaaacgtgtctctgtcaaagataaaaaggttgctatttagtcaagaatctagtctaagacttatttttaaaataccaaatgacaagaaacagagcaagcaggaaatatgaataacctaaaatggtttctgtaagtagattttcatattcattcattctccaatttataacaattgggctggctgtttttagccccaaaataagtttttaactgattcattcccaatgattaaacaaagccacttgacaccacacacaaaactatttctaattcctttccgattattttatagaacctataaaataagggtaggcctaaagaaaagaaatggcaagattcaggtcattaaatctggaatctgtgaatgagattttggtgtaaataaattattatgacacactgacatataaattatccgaattccttcccttctaaaagtacatttctaaattcctttttaagctgcacaaaaagttataaaatcttttgagttgtcaaataaccaaagacaattcttaattcatattttcaatagcataaacacgtacagtctgtaatagatattgactcacattccaaagtggagctcctaaaagttaataattcagtaattaaatcttctcactcatttctttctcagagcatccttatgaaaggcataaattaatcaatcatcccagaatacaactatggcaagcaggttgtgacccacatgtactgcagttggctccattctataacttggctgagggaaatttagaaagcattttcccatcaaaaagataaatgtttatttggcttgaaacacttcaggaagcaatagtttatgaaaataataatgtcatttattataccactttgaaatatatcttaataaacaataaaatagacttcaaaataaatacttatccccaaatcacttaattttaaaatgtttggcaaaagcaagaccaatacaaataaaaatcactttctttgctatccaagaggcaggcaagtttcttaaaattaaaagcaaattacatattgaaaagcctcaataaacacgagagataccttctcttacctacacattatttctctctccttttctattcaaggaatcccaatcagttcaaacagtactggagaggaagggaaggcccctaccccaggccaaggacatggatcacaactggtctaaaccaagtggagccatctcactacccttgattcatgatcgaccaggaggttcatgtgaccaaggtcttcccaacaatatgcgacgaagcaatttatggggtggggacttagaaaagcattttcttccctgattttaaaaaagagagccaatacattctacagacatctcctttgtccctttgtcctcctccccacttccttcttgaaacaggaaagtgatgcttcaactataaggcaaaagcacagaacaaaaattaacacattaaggaaggagaagcagaaaggcaggcagaaactgggttcttcatggcactggggagtggctacatccagcactatatcgactgcctgtcaacatcagataatgttaaaaactaatacataaacagcaaacgatttgtgcatttcaagtcttttgaaaccagcaacatttaaaagtgatgagccatacaaaaagtatgacaactgaaagcataccttacataaagaggagtataaaaaggtactacaaatacagtaccaaattcctatgaaatgaacaaggtacttcaaagaatagacaaaacttctcatgcaatttcagataaaatgcaagagttacaacaaaaagaatacacaaaaatcataggttagaagatacaatactataaygatgtcaattgtcccaggtcaatctatagatttaatgcaatctcattcgaaatctgagcagagttttttggtctgtgtttacgtgtatgtcatttgacaattgattctacaagtttacatggaaactttacatggaaacttaaaactctttcccccattaaataatgatcaagacaatcctgaacaatgaatttagagcactttcattaccaaacataaagactatttgtaaaactacggtaattaagatacggtgataatggtgcataggtagacaaaacagaccaatgaaacgtaatctgtatttcctggagcaagtagaaagagtcctacaaagtcactcaatttaggacaaaggtgacactgcgctgcactggagaaaggatgattatgttaattataatgatgctgcatcaaacagacatttatatagaaaacaataaatcatgacctctatctacctcctactctggaattgtaaaaatccattccaggtaggttgtatacttgtagatggttctgtttcttgccacaactgttaccttagaaaaggtacaaaaaagtacaaaaaaaaaaattctgaagaaaaaagggggtagatggcctgaaaaagaactgagcaataaaagagggaaacaaatttgaagataaatccaggagacttaacagccacatagaaggagttcatttattcatctgtgcaatacatgtattatatggacctactctatggaaacagtgctctaggcacttaggatagacaaaaatccctctacttttagagcttatatcctaaatgaatttcagaaagagaaaagagagacaacaggggaaagaaataattttattacttctttctgggaaaataatatatcttcccacaaaagaaaaacattagtttccagattaaataacccaccaagacccagatcaaggccaccatgccacatcaacgaatatcaatgcaaaatttcaaaccatcaaagaaaaagacaagtaagagtattccaacagggaaaaacacacacacacaaaaaagaatcca

SEQ ID NO: 705499 - DNA, 2130 bp, Homo sapiens
cattctttaaaactcattcctggcaaaaaataaaaataaaaataaataaataaataaataaaataaaattgtaggcaaagtcaaaagaccaatggcaaactgggaagtaactttcacaacttatcttccaaataaataatcttccttcctctttagaaataaaaacaataggccgggcgcggtacgtcacgcctgtaatcccagcactttgggaggctgaggcaggtggatcacgaggtcaggagatcgagaccatcctggccaacatggtaaaaccctgtctctactaaaaatacaaaaattagctgggcatggtggtgcatgcctgtaatcccagttacttgggaggctgaggcaggagaattgcttgaacgccaggaggcagaggttgcagtgagctgagatcacgccactgcactccaacctggtgacagagcaagactctgtctcaaaataaataaataaataaaatagaaacaataattatacaaaaatccaatatacaaataggcaaaagacatgaaccaacagttgacaaaaagacaaaagtctttaaatgtttttaaagatgttcaactatccccataaatgtaaataaaaactacactgaaatagcacttctcacctatctggcaaaaatctgctcttgtgacaagcctcagaagaaactgaacgtcacaaacactgttgatgaaagtacaaaataatatccccataaaggggaattctgcaggatctaataaaagtacacatggcaaaattacccagtacttaatgtaactgtaaaaaggagtgaggaagatctctatgtgctataatggagtaatctccaaaatatattgtgaaataaaaaaaaaaagaaaggaggagaccagagaccatagactactacattgtgtatgagaaggaagaaaaagcaagtactttcttttacaacaaaaaagtaataaaaatggttacctatagggtgatactgggaagaatgaaaacagagaatgcttctctatgtagaactttttatttaattttgacttcaaacctatttatatggaaagaattaatccagaaattgaaaactcagaattagagaaacagaaataaaccactattaacatcgaatcggtaaaatatctacacagaaaaaatatatgaagagacttttttttttttttgagacagaatttcattcttgtcgcccaagctggagtgcaatggcacaatctcggctcattgcaacctctgcctcgcaggttcaagcaattctcctgcctcagcctcccaagtggctgggattaccggtgcccgccaccacgcctagctaatttttttgtatttttagtagagacagagtttcaccatgttggccaggctggtctcaaactcctgactgacctcaggtgatacacccacctcggcctcccaaagtgctgggactacaggcatgagccaccacgcccagcctggaaaaaagacttgaagagacttctaaagtcagtgttctgtctctacatcctcagcagtatatattgaaaggactatgcccttcaaaaaaacctgcaaggaaatcttaaattttattcaatagttttaattttaatacagcaattttaaaacatttatgtgtatagtaagataaagcaaataagttgatatcattaagaaatcactattttcagtgtaagagaaaatgaatagaaatatataatgaaataagttaaggggaagaatttttctgctaaatttgaattgaaaacattgatacaaactcaattatttttatttcttagttccgaccactgaaagagttctgaagtaatggcctcctattgcaatggtacccagaatcttggttttcaaattattctcccctaaaaggaaccagagtttcttggaaaagaggttccaggtgttagaaaagcacaagatgaaaagtgactcactcaaactgaaaatgaatacaattgagacacatgtccactaccaccattctctagcaaacaatctactcctgtatgaggcactccaatttacttttttgttttgccctctccatgttcaatggctttacattacactgcagaagttgcggcctcaaatcagcaaggtcacaggatataagatraaaactcc

SEQ ID NO: 705500 - DNA, 633 bp, Homo sapiens
tgcctagcaataatggaaagaaaaacttaatggatataaggtcagcagcagaatggaggcgacaggagcgcgttcgtgaactcagagatggaccgataggaactgcccatctgcccattctgaacagcagagagaatacgatggaataaaatgagcaaagttcccgacaccgatgagacctgggaatacgatggaataaaaggaacaaagtccccggtgccggtggggccacaacacaagatccagcattccagttgtggggatctgggagggtccggaggagctgagatggagccgcagaggcagcaggcagcgtcttcaaaactaatccagtgtctttgctgttctgtgggtctactcaggttgtctgtgtttctcttgagtcagttttggtagcttttgtcttttcaggagtttgttcatttcacctccgttattaattttcggcatgcagctgttcgtagtattcctttacagsctttatctctggaaggtcagctagtgtctctttcactcccaactgcagtgatctgcaccctctttcttgtttccttggttggcccagctaaaagtttctgtcaattctgttgctattctcacagaaccaactttaggcttgaccgatttctttta

SEQ ID NO: 705501 - DNA, 631 bp, Homo sapiens
tcccagccccctcccctggccagtgctggcctggaggcctcaggacctgggagtcggaaggaggagatggcgctgtgatgggtggcaggagaccagacaggcatcagcaagcggtggytatgcctgggcccaggaccgcacgtgggaagggactctgcagatgtgtccggggcagggatggtgagaccacgggcgttcctgcattatcctggtggcccgctacaatcacgcgggtcttcacacgtcagaaagggaggcaggaaagtcggctagagatccgaagatgtgcgctccggctctgagggtggaggaaaggccgtgtgcaaggcacgtgggtgcttctgggagccagaaaaggccggatgtggattctccccagagcctctgaaacgaaccggccctgatgacccctggcctttagcccagggaaacgtgtgacttccagaacccgagatcacatcgtgttgagtttttggtttgtttttttgagacgaggtctcactatgttgcccagggtagcgaacaggggtgcgatcacagctcactgtggccttgacctcccaggcccaagccattgtcctgcctcagcctccagagtagctgggattacaggcaggtgctaccacacccg

SEQ ID NO: 705502 - DNA, 631 bp, Homo sapiens
tcccagccccctcccctggccagtgctggcctggaggcctcaggacctgggagtcggaaggaggagatggcgctgtgatgggtggcaggagaccagacaggcatcagcaagcggtggctatgcctgggcccaggaccgcacgtgggaagggactctgcagatgtgtccggggcagggatggtgagaccacgggcgttcctgcattatcctggtggcccgctacaatcacgcgggtcttcacacgtcagaaagggaggcaggaaagtcggctagagatccgaagatgtgcgctccggctctgagggtggaggaaaggccgtgtgcaaggcacgtgggtgcttctgggagccagaaaaggccggatgtggattctccccagagcctctgaaacgaaccggccctgatgacccctggcctttagcccagggaaacgtgtgacttccagaacccgagatcacatcgtgttgagtttttggtttgtttttttgagacraggtctcactatgttgcccagggtagcgaacaggggtgcgatcacagctcactgtggccttgacctcccaggcccaagccattgtcctgcctcagcctccagagtagctgggattacaggcaggtgctaccacacccg

SEQ ID NO: 705503 - DNA, 631 bp, Homo sapiens
tcccagccccctcccctggccagtgctggcctggaggcctcaggacctgggagtcggaaggaggagatggcgctgtgatgggtggcaggagaccagacaggcatcagcaagcggtggctatgcctgggcccaggaccgcacgtgggaagggactctgcagatgtgtccggggcagggatggtgagaccacgggcgttcctgcattatcctggtggcccgctacaatcacgcgggtcttcacacgtcagaaagggaggcaggaaagtcggctagagatccgaagatgtgcgctccggctctgagggtggaggaaaggccgtgtgcaaggcacgtgggtgcttctgggagccagaaaaggccggatgtggattctccccagagcctctgaaacgaaccggccctgatgacccctggcctttagcccagggaaacgtgtgacttccagaacccgagatcacatcgtgttgagtttttggtttgtttttttgagacgaggtctcactatgttgcccagggtagcraacaggggtgcgatcacagctcactgtggccttgacctcccaggcccaagccattgtcctgcctcagcctccagagtagctgggattacaggcaggtgctaccacacccg

SEQ ID NO: 705504 - DNA, 586 bp, Homo sapiens
ccaggggacggcgcaggcagaggtgctgaggacggtcaggggcagcgaggaacgccacaggaggccgacgcaggacgtacgtcgagcgatgttccacggctggctggaggacgcacgctgcctgcctccaagtctcacagtcaaggaaggaccgatggtcggctgcgtaggactgctgcaggtacacgcaaatgtgtcgaccggcacagaagacagccaggacgaaatgttcagcgttgagtgcttttcaaaaagcatgtggaagcaactccacggggaaagaaaagtcttttcccccagcggggccaaaacgacccaatgtccacacggagacagtgagatgtggacctcccctcacgccacgarcagaaccagcgggataaggggcttagtctaaggtcgattcaacactggggtcagcagggaattcttgggacaaagcactaccaccatcactaccacaggaaaaagtgattcgttatacttcatcgagatttaaaactgcttatcaaaagaaagcattgagaaaatgatgagaacacaatccagtcgaaaatggcagggatttaagtaggtattttgcaga

SEQ ID NO: 705505 - DNA, 1058 bp, Homo sapiens
ttaagaagccctcactgttggaatagcttttccatggccttgtatagaagttctccaagaactttggttgttcccactgtaaaccctgccttaagtgcaacccataaatgtgtctatgcaatacattagaaggccctagcagacagaaaagtctcatctgatgtatttcctttataatacctagcacatagaaaataagtttcgggttgaattaaattcagtggagttgaaatggatccaatttcttctaattaagcgtttttcctatttatgaatttctcattctcaagtttggttgtgtatttttaaagtaacatgaagcaatctaaaacaaatacaggaaaaagccaaagctctagaaaagctctagtttaaacaaattcttggttctatttaagatttcaggaaaaaggttctagtctaacacaaacaaaattttttcttaacaaataataattagccacattaataaatacataaactaaactccatcattttaagacattgaatgatatttaaacaataagacttccattactttattatttcaaaaacacttattcattctagcacacttgtaactttgtaaaaggaaatatccatgcataaagacttgatgagaactcaggaatatgaaaacaggttgatttgccaagggaatgaggttgtggagaaattattccttttatctacttttttttttttaattatactttaagttttagggtacatgtgcacattgtgcaggttagttacatatgtatacatgtgccatgctggtgcgcggcacccactaactcgtcatctagcattaggtatatctcccaatgctatttttaagtgttcaacacatttagaaaataaactaaaacaaatgtttgtatcatagcrgtagttactctaaacccaaagcagttatttcaagaatactggttccaagaaagaggttaggttttgactaatcaaaattagtcacatttcaaaagaaagcacaagagcaacaaaattctcctacagaattatttcctaatattcttataattaatcaacttataaga

SEQ ID NO: 705506 - DNA, 595 bp, Homo sapiens
gtgcctcagagttgttgtaaattaatacatgtaaagcactgaaatcagcctggtatacagttagtgttatgaacgttattttcttggaaggacagaacttattttcatggtctaagcctgaaagtctaaaaaatgtgagagaagaggaaagaatctagagtctcaccatgagggagaaaagtcaacttgaagcaggacagggtcattgacaatttcctgtgattctacagctgccttgtacactatggtagctcctgtccacttactgtttagattttgtgatttagaaatgaattaagggtgggcatggtggcacacctgtaatgccagcattttgggaggccaagttgggcagatcacctgaggtcaggcgttcaagatcagcctggccaacatggtgaaatctcgtctctacaaaaatacaaaaattagccgggcatgatggcgggttcctgtaatcctggctactcaggaggctgaggcaggagaattgcttgaacctgggagatgraggttgcagtgagacgagattgcaccactgcactccagcctggaggatagagtgagactctgtctgaaaaaaaaaaaaaaaaaa

SEQ ID NO: 705507 - DNA, 608 bp, Homo sapiens
gagaacaatctaagcatgacaggtgatgtcttcttttatgactatgtaactgcaattgtaagaatgtatttcgtgtcagtatttttggatggatgaataattttttaggttattgaaatctaagatcttaactcaagtaaaacaaggttttcaaataaaatttgatccttaagctcattctaygttgccaagacaactcagcattaagcataacatttgcttttcaaaaagcatatcattaactataatccgcaccatgagcagctgagtagaaaggcaggttgaacctgaactccaaaaccaacctaaaactcagaaagtggaaggagcatcggctaggccctggccactgggattcagatgcaccgggttcacactctagctccaccgcgaaggtagttttatatccttggtcaagcctctctcaccctctccaagcccattccctgatctttaaaatggagattttacacacacacatacagctattataacaattaaatgaaataagctacatgaaatacttaatggggtgccaggcccaacatacacattcaaaacgtgctagctgcaaatgtttttattttgtgaactgaaaaataaattca

SEQ ID NO: 705508 - DNA, 515 bp, Homo sapiens
gaggatggaatgtttttcgttttaaaaaatgatgtctccaaatgtttaagtctgtgatccattttgaattaatttttatataaggtgtgaagtttaagacactctttttcggaatttgttgyggggagcagtatttgggtcttttatttttttctgttggttttggcctatggttatctaattgctccagcagcatttgttgaaaatttcaccatggaacttgaaatggtttggctgtgtccccactcaaatgtcaacttgaatttatctcccagaattcccacgtgttgtgggagagacccggggaggaactgaatcacaggggtcagtctttcctgtactattcttgtgatagtgaataagtctcacaagatccgatgggtttatcaggggtttccacttttgcttcttcattttctcttgccaccaccatgtaaaaagtgccttttgcctcctgccatgattctgaggcctccccagccatgtgaaactgtaagtccaattgaacctctttt

SEQ ID NO: 705509 - DNA, 515 bp, Homo sapiens
gaggatggaatgtttttcgttttaaaaaatgatgtctccaaatgtttaagtctgtgatccattttgaattaatttttatataaggtgtgaagtttaagacactctttttcggaatttgttgcggggagcagtatttgggtcttttatttttttctgttggttttggcctatggttatctaattgctccagcagcatttgttgaaaatttcaccatggaacttgaaatggtttggctgtgtccccactcaaatgtcaacttgaatttatctcccagaattcccacgtgttgtgggagagacccggggaggaactgaatcacaggggtcagtctttcctgtactattcttgtgatagtgaataagtctcacaagatccgatgggtttatcaggggtttccacttttgcttcttcattttctcttgccaccaccatgtaaaaagtgccttttgcctcctgccatgattctgaggcctccccagccatgtgaaactgtaagtccaaytgaacctctttt

SEQ ID NO: 705510 - DNA, 612 bp, Homo sapiens
  misc_feature 569: n = A,T,C or G
tttaagcaaaggggtgtcatggttggagtgtcccctgtatttgatccccagacgcaggtcctagggcttgtgcattcagggtgttttctaccatctaccatgtttagggattatcttggtggatatttttgttattgtgaagcttactcatttctaagttctggaattattaatcacctgcttgctcctggcacattttgctagaggttgtggatatgctgaggtttttttgttttttttttttaagacggagtctttctctgtcgcccaggctggagtgcagtggcgcgatcttggctcactgcaagctccgcctccggggttcacgccattctcctgcctcagcctcccgagtagttgggactacaggcgcccgctaccgcacccggctaattttttttgtatttttagcagagatggggtttcaccgtgggctcgatctcctgacctcgtgatccacccgcctcggcctcccaaagtgctgggattacaggcatgagccaccgcgcccggcctatgctgaggttttaaaatgggtacccaaccacatttaaatagggcttctttgnccatttttwtatatatatatatatatatatatatatatatata

SEQ ID NO: 705511 - DNA, 612 bp, Homo sapiens
  misc_feature 569: n = A,T,C or G
tttaagcaaaggggtgtcatggttggagtgtcccctgtatttgatccccagacgcaggtcctagggcttgtgcattcagggtgttttctaccatctaccatgtttagggattatcttggtggatatttttgttattgtgaagcttactcatttctaagttctggaattattaatcacctgcttgctcctggcacattttgctagaggttgtggatatgctgaggtttttttgttttttttttttaagacggagtctttctctgtcgcccaggctggagtgcagtggcgcgatcttggctcactgcaagctccgcctccggggttcacgccattctcctgcctcagcctcccgagtagttgggactacaggcgcccgctaccgcacccggctaattttttttgtatttttagcagagatggggtttcaccgtgggctcgatctcctgacctcgtgatccacccgcctcggcctcccaaagtgctgggattacaggcatgagccaccgcgcccggcctatgctgaggttttaaaatgggtacccaaccacatttaaatagggcttctttgnccatttttawatatatatatatatatatatatatatatatata

SEQ ID NO: 705512 - DNA, 612 bp, Homo sapiens
  misc_feature 569: n = A,T,C or G
tttaagcaaaggggtgtcatggttggagtgtcccctgtatttgatccccagacgcaggtcctagggcttgtgcattcagggtgttttctaccatctaccatgtttagggattatcttggtggatatttttgttattgtgaagcttactcatttctaagttctggaattattaatcacctgcttgctcctggcacattttgctagaggttgtggatatgctgaggtttttttgttttttttttttaagacggagtctttctctgtcgcccaggctggagtgcagtggcgcgatcttggctcactgcaagctccgcctccggggttcacgccattctcctgcctcagcctcccgagtagttgggactacaggcgcccgctaccgcacccggctaattttttttgtatttttagcagagatggggtttcaccgtgggctcgatctcctgacctcgtgatccacccgcctcggcctcccaaagtgctgggattacaggcatgagccaccgcgcccggcctatgctgaggttttaaaatgggtacccaaccacatttaaatagggcttctttgnccatttttatatatatatatatatatatrtatatatatatata

SEQ ID NO: 705513 - DNA, 615 bp, Homo sapiens
ttgcataatgttatctaattcacagtaattctatcaaatgggtgttgtagctattctgcttgataaatgaggaaacatccccaggatcataaaactaccaagggraaggactgaaaattgaactctatgtctactgctctttacacaactctgttctttccaatccttataggcagcaccacgcatgaggcagtcttagagaaagctgatctaagtaagggaaggcccctgtgcataaagagcttgcagtttagatggggattcaaatgggcccaggtccatagcactctggtaggtattagaaatgaatgcagttgtccatggaaatgcaaatgtagatggcgggaaacaggagaaatttgagcatgcatttctcttctaaaaaggacagttactactcaactatttatagccattgaggaagatatgttcgctcttgccctctgaatttttaagagaaacaagaaatatggatttttgtgtgtatcttcttacttttagatactggaaactaaaatccaaaataataataataacagtaacaatacacagatctatagaatgagcttaatagtggagctcatcatcattctccagagatgtctgtcaaaataa

SEQ ID NO: 705514 - DNA, 615 bp, Homo sapiens
ttgcataatgttatctaattcacagtaattctatcaaatgggtgttgtagctattctgcttgataaatgaggaaacatccccaggatcataaaactaccaaggggaaggactgaaaattgaactctatgtctactgctctttacacaactctgttctttccaatccttataggcagcaccacgcatgaggcartcttagagaaagctgatctaagtaagggaaggcccctgtgcataaagagcttgcagtttagatggggattcaaatgggcccaggtccatagcactctggtaggtattagaaatgaatgcagttgtccatggaaatgcaaatgtagatggcgggaaacaggagaaatttgagcatgcatttctcttctaaaaaggacagttactactcaactatttatagccattgaggaagatatgttcgctcttgccctctgaatttttaagagaaacaagaaatatggatttttgtgtgtatcttcttacttttagatactggaaactaaaatccaaaataataataataacagtaacaatacacagatctatagaatgagcttaatagtggagctcatcatcattctccagagatgtctgtcaaaataa

SEQ ID NO: 705515 - DNA, 883 bp, Homo sapiens
tgaaattgctacaatttgcmctggtactgggctcagaatgactgcctgtaaaatctgatctttctaagggtttttcttcttgaaaagaacgctcaaaatcaacaggtaatttttggctttgccttctaccttctgctaaaatagtcacttctttatcttgtgaattactatgcattttaaatgatgaaggggaagaggttttctgtttaagatctctgggaggattttgttcttcagtgaaatgagaattaaatacccccacagatgctccagtacactggctaccttcagtaacaccaaccttaacaacagaggaattggaaatgcatttagaatgtcggtgagatgaaaaagtgatggaggtagtaaactttttcatgggttctggggacggcatttgtgatgaagaatgaaaatccacttctttaggtggcacaaaagcaggttctactaattctgacagccaagggtccatcttttcatcgaatggcattcgaagacctttgctgattttgaattcatcaggtataaagttctgaaatggggaatgactttttaactgcaaggaattccaaactttgaaatgggagttgttctggtctaaggatgcagaaaggttgacatgcttggctctgcatgatgatgggttctgccgtcctctggtcatttctgagggtccagcagatctgaaagcacaagggtgtctatctagttgtggatgttcagaagttagagtccgggaacatcccttttcatggctctcaataataatgtgactacatacagcttctggcttgcatcccattccccgtggactctgtaaccctagaagatacaaacaaacaggttcttatttgtagtagtcccagtagttataaacaaa

SEQ ID NO: 705516 - DNA, 634 bp, Homo sapiens
tggggtcattttccatattaagattttttaactgtactaattccargaatctcagagctgtttctgccagcagagctatgttttctataaaataaaaaggaagaaaatttataattacaatcttaactctctgtaaagcttattaacttttcctccctgtctttatacataaataatcataagcctatgggaaaaacagaacttttcaatttagcatttaacttaatcagattttagtaacccagctcataatctgtaactgtctccaaaccactagtcttatttttgaaacacagcttaaaaaaataataatataaaaataatctaatacctcatctactgaggaccaaaaaaaaaaaaaagcctaattctctgcagggacttaccttttaaacagtatccttgacaagtgagagatatttattagactaacaaagaaacatccacattaaaataacagataaagctaagctttggcatcagaaagacctgggttcaaatctcaaccttgccacttactaacttgaccatttaagcaatctgagactgtttcttcacatataaatgaaaagtcacaactgcctcaaagagaaaccattgttagactgctttacaagtgatactcaagttctta

SEQ ID NO: 705517 - DNA, 634 bp, Homo sapiens
tggggtcattttccatattaagattttttaactgtactaattccaagaatctcagagctgtttctgccagcagagctatgttttctataaaataaaaaggaagaaaatttataattacaatcttaactctctgtaaagcttattaacttttcctccctgtctttatacataaataatcataagcctatgggaaaaacagaacttttcaatttagcatttaacttaatcagattttagtaacccagctcataatctrtaactgtctccaaaccactagtcttatttttgaaacacagcttaaaaaaataataatataaaaataatctaatacctcatctactgaggaccaaaaaaaaaaaaaagcctaattctctgcagggacttaccttttaaacagtatccttgacaagtgagagatatttattagactaacaaagaaacatccacattaaaataacagataaagctaagctttggcatcagaaagacctgggttcaaatctcaaccttgccacttactaacttgaccatttaagcaatctgagactgtttcttcacatataaatgaaaagtcacaactgcctcaaagagaaaccattgttagactgctttacaagtgatactcaagttctta

SEQ ID NO: 705518 - DNA, 666 bp, Homo sapiens
tttttttttaacatctgttcttccctcttcacttagcttctgcttgtccacctagaaaatttctagtaatccttgtaagattcagctcacatgtgtttcctttctgatatttttcctgagatagcagaattacttctccactgtgttcccatcctaccttgcacaacctcagtttctatttcattagattgtcatcattcatattcatatatcatctcaactatcggtcttattacatcatgtcttcccatccttggtagaaagtaggcaccccctaactatttsctaaatgaattagtgaaaaaacaatgatcccagtcagctcccattagattgtaagtgcacgatgaatatatctgtatctcctgcatcacgtagcacttgtatctctaaatactgcccgacacttactgatttctaattatgtaccaggtataggtttaagcacttcaatccattcatttaatcttctcaataactttaaaaggcaggtaccagcaaagagaaatttgataaatttactcaggtggaacagcttggattgaaatgcagtcagttgactctagagcatgaacttttaactactatacaatattctgatatgactatagaaagtatagagtatttcaacaaaagcaaatattttaaaagctatgaatatatatg

SEQ ID NO: 705519 - DNA, 1234 bp, Homo sapiens
tgatgaaaattctcagaatgttatgaactcatccgtgttcctctatactatgttctggcgtggggttgaggaccatgatgggaacgagttaggggttttagcataacacacagaattagaatcttttgttcacttgtcttcccttgttttcttgcttcacttcactgtctttgcctagaaatatgtaggttaaattttgagacagcctttccagcataagtttgtaaatccttcaaaatagaaatgtttttgcaaatgctyggtttgaaacaaatgctaattagtagattgtcaagacaagggttttgaacgtttgagcaatatcattttgttgcatgacacaataagtgtgttctgagggctgggtgtggtggctcatgcctgtaattacagtttgggaggctgaggtggaaaaatcacctgaggccagaagtttaagaccagtatgggtaacatagcgagacccccctatctacaacaaataaaaagttagctaggtgtggtggcccatgcctgtagtctcagctactcgggaggctgagacaggaggatctcttgagtccaggagttccaggctgcaatgagctatgagtgcactactgcactccagcctgggtaaaagaatgagaccctgtctcaaaaagaacaaaaaaagaaagaaaacaagcgtgttcttaacaccttttctattcgtggctctcatacattcatgttccttgaaaattacttgaggttcttactaggaattgtaattccttctgattcatgcggtctggaatggagattagtcacctggatgttggcattagtcacctggaagttgaacaccacattagatgactcgaatgcaggtgaatcacactttgagagaagagggttatgtgcatagcattctacttgggattgtgagggacataaaagaagtatatgggccgggcgcggtggctcacgcctgtaatcccagcactttgggaggccgaggcgggcggatcacgagatcaggagatcgagaccatcccggctaaaacggtgaaaccccgtctctactaaaaatacaaaaaattagccgggcgtagtggcgggcgcctgtagtcccagctactcgggaggctgaggcaggagaatggcgtgaacccgggaggcggagcttgcagtgagccgagatcccgccactgcactccagcctgggcgacagagcgagtctcaaaaaaaaaaaaaaaaaaaaaaaaaaaaa
